United States Patent Application Publication US 2022/0102000 A1 - sequence listing, part 16

SEQ ID NO: 3244 - DNA, 22216 bp, Unknown
  16S sequences of unknown bacteria
gtgcgtccagacgctctatataatgatcgcaaagtgcttccatctcccctcggtgctcttcccccgaggggtcccacacccccacggtcacaaaacccgcttctttggcggtgcgggccgcatgaagagcatcctcaaaaaccagggtgcactccggtgcgcttcccagcttttccgccccggccagatagatatggggatttgtcttaggtccatactccccgcagtctaaggcaaaggaaaaatacttccacagccccagccgctccatagccgcctgggacagctccttctgggtggcgctgacgatgccgcaggggattttttgctgccgcagctgctccagcagtgcttcggctccaggtttggccggaagatgctgacggtattcttcttccgccagttcctccaccagctttagcacctgctccaccgaaactgcaaaaccaaaggtccggatgatatactccgccgcctggcgctgatccatggcctcgatggtgcgggccagatcttccgggggttctccccccagacgccgtaccagctgaaggggaagctgctgccacatctccatggactgaagcaatgtgccgtccagatcaaacaaagccccctggatcttcactgaatggcctcctcggtcagcttccgcaatccggctgccgcggcctgggggtcctccttggcataaatggccgaaaccaccgccacgccgcagatgccgctgcctttgagagacaaaatattgctttccttaatgccgccgatggccaccaccgggatgtccaccgcctggcaaatggctttcagtgtatccaggctgacggcgtcggcatcgtctttggtgccggtggggaacaccgcccccactcccaggtagtcggcgcccgccgcctgggccttgagagcctgctccactgtctgggccgagacccccaggatcttgtccgggccgatcttctggcgcacctgtcccgcttccatatcgtgctggcccacatggacgccgtcggcttcgatctccaccgccagctccacattgtcattgataaggaagggcacctggtgctttttgcaaagctcctgaatctgccgggcctccttctggaattcctccttctccagatccttttcccgcagctgcaccatggtcacgccccccaggatggactgctccaccgcagaatagagggtacgctcccccagccagctccggtcggtgatgccataaagcagcagatcttttttatcgcacttcataccgggcgccctccatcagctgcttgccgtccatatgatagatggcgtcgatgatccggttgcggtaagagctgttgccctcgccctcttccagacgctggaatgccagctcaccggccaggcccatcgtaaccacagctgcggcggccgcttccagagtatgctccgggtttgcggtgacaaaggccgccgtcagcccggacagctggcagccggtgccggtgatcttccccatctccggccggccgttgcgaatgacaaagcaccgctccttgtcggccaccagatcaatagcgccggtgatggccaccacgctgtcaaaacgagcggccacttccttggcaaaggcaacggcagcatccaggttgtcctctgtgacggcgtcggacagatcggcgtccaccccccgggtcttgccgctgccctgagccagggtcttgatttcggagatattgccccggatgacggcaaaatacacctgctccagcagatccagcgccgtcttggtgcgcagcgtgctggcgccagcccctaccgggtccagcaccaccggatgggaaagggcattggcctttttcccggcggcaaacatccccggaatggtacggctgttcagtgtgccgatgttgatattcaggccgccgcagatggaagtgatctcctccacctctcccaggtcatcggccataatggggcttcccccgcaggccaacagcacattggctacatcgttgacggtgacataattggtgatattgtggatcaggggagacttttcccgcacattgtccaaacaattacccagcattttgcttcctcctttttcaataaaaaacgccgcgggcttgccctccggagaaggcctcccgcggcgaaaaccgcaaacgaatggactccctccgttggcattacccaaatcaggtagcaggtcgaagcgcacagcttcctctcagcccgtttgcgagctccctggtcacgatatgatgtcgttttttattataaaaccgggtgcaaaaaattgcaaggattttgtccttacattcccagccagggctggagggcattgaacagatatcccaccagaatgatccccacagtgcagatggccacaaacactgccagcagccggggctttaccgcgcggcgcagcataatcagggagggcagggacaaggtggtcaccgccatcataaaggagagtgcggtgcccagcatggcccctttgcccagcaaagcctgggccacagggatggtgccgaagatgtcagcatacaccggcacgccgatgatggtggccaatataacacccaagggattttttccgcccagcaccgcttccacccagctctggggaatccagttgtggatcagcgctccaatgcccacaccgatgaggatatagggaaagaccttccggaaggtggaaagcatctgctctttggcataaaccacccgatccttttgagtcagcaccggcccctcggcctgaacagccactccctggcggataaattcctccacctgatcttccagatgcagccgctggatgagggcgccccccaccatggccaccacaagccccagaatcacatagatgaccgccactttggctccaaaaatccccatcagcagcaccagactgcccaggtccaccatgggagaagaaatgaggaaggagaaggtcaccccaatcggcagtcccgccccggtaaatcccatgaacagcggaatggaagaacaggaacaaaagggcgtcaccgttcccaagagggccgccaccagattggcccccattccccggaaccggcccaggatcttccggcttctctccggcggaaaatagctttgcagataggagaccaaaagatcagcagacaaagcagtactgtaattttgatcacatcatagagaaaaaagtgcaggcttccccctatagggctggttgtatccactcccactttgtctagcccccggccaatcagatcattgagccaggccattcccagaagctgatcctgcacaaaattccacagactcattctgctcccgcctttcatcaatcgatttaaatatttcaatgtgtctattttacctcttcccctggcccttgtcaagaagaaattcacattcttcaatattaccgttttacttccaaagatgcaaaaacgaaaaaaagagacacgaccgattgtcgtgtctctttttctggtgcggtcaacgggacttgaacccgtatggttgcccacacgcccctcaaacgtgcgcgtctgcctgttccgccatgaccgcatggattgaattagcttgttcattctatcacactgccccccaaaatgcaagagctattcctggggttttccaaaaaaatcttgccccccttctcattggcccggcttttgaaaaagagggcatccctgaggacgccctcttttttcctatcaaacccgggcagcacttttataaactctggtaagccagacagatctggttcactgcggcctcaaattctgtggtaccggtatcgatacagagatcatacccatccggcgatccccaagccagcccggtataggattcatagtattttttccgccgcttatccattttccgcacaaggcgcaccgctttttccctggtcaggttctcctgctgcattttccgttcaatccgcttttccaaaggagctcggacaaagacccgcagcagtttcaccttttcttcccgcaggacatagtcggcacagcggcccacgaaaatgcagctttcccgtttggcaatctgccggatttcatggctttgcagctcaaacagcacttcggaagtgggcagtccccgggtgacatggtagtttccctcatggaccgtccggtataaaaacggattggtcgccctttcgtccgcagactccatcatcttttccgagatctccccataccggcaagccagatggaacaaatccttttcatatacccggattcccaacctggagcctgtgcgcagggcgatctcatggccgccgcttccaaactcccggccaatacagatgattctattttccactttcctccacctctttcggaaccaaccgctcttttactgcatgggggacatcaaatgagccattgtgggcaaagtccagtttcacagacactgtgcccggtgctgcatcctccaggccgtccactccgccactgcaagtgcagctgatctcctgaatcctgtttccgctgaccctgacctgcacgcttccagcggaaagggttaccggcagcgattccagctccggcgccgccgcataggccaccgccttcataccgctttcgtccagcgtcagtgtatagagccaggtgttgttcccggtatcggtgcagtcaaattccccgttcaggcaaatctgcttcaacacttccagcaatcgggcgtaattggtcagctcgttgttctccgcagtcagcagcacaccgttctgatcgcagaatcttccttccgagaaatagacggaaaggtcgtccttgcgcacacatccgattttgctgccgtccaccagggcctggccgtacttcatcttcccattgagggaaacagggccacattccacgcccaaatccacatccgccgtaaaagactcttcctgtcccagttctttccacgcgctgaacagacggaacaaatcttccgaaatgggtgcttggccttgtatctctccagaagaaatcgcctcccgcaccgggtccggtatgaccaatgctttatccatggtctcgggtttgagctgggcctccagagaatataccgttttctcatcgtccgccagtgttcccttggaaacaaagcgcaaggactgaatctggtctcccgaagttgtcagttcaatggtcagcttctgggtatcggacagatcttctgcctggttgggaagcagcactttcagcagctttccggcattttccccctcggccgtcatctggcaggtcacctttccaccgctgcggcttgtggagaaagaaacggtctcaaaaagctctgcggcctgcgctggcagctgtgaataatccggatggagatcactgaccttgtaggccttgccgttttccagaataatggcgccatcggcgtaataaagagaaatgccgttgttctgaatacaggtaatttcctgcccatccaccttcctccgaaggatatccatttctgtattgatcagctcgtcatccagctgaaggctcacatccatggtcatggcgccttcactttgcccggccaattcctgcagcagctggcaggcctccttcccggcggccagttttccacccaccagcacccacaaggcaattaccaccagcaaaaggaaaagcagcagcgcaatcagccactttttctttttgacgggctttctctccgccttgtcatgcttctttgcctcgttggcgttctgcaccattgccagcacttttttctttctgcgctttttgatggtcacaatcagcagaatcaccagcagggctgcgcatccgacgatgcaccacagccatacattggtggctgtcaccacggccacatcggcctcggcctcaggcaccgaaaaaaccaaataacttccgaaagtagagcaatccgccttcttccattttccattttcctgcacaaataccgaatacccttcgctggtctcctccggcgacaaatagcgtacggtatagctttcctgagaagaatcggagcaggaaagatgccactgttccaccgccgctttaccgccgatccgttccggcttttcctcctgggtggccgtgagggtggcttcgtcgtcaaaatccccctccatcaaaaacaccgatcggccactggaacgggaagcctgggagggaagcgccagaacatagcggacatattcggccgtcaccgtcttgtcaaagtgcaaatccgacagatcctgcgtatcccaggaagcataatatccatctttcaccgggatctccggaaagacttccgaaccaaaggaatccccataggaaaagtcataggacttgatttcctcatcctccaccaaaaaccggagggtgaactgggtcatttgctcgggcagcccactcacctggctcaattcctcaaaagtcatgggctcggctttgcccgtgtaaccgatgcgtcccagcccggccagtgtatcggacacataataattcccggaaaacgaaccggtttctgtgccgcagatggcgccggtacagcggcccccatctgcgatttccaccagcgtatagcacccggaaaccacggtgttatcctcactggaaccggtgacgccgccgatatagtctccgccggacaaagtgcatttcacaaagcagttgcgaatggtggagcggcagagaccggcgatgccgcccacataatccccaccggcgctctctacctggccatagctctcacaggctttcaccgcccccaggtccatccggcccacaataccgccggtatcatcctttttggccgaaacggttccctcattggtgcaccctgtcaccacagccagtgttttgtactggaaattcagcgaacgattgccctctttggtcagatcatcttccgggtcaaaatcatattccaccgacatagaccctacgatgccggccacattcacatcgccctgcacttcaccccggttgatcccattgtgaatcttgcctgcggacggttctccggtgtcttcatcggacacatcctcaaaggaatcccccgcttctttctccttggcgcgggtgatctcctgctgcatcagatcggtgatgacgccaatctggttgttgatggcctgcatatcccccagcaatgtgtcggatgcagaagtcaggctgctgttcaagctgtcggcatttccgatcatctgggaaagggctgcatccaaagcatccccatggctggtgatgttgctgtccaccggagtaaaggcaatggccggttcatccgccaatgttgttatgatcccattcaactgatccacgctggtgcccaatgagctgagtccattattcagctgtgcgtttgcatcccccaggtcttccaaagccgcaacacctgtcgctcccatctgggtcaggtaatccctggccttgtcgccgtggctaaaggcactgcttagtgcatctttcgcctgtcgcccatcctcccccgcagccttcagttcgttcagcaagctgttgatggtttccctgattgtatctgtatcgctgcccagtatcttctgcgccgtttcccgggccaactgcaaatgtctgatgcagctctccccataatcggcggcctgctgcaaattctgagaggcctgttccagttcggccgcggccgcagcaccctgggcatcggcaacatccaccttgccgatggcctgctgcaacaggtccgacgccttttgcagataggaaatggactgcgaaacattgttcaaaaccggttcggtctggccgatcacccaggaaacccgtgcagaaacatcgttgatctgcccgatgttctcattgccccactgggtgagggccccgctcaaaccgctcactgcatcttttgcggcgctcacattgtccgacaaactgtcaaagctgctggagatggtgtgggagctgctttgggtatgggccgtcacctgatcggtcagcccttgcagcgtatccagttccgcccacaatttatccagcagatcctctgtgtaacgcaaggtcatctgaggctccagctgtccggcgatgccgcccacatctttgcggcccttgacgatgccgtcgttgcggcagccatcctgatagccggactgccgccctacgataccgcccacattgtaacccatgtgctcgtatcccacattgcctccattggtgcagctttggatcacaccgctggaaaaaccggcgacaccgccgatatcagtaccggcgggcacactctctgtggtacccagcaaagaaaggtccgacagatccgccgacacttccacagccgtggtgttgatttccccatcgttgcggcactggatcaggcttccggtattctgcccagccaggccgcccacatagtgctttccggtcactgtgccctggaaccggcagtcgatcagctggccggtggtctcattgagccccacaagaccgcctaccagatcgtccccctttacggcgccttcaaaggaacagtccaccaccttgccgtagttggtgcccgcgatgccgccgatggtatcgctggtgccgctgggcgtcgcctgtcccaccaccttcaggcgattcaccacggcacttttctgcaatgtgccgaaaagtccggcattggagtcctcccccgtaagggaaaaaccactgatggtgtaatcgttgccctcaaaagtgccgccgaaggtgggaatgggcagaaaatcctccgcgtcttcatccaaagcgatattctgattcagaaccacggttttcccctgggaccaggtgtccaagcggcaattctttgccagctcgcgcagatcgtcctgcgattgaatgtgaatggcgccgtccccggcttcaccggcaaaggtcagcgcggggaacaaaaggctcacccacagagctgtggccaggacggcggccattctccgcatctttcccttgttcttgttattccgcttcatctttgtcctcctccgatacagcgcctgagatcaggttgaggtccacctctccgtccacagcagcgtgcacaattccgctgaccgtgccgcggatctcgccccgcaccataccatccacccgaatgcgcccacggccgctgtgcttcttggccacattgggcatttcaaaggcggtcatatccacgatcttgccgcccaccagcaggatctggggcagcacaaacataaccagcaaaatggaaatgatggtgccgcgtcccagattctggccaatgccggtgatggagggagtggaggtcatcagaccgatcaatataccggccaccgccaaaatggtgcccgatgtaatgatggtagggaacgcaaaattcatggtttcgatgatggcatcccgatgatgcatctgccctttcagctcctggtagcggttggccaccacaatggcatagtcgatattggcgcccatctgaatggaactcaccaccagatagctcataaagaacaagggctgatccagaatatacggcatggagaaattgatccagatgctgccctgaatcaccagaatgagcagcaccggcatccccgcagacttgaaggtgaacagcagcaccaccagcacgatcaggatggataccacgctgaccaccagattgtcccgtgcaaaggccttctggaaatcgtattccgtggtggaattgccggccacatacacctcttcgccggggtaatatttctgggccacttcctcaatggtatcgagaaactgataggttttctccccgctctccggcagcgtcagatacaccagcatccggctgtaatcggtgccctgcagctggtctttggccgccgtcatctgggtgtaggcctggttcagcatttcggtctgttcttcatccagcgtcacaatgccggaatccacctgatcgcagacaaagaggaacatatcgatcaaaggcaccttgtaaccatccaaattgcccaggatctggccgtattcttcctgctcggcggcataggctccataaaccaactgggccacctcataatccagcccagccagttcggcaaattcccggggcgtcagttgatcggccagggtatagccgcccatggcttccacattggcgatgcccatggcatggtccacctcatcgtactgctccagatcggagagaatggcggcctccttttcataatcccctgcgggcaccatgagagccagcatattggtggaagagaaattgtcgcggatcatgtttttggcgatctgcgtctcattctgcaccggtgtttccagtgagctttccccgtaggcataaggacacttctggctgagaggaaaggcgatcacaatggcgatcacaaacagaaccggcacaacaaagcgggtcttataggcaaatttgcccacaaaagggattttaggcacgaaattgcggtgttcggtccggtccatcagcggcccgaacagcatcagaaggcccggcatgacaacaaacacagacagcagtgcaaacagaatggatttgaccaggcaaatggccatatccgaaccaatgcggaactgcatgaacatcatggccaccaggccgcctaccgtcgtcaggctgctggctccaatttccggaatggctttgctcagggaaacaatgacggcctcccgaatgggaagggtctgatgctcctccttatagcggttgcagaaaatcaccgcataatccagcgacagcgccaactgcaaaatgctggtcaccgaatcggacacaaaggaaatcttacctaacaggaaattggtgcccagattcatgatcatggccaccacaaaggtgaggatcagcaccggcacctcggcataggtctgggatgtgaacagcagcaccagcacgatgatcaccgccacataaaccatgatcacacgaacctcgctgtcaatggcctcctgctgagcgttgccaagctccgtggagacataaacatcataaggcgaaagagcggactggatggcctccagactggtgaggcactcatcatccgactcatcgtagtcgaaggtaacggcatacaatgcagacacattgttataatggtcctgggtgttgtcgtactccaccccctgtacccctttgatcccggcgatctgatctttcagttcctcagccttatcctgcgaaatattcgccaccataatctgggcactgccgtaagtgataaactgatcctccatgatatccagggcctgccgggtctccgaatcctccggcagataggccgccagttcactctccacctccacccagttgcgggaaaaagcggagaaaatcaacataatgatggtaagcaggaaaaacaggttccttttatccacaatgaaggtggaaagcttggtcataaagctgtttcccaccttgttctcattttccggcattggtttgctctcctcccttcccggcggttattttttctccatgccacagcatggtgtttttctcattctgcaaggtgccggagagcgtatctccctccagtttcagcaccgaaacacattccaaattgctgacctgggtgcgcaaatgatggaatagctgcagcaaatgtgctccgatccatcggccctgcacggcgtttttctcacccaccagggtgatccacccagataccgcttcttcttttccgccttccagttgaagagtgccttcccgggggccaagctgactttccaagacgattgtgtactcttccatcccatcttcctcctttgttctgcaggcgtttgctttcatgctatccgccttttgcgacggatgcaaaggacaaaaacaccccaggtgtcaaaattctgacatctggggccatctgaccgatagaagaagccgggagactatgctatactgtaaattgaggaggtggcgcattgattatgaatcaaaaaaatgtttctgttgcggaacagaccaagcgggagctggccgccgccctgaaagaggcgatggcacaaaagccattggataaaattacaatctccgaactgacaaatgcctgcagcatccggcgtcagagcttctactatcattttgaagacatctatgacctgctgcgttggatgttcgaaaaggaagccatctccctgcttcgtcaacaggaaggatctcttctgtggaaagaagggctgcttcagctgtttcactatctggaagaaaatcgggccgtatgcctgtgtgcgctgcgctccatgggccgcgatcacatgaaacgcttttttgaatcggacatctatgccatcatccatctcaccattgaacagcttgccgacgaaatcggccagggacgccatctggattcccttgtggatgtggaaacactgactcatttttatgtggtcgctctggccggcatgatggaaagctggctgctgggggaaatcgaccggacaccggaagagctgatccactttgccgacaccattttgaacgatcagatccgcggggcctctgcccggctaaccgatgcatcctctcaccatgcctgaaatagcctcagagcataaaaaaagaacctgcttttgatcaaagtcaaaagcaggttctttttggtacgggtagtgggggtcgaacccacacggttgcccacaggaacctaaatcctgcgcgtctgccaattccgccatacccgcatacaaagcttatacagcatatcacaaacccccgccttcgtcaatggagcgtcctgttgcccaacagagccggatatgctacaattctgttcagatttgctctcccatataccccaaagagaggaaccacagccctatgatacagccaatttatcacgaaaacaccgtccagatcccgctggattttcccttctccctggagcatatttttacctgcggccaatgcttccgctggcaggagtcccctcggggcggttatgtgggcgtggccttgggacgccccacccggatatggacccatcagggctccctttttctccggagtacagcccaggattttgagaaagtgtggcggaactatttcgatctggaccgggactatcaggccatgacccaggattttctcgtcaatccctttatggaaaaggcggtggcctatggggaagggctgcgcatcctccgtcaggattcctgggagaccctgatctcctttctgatttcccagtgcaaccgcatcccccgcatccaggccattctggatcggctgtgccgggccttcggcgacccggtggagctggaaggggagactttatacacctttccctctccccagactttggccggtctgaccttggaagagctggcctttctgcgggccggataccgagccccctatctgctctccgcggcccaggccatcacagaaggccgcttctctttggagcaggtctctcttctccctacgccccaggcccgcattgctttgatggagcttcccggtgtgggacgaaaggtggccgactgcatcctgctcttcggcctggggcgtctggaagcttttccggtggatacctggatgaaaaaggccggctccttttatccccagccggaggaattcggcccttatgccggggtggcccagcaatacatcttccactatgcccgctccactggcctttctccgcattgactttccccgccccatggggtatagtggacaaaatactcaaaatggagatgattttttggaaagccaacgcttttcccagcagctgacctttctcacccaagtggacaagatgaaaaatatactgcgccagacccttctggccgatggttcccgccgggagaccgacgccgaacattcctggcactttgccctgatggccatggtgctttatgaatactgcgccctgccccatgtggatctgaatcgggtgctgaaaatggccctggtccacgatctggtagaaatttatgccggagacaccttctgctatgaccaggccgccaacgaagacaaggctctgcgggaaaaggaatccgccgaccgtctttttgccctcctgccggaagatcagggcgtggaataccggaagctgtgggaggaattcgacgccatggaaacctccgatgcccgctatgccgcggccatcgaccgtctccagcccttgatcaacaacctgttgacagaggggcacacctggaaactggggaatgtggctgccgcccaggtctatgagcgaatggaccccatccgcacggctgccccggccctatggccctttgtggaaaaatccatcaaagaatcgatagaaaagggctatctacgcccctgaaaacagactgaaagatccccgcagcttgcgctgcggggatctttcagtctgtcgagaaacctttatcgtgtgggaagaccttttgtcctaccccaatcaatctgccaaaaccggcgacctgtgcgtcggtttttgcacctctcaaggggcaagtgtggccgattgaccgccagaagcggccaatcggctgcatgcaggcccttgcaaaaactcgaacaagtggctttagccacttgttcgacacgctccaaaatccccgcagcttgcgctgcggggattttttgctttatttctttttctccaccatagcccgggcctgacgcaaactgacgccctcccgaatggccaaagcggccagatcttcatattcgtatttgctccgctccgtaccataaccctgcgccgttttctccccgatggttccccaaggggtctccacctgttccatctgacgcttcaaggtgtagcggcccatccagctttcccgcacccccagggtggtggtgtggcggaagatctgctccaccatcttctcccgatcctccgggcggcacatcacccgcagcaacatccccggccgggactttttcatgccaatgggcagggtgtatacatccaacgctcccgcttcaaagagccggtccatggcaaagcccatttcttcccctgtcatgtcgtccatgttgcaggaaagctccacaatctgcccggcctcttcctgggtctctccccaaagggcccggacacagttggccgcttcaaaatcctttttgcccatgccataacctaccttttgggtacgcatcaccggcatatcgccaaaacgagtggcaaaatgtttcagaagcgcggcaccggtaggagtgcacagttccccttggatcttgcccccgtaaatgggcacatcctccaggatataggctgtggctggagcgggcaccggcagaacaccatgggcacagcgcacctttccgctgcccacatgaaccggagataccaccacctgctccggagccagctcggccataagcatacacaccgctgtgatatcggccacggcgtccagggaacctacctcatgaaaatggatctgttccaccggcgccccatgagcccggctttccgcctgggcaatcagcccgtaaaccgccagcacatcctcttttaccttttccggcagagccagatgccccacgatatgggcaatgtctgccatgccgctgtgatgatggtgtccatggccatgctcatggctatggccgtgatcatggtcatggccgtgctcgtgatcgtggccgtgctcatgatcatgactgtgctcgtggtcatgcacatcctggcttgtttcctcctggccatgaacactcaccgaaaaatgagtaccggtgatgccgcatttcaccgaaggctccgccttggcttccacaccgggaatgcccagagcggcaaaacggcgaagaaaatcttccttctgaggtaccagttccaacaaagcggcggccagcatatccccggccgcgcccattccgcagtccaaatacagggttttcatggatctattctccttttttctccatatggttgatcatactagccaggtatccggcgccgaagccattgtcgatattgaccaccgacactccgctggcgcaggaattgagcatggacaacagggccgtcagaccgtggaacgatgccccgtaccccacgctggtgggcacggcgatcaccggacaatcggccagaccgccgatgacgctggccagcgccccctccataccagcgatggcaatgatgacgctggcctccatgatatcctccagatgggccagggtgcggtgaattcccgccacgcccacatcatacagccgcatcaccttgtttcccagcacctgagcggtgagggccgcctcctctgccacgggaatatcactggtgccgccggtggccaccaaaatggtgcccaatccgtagggctccggcatggggcccacaatggccacccgagcatcggcgtgataggaaagctcatggcttttggccagctcctgggcactttccggagaaaggcgggtgatgagcacggtctcctgaccgttcttcttcatcacatccaggatccccgccatctgctggggggtctttcctgctccgtaaatcacctctgcggtgccctgccgagctttccggtgaagatccaccttggcaaagccaatgtcctcaaagggcgcggttttcagctgaagcatggcctgctccaccgaaatctccccctgccgcactccttccagcacctgtctgatttctttattcatggcgcacctccagatccagcaccacgctgggatagtattctttcagcttgcaaagcaccttctgccgctccttcagcagtttgggaagctgaccggcaggcagctgcaatttggccccgccctccggcgtcatgcgcacccggaaatcggaaaagcccagagaaaaaagaaaatcctccccctcttcggtgcgccgcagcatctcctttgtaatggaagtgccggtggggatccgggtagccaggcaggcgtatgccggcttattccaggtgaatagcccggcctctttggaaaggcggcgtatggcatccttgctcaggccgcactcccgcaaaggcgaacgcaccgaaagttcccgcaaggcccgcatacccggcctgtctcctgcgtcgtcggaagcattggtgccgtcaatgagaagggtgtagccatctttcctggcctcttctatgatcctttggaagatggcctttttgcagtgataacaccgctccggagagttttccgccaccagaggatcttgcagcacatccaccggcagtgtggtcatgggcacgccctgttctttggccaaacgaagggcatcctgccattcaaaatcgggctgaaaggggcttttcacataataggcccgccagtccttcccccaggatgcggcggcatacagcagataggccgaatccactcccccggaaaaagccaatgctcccccaggattttcctgaaaaaattcctgcaatgtcatgctttctttccccctatacccggaatcggtcatactggctgcggcaatcggggcaaagccatttcccgttttgcagcatcaaccagccttcgccggtctcttccccgcagccatcgcacaaacggctgcctgtcacctgggcccgcaagggcagggggatacgggtctcccccaccagaaacagctcttccggcgctttgctctggtaataggcaaaggattcctcccggctcatggaaccgggacggggccggagcaaaaggcgcaccgaccggccgcttgtccggttataaaaggaaaaggcctgtttccccgtgatgtgaaatagcagatttcccttccccatgctgcatcccagcagcacctgaatggcgtccacactgcaggagtcattttctgcaatgcacaccacctgctcatcgtcggaaaaggtcaattccagcagctttatggcatattgggccgctttgtatccaatggtcagcccgccgcattcatggccgtgaaaatccacgcaccgctgccaatcgcttcgctccgtttgttttaccatattttccctcttctcaaaacacaaaaaggcacacggccttgaaaaaatgccgcgtgccttcagacacacctgttttctaaaatcaacggattggttgctgtgttttctgattctggcatatttgccttttgaccgcttcagcggcctgtttcttttcgatgataccaattttctccggcaatgtcaaccggcgggttatttctcctcatcctgctccagcatttcgtccagctgctcatccagctcctgggcctctgaaagctccccggccttcttctttctatgaatcagccggccagccacaacggcgcacaccgccatcactgcggccacaccacagagcacaccgatgatcacatttttgtaagggcaagttttgatctttgttttcatggttttttcctccctgattgatcgttctttctcagatggatgtacctatcacaaataaaaggaattaaaaaacaaagcgctgagaatggcatccactccccgcaaaaccaactgacctcccaccagcagccccaccagggtcatggcggtcataggctggaagatggctgccagccccagcagaacctgaaggattcccagggccataaacgccagccagcccctgatctgaaactgatgcagctccagaccgcgcaggaaggtggtcacaccgataaacaaaatccacacactaaagagcaccggcactgtcaccacggtgatccaccggttaaaaagcaccaacagtcccagaagcagggtgatgatggcgttgagcagagtaccgcccaaaccgcagaaaatcccccgcagacggctgtaaaccgctagctctgccagaccgttgccgatgagcatcagcgccagaaacaccgacaccgcccgcagggccccgccgggattgaaggccaccagcactccggccagcaccagcaaaagaccgccgcacagccacaaaatccgatacagcttattgttttttcccagcgtcctcacactcccttccctggtggatctttgggtttcttctttcttctgggcatcaccggcggattgactgccgtcagggccttggccttatcgccatagcggcgcttgagtctgccgtacacatcttcccgcaacagggcatagatcaccgagctgatagggataaagagcagcatccctggaatacccatggcgttgccgcccacagtcacggccaccagcacccagatggaaggcaggcccacggaattgcccaccacatggggataaatcaggttaccctccagctgctggagcacaaaaaacagcacgataaaccacaacgccttcatggggtccaccatcaaaaggaggaaatcccccaccaccagcccgatcatcgccccgaaaatggggatcagggcagtgaaggcaatgagcacaccgatgagcagtgcataggggaagcccagaagcgtcagagccacaaagaacattgcgcccaaaatacaggcctccagacactgtccggacaaaaaccgggcaaaggtcaggctggacaaagaggcaatgtgcaaaaatcgctgcaccactttttccggcaggaaggcataaagcagctgcttacactggcggcccagcttttccttctgcatcagcacatagaaggaaaagatcagcgccaggaagaagttgaccactttcccggccacactggtggccacgccgatggtggaggtgaccacctgggaaccggccgagcgcagccatgtaccggctttctgaatgatctcatcccaatccagtcgaatctccgtcagccgctgggcaatatccggataccgatcccccagctgataagcccagcgctgcaatgcctggaaagccacctgactctgctcgatcaccgcgccgatggtatccaccaaggcgggaaccacctggaaaaagacgaaaaacagcacgcctaccaccagaatcagcgtaacgaccaaactgatggcccggcggtttttgtaaatgtagtttttgggatctttgatccatctctcaatgacccgaatctcgataaaacgcatgggaacattgagcacaaaggccacacaggcccccagaacgaaggggaacacataaccaaaaagcgtctgcagcccggcggcaatcatttcccaccgctggaaggcggcatagagcaagacggtaaaggcgatgatccccaggatctttttcatgttgtctcgattcagctccacagaatccctccatatgccaaagaaaggcaaaaattcatacccactgttcctttgctgtcagtgtatcatattatcccctgttatgggagagttttctcattcttttttcccattttcggaaaaaatcacctggcgcagctctttgtccagcgcatccagccggtcttccggcaatgcaatggccgaagggagcatactgttgagggcccggatggtaagaggccgggctccccaggcatattccggcttttgcagcagcggataataccgctgcaaaatggccatacaccggggatcttccatcagactgcgccccagcacatccacgctgtaaccgcccatgctctgggccgtgggacaggggtccagcgcatcggccggataatctccccacagccgccgcagccagcgcacgctcatgggatgccacagccgcacatcttcatccaccttggccgaccgccccgaagaagtgaagggcttcgacagggacagaccatggatgccgtgctggaacacatggcactccaccggcacttccagccgggccagttccccggcaaaatccagcgtctgctgcaccggcacgatctcatcctcccatgtggaaaacaaaaaggccggcggggtgtttttatcccctttgcccaaaagggcgggaggattcatgggctgcatcaggccgcactggggctggcccaggcagggataccccaacaccatggcctggggccgctcttctccctccaggcaaagggctgcggccagatggccgccggcggaaaagcccactgcggcgatgcgctggggatcgatatcccactcctgggcattttgccggatgagcgccagagcctcccgggcctgctccaagggcagcggccactgtacgccctttcccacgctgtactgaagcacaaaggcactgaagccctcggccagataggccagggccaccggctccccttcccgcttggacagccgctgataggccccgccggggcaaatgagcaccgcttgccggggcgatgcattggcaaattgtttttctggttcatggagataggcggtcaggcagccgcccttttccaaagggatttgctggatgcgcatgctagttttcctttcttccgctgagtggttcctgatgttttttcatggtggggataaatcgcctggcaaagctgccttttcccctccctttgatgtaaaacacgccgatgatggaaaagaccacggcgccgataaagttgacgaacagatccttcatggtgtcgatgatgccgatatccaggtatcctcccagatcccagtcctcaccgttgaccacaagactttcccccggcacggtcaccggtacatttttcccttccgggttgagctccaccgaggttacatgggagaccacggtgtccttctgcatgtccatgccgaaataccggtccatgccaaattcaaaaaactcccacataacgcccactgtcatggaaaagcagaaggcgaaaaggcccacaaagacaggggccagattcaaagccatccgttcactgcggttgagaatatcgataagggaaaagccgatggccgccatcagaaagccgctgatggtgtgaagcatggtatcccagtaggggaactggagataataggcccggatctctcccaggatctccgccgaaaaaataaacagcagaatgatgacttccagggtgtcgggcacatcaatgtgcagccgatgctccacaatagaaggtatggtaaacaaaaccaatgtgagcaggcacaaaaacacattgaaatagtccctgttaaagatctgagccaccatcaccagcagcaccaaaagccgcagcaccacatagacagccaccaagcctttgttctgccgggcaaattcccggatagactcccgtttttcctgccgtttttcctgtctttttttaggcattccattctccttttccataaaacccacaacaaccattgccggccacccgacaacgctaccggctttgcagcttatacaccataaaataatagcgaaaaagcatctgtgctgcattttgcggttattataccatagcggcaagtccatgcagacttgcacgccgccaatgcggtgtaaaatcggctttgccgattttggctatggtgtaacatcaacagcagtcgttttgt

SEQ ID NO: 3245 - DNA, 4277 bp, Unknown
  16S sequences of unknown bacteria
cttcctttttgtatattctgactaattatttcatattctccattttatcttgcatgtgtttcactcgtattattgaaactatttttctgtattctatatacttttctatatgtttggaaaattcgaataaatttaagtaggaatatcgcataataaacagcttcaattttcttgacttttatttccatataatatatagtattggtatgtttatgtacgtgctattatatattttataaggaatttttattaagtgattactcatagggaaaagaggttcagaatggatttaacaagcataaaaaaactaaatcgaagccgtatctatcagctagtttatcaaaaagaaaaaatttcaaagcctgaaatctcaagccaattaaagattagcttacctaccgtttctcagtgcgtaaatgaattgattcaacttggtcttgtcacaagcgaaggtttttttgaatcaaacggcggacgaaaggctgcgatcatcacttgtaatcgaaatatcaaagttgctcttggcgtagatatccagcgagaagctatttgtattgttgcaatcaatatttacggagaaatccttcattcagaaaagcatgacatttcttttgaaaataatgatttatactgtgcccgtgttggaaatttaatcatcagtttttttataagtctagaaatccctcgcgatgctctactcggtgttggtatttctattcaaggtttagttgacaacgccggaactcatattacatttggcccaattcttggcacagaggggttcagcgcagaatctatcggaaaatatatttccattgcagatacacctattttggtccatgatacagaagcttctgcttcctatgcattatggcaacatcctcaaataaaagatgctctgtttttggttttaaatcgaaatcttggtggcgccgttattatcaacgggcaaattcaccgcggcatttcacgcccaagcggtttaatcgcgcatatgacattaattccaaatggcaaattatgttattgtggaaaaaagggatgcacggaatcctattgttccgcacgttcattagttgaaggctttgatgaagattttcaaactttcttccagcttcttcgttccggtgatgaacagcatcatcaaagatggcttgaatatttatcttatttatcacaagccctttataattaccaaatattaatgaacactgaaattatactcagcggagaactctctcaatacctaataccggaagacattgaaatcctgacccaatacgtgatgaaccgtatggggatttttcaggaatacccaaaattcacaatcaacaaaacaactcaagctgctccaggtgccgcattaccttttattattaaatttttgcaagaatatatgcaagatgaaaagatctaccctaatgacactaatttttctatttagtaaatatgccacaataaccttcaaaaaaagagagcacaaataccatttcttggttctgtgatctctttttccatctctcagatattatactaccagcaccgtcttcatcccgcactcccgtgcacgctttgccagatgctccatcagctcccgatccggcacctgatagtgcgcatattcgctgcggacacccattgggcggtatttgatgatcttataacgaatatcgcctttttcaagataacgggctgccagcgcagctacctgacagaccgtctcttcacagtcaaagagccccggcacgacgacggtccgcacctcatacagctttccctgttctgccagatatttcatattccggatgaccagatcatttggctgatccgtcacggcaagatgatctttttcactccatgctttgatatcgagcatgacaccatccatctgcgcgagcagctttggatatttggaaaagtccagcgtcccgttgctgtctgcgagggttccgagaccatcccttttgcacagggtaaacagctcctgtaaaaattccgggtagagcgtacactcgccgccggaaacggtgataccgcggatgaacggtacctgcctgcaaatttcctgataaacctcctgcgcattcatgtaccggatacgcggacttgcatcaaaccggcaggtcttaatgcacgtatcgcagccgcagcacagctccgggtgaaacagcacctttccgttttcgatatacaacgcctgcttcgggcatttctccacacattccccacagcttctgcacagggaacgcgtctccggattgtgacaataccggcagttaaaattacagccctgtacaaagacggcggtccggttacccggaccgtcgactgcgctgaacggaatgatcttattcacagggactcttccctgaaactgatctcccatgttcgtctccttattctgtgaatatccatcccccgcccgactctcatttctgtacgcacagaatccggtatttatagcctgacagaggacttcccttttctgatccagacaagcttactgctttgcacaattggcatgacaggcttatctgattttgttttacttaccgtaccttccgctccaggatgtgtccattgtgcttcgctcccataccaagtgcagttgtatcctgcaggacattctcacccttctcgagcttttcgatctccgaacgttttaccagatagccggtaatgcggatgacatcgctgtcggtcgcatagaaggacagataacggatgccttcacggaaggaacccttgatgatatcgagcaggaactcgttattcttatgtaccgtcgtatcgatcgggaaaatatcaccggtacctgacgggaaatatttgtggaacttctcgcaatgcttcagatgatcgatcagctcctccggttcctcaccgatcggaattctcgtccccggtgaaatgccaaggtcgctcgcaatgccgacctgtgcgtgcagcaggaaatgtccgcctgttgcctcacagtacggattgacatgtgcctgattaaacgcattgatctgctccatgatctctacgccgagtgcatccgcctcttcgtcatggccgtatcttccggtcttgccttcctttttcatcagatcattgacgcactctgccatgccgaccataccgaacattgcggtgaaacggtctctgtggatgaagccttcctttgcgaggaaattgttttcaaaaaatccgctctcctccacgataaaacgaatgcgcgcatccatgtagtctgccattacctggcatacatacggaagatgattcttcttgaaatcctctacattcttcgctcgcttcgcgatattgccgagaatcagacggcataaggtgtaagagccgccgccgtacttcagtccattatagcagctggcgatgacgtagtcctcgttcagttcacttttaaacatcttgtggtttgcaaagcttggctttgcacagtgcagggccgtatcgactgccagaagcgcgaaatcatccggcgtgatatcctcatcgtacttcatcgtcacattcggaactgcctgctgtagctccttttctgcttccagaatcaaacggcccgctctcgttgccttcggaccgatattggcatgagaaaaagaatccaggatcgtgcggtccatatgtgtcaggaacagcttaatcagcttctttgcctgtacctcatcgacatcgtccataaacggctcgagcagctcatctaatgcaccgacgtagaccgggaaattcgtcacactcggcacatgcttatagaaaataagcagggaattgatcgcctcgtaaatgtcctttggtgcatccagctgcagaaacctgcttccctctctcataaatttggcataatccggcacgatatagcgcggacgcagcggtgcatgtccctcggaaaggtcacagatacactgcttatcaatcggctgattcaacagctcatccagcccctccgggagatcaagtacctccaacatggaatcagccagatttgccatcgtagctaccttctgctcatgcgtgagcgtcgggctctttacagtattaagcatttcattgcgcgtcgcattcacgcgctccatactgatatctcgcatttcatttcctcctctgaaaaaccagacagataactgctgcctgccttctatttcaagaatgttgtgatcaaaaaatattttaaccactaatgatacacggattgcttcgcatttcatgttttcgcgatcctgatgcctacggattgctccgctgcgaagcagctcccacaattctgcaaacat

SEQ ID NO: 3246 - DNA, 4719 bp, Unknown
  16S sequences of unknown bacteria
cctccggctccatgcacagggcgcgggcgatggccacgcgctgcttctggccgccggagagctgcttgggataggcgctcgccttatcctccagcccgacacgccgcagcagctccatggcccgctgctctgcagcctcgcggctcttgtgcagcagcttcatgggggcgatggtcatatttttcaggaccgtcatatgagggaagaggttgaaatgctggaacaccatccccatcttctggcggtgcgtgttgatattgcagcgggcatcggtaatatccgtcccctcgaagcagatcgtcccggcggtcgggatctccagtaggttcaggcagcggagaaacgtcgatttgccggagccggacggcccgatgacgacgacgacctcgcccttgcggatctgctgatctacgccgtccagggctttaatctcgtcgcctttgaaatgctttttcagacctttgacatcgatcaaaatatcagtgctcactgttgcgcagcctcctttccagacggctgaccagccaggtgaagaacacgaccatcaccaggtagatcagagccaccgcgatcagcggcataaagggtgagaatgtccgcccgcggatgatatcgccgcccttggcaagatccatcacggcaacataaccggcgacggaggtctccttcaacaggacgataaactcgttggccagggccggcaggacatttttcagcgcctgggggatgataatgtgccacatcgtctgcacatagttaaagcctagggagcgcccggcctccatctggcccaggtcgatggaggcgatgccgccgcggataatctccgcgacatacgcaccggagttgatgccgaaggccagcatggcgatggccacgccgttattcgaggaggcgaagatgatgtaatagatgatcattagctgcacgacgaccggcgtgccccggataaccgtcagatagagcttacagagcttatcggcaacggaaagcaagaaccgccccgggccgcggcgcatggcctgccggttcagatcccacgtggagcggacgatcgccaccacaacgccaatgacgatgcccagcaggaccgccaccagggtgatcttcaacgtattgcccaggccgttcagcaggtatttccagcgattatcctcaataaaattcagtataaattcagcttttagatccgcaaaccattgcgacaaggctgtcactcctctctttgttctctctcgggggcccgctcatctgtgtaaaaaggcggggtgatggccccgcctttttgcaatgcgtttgttattccgccgggatatatttgtcgatgatcttctggatggtgccgtcggcggtcaggtcagccagtgccttgttaaattcttccgtcagcgcgctgcccttggcaaagcagatggcatagtcttcgttggcgtattccgtatccaggagcttcaggccttcgttggcggcgacaaagttcttggcgggctcggagtcgatgatgacacagtcgatcttgccagtgatgagggcctggactgcatcggcgcccttgctgtagcgctggacgcggtcatcgcccatgtcgtccgtggcgtagacatcgccggtggtatcctgctggacgccagcgacataggtcgcgccgtctgccagcagatcatcagcggaggtgatctcggagtcctcccggacgatgacgacctggacggcattggcgtacggcgcggagaaatcgacgctctgcaggcggtcttccatgatggtcatgccggccatgctgaaatcagccttgcctgccgtgacggcgttgataatggcgccgaattccatgttgtcgatccgcagctcgtagcccagcttatcgcagatggcctgggcgatctcggcgtcgatgccgacgatctgctcggactcgaagtactcgtagggcgggaattccgcgttcgtcgccatgacaagggtcttgctgctggcggcggggtcagaggcggggctgcccgtggcatcgtcggcgtcattatttttgtcggagccgcagcctgcaaacaggcaggcgagcaagcccacggcgaggatcagggataagatctttttcatttttttgcttctcctttggtgtttgttctcagaataccatatattttatcgcaagtgacgggacttgtcaattctccagatagaatattttgaataaaaatgcattcattgccggggattgcaatcgcggcgcgtttatggtatatatgaagtagagccagtgtattacataccaggcacgtctggcgcgagccggtgccgctgcgcaaaggaggtgggcagatgctgctggcgttttccgataccctgcaggcgatgccccacgcccccggcgtcgtgctgtcgctggcgctgatgctcttcggcggctttgccatgacgcggctgacgaagctggtgcgcctgccgaatgtcaccgcatatattctcatcggcattctgatggggccggactgcctagccctgattcccggccagatcatccagcggacggatttcctggcagatatcgccctggccctcatcgcctttggcgcgggggagtttttccgggcggaaaaactgaaaaagacgggcctgcgggtccttgtcatcgttttgatcgagacggcggcctgcggcgggcttgtgtttgccctgtgtcgggcggcgctggggctaccagtagcgtatgccatcgtcctggcggcgctggcggcggcgacggcgccctcgtccatggtcatggtcatccgccaaacccatgccaaggggccgtttgtggatatgctcctgcaggccgtcgcgctggacgatgtcgtcagcctcgtctcctactccgtggccatctgcatcgcgctggcagtcaccggcggcgggagcgcgatcacgtttgggctcgtcgccgcgcccattgcagcaaatctcggcgttatggccctgggggcgatcttcggcgtcttgctgaagctgctgatgcccggctcccgcagcaaggataaccggctcatcatctctctggcggtgctgttcgcgttctgcggcgtctgcgcgctgctgaacgtctcgccgctgctggggtgcatgtccatggggatggtatatatcaatatctccggcgacgagaagctgtttcgccagctcaattactttggcccaccggtgatgctgctgtttttcgtccgggcggggttggattttgaaattcgggccctgttttcagcggaaagcgccgtggccggggtgccgctggtcgtcatcggcggggcgtattccgccgtgcggatggcgggcaaatgcggcggcagctatctgggcggcgtgctcacgaaaagcgaccggaacgtccgccgctattttggcctcggactgacaccccagggtggcgtgaccatcggcatggcggccctatgtgcccggacgctcaacagtgaggttgggcaaaatctgcagacgatcatcctggcggccagcgtgatctatgaattggtcggccctgcgtgcgtcaagctctcgctttatttggccgggacttattccgatcgcctagaggacctgacggtggccccggcggagagcgcaggggtgcgggatgtcgatgtcctcatcgcccgtatccgccagatccaggcgcagctgccggagctttcggcacaatatgtggacgaggatgagcaggcatttttagagggcgaggccgcccaatacgggccccaaggccgcgcctggcgcaagcgcttctggcggcgggagtaacgcaagacccagcggcaaatctgcggcagatcttaaaaggaggaagctttatggcatatctgacacaaatgcacgaccccatcgccgcctggctgggggcttggtcggcggaactgggcctggggtccgtggccctgcgggcgggcctggcaatcctgttcgcctccctggtggggctggagcgggcgcaaaagcgtcataccgccgggttgcggacgtttatgctggtgagcctgttttcctgcacggccatgctgctggatctgtttctggcgctgccggtgccgatcctctcggcggcgtgtattttggccgtcgggtccatcagcacatattccattctcttcagctccaagagtcagatcaagggactgacgacggccgtcgccctgtgggcgtgctgcattttggggctggccatcggcggcgggttttacacactggcggccatcgtctttgccgccctgctgctctgcctggacctgatgcccacttgggaggactatctcaaggagcgctcgaatcattttgaggtgcacctggagctgcgggacaagcgggagctgccgaatttcaccgccacggcccgggagcttggcctgcggatcgacgatatcgaggcaaacccggcgtacctgagcaccggcttgagtgtctacaccgtctcgctgacgatcgtctccccggagctcaaggcgtttaaaaagcaccgggagatcactgcggcgctggcaagcctggaatccgttagctatattgagctcatttagggtgcgcctgcctgccatagaaatttcaaactttttgcattctatcggttgacgaaacgggaaaactgtgctaaaatagctcccgtggtatcgagcagcccacgctgccgtgtctggctttgctactgtggctcagttggtagagcagctgattcgtaatcagcaggtcgccggt

SEQ ID NO: 3247 - DNA, 22932 bp, Unknown
  16S sequences of unknown bacteria
gataaagcggctgcagccaattgttttctctatctgaaccctctgctctttatttggatagatccttatttttacggcgcggttcatttttctcacccgggctttctatatactgccgtatcgtttcaatcggcgccccgcctgcactgagcagacagaagctctgacttcagaatacttctttccagagttcttctcttatctttggatactcttttttcagcagtctgctgctggcacttttataggcattgatgaatttactgagttccgtctttggctgtgcgcggaacatcacatgaacatggtctgcatcgtgatttcattcttccagtacgatcccgtatccgggtgcgatatactcaaagatctcttttgctccttcggatctttcgtcgttcagtatttttcttctgtattttataaccatcaccagataataatatagcagaaatactgaattggaattatggtctaattccattgcatttatcactctttttcttatatcgactgatatgtatttacaaactaattgttctttttcagtatactatattaggggatagagaacaagagtttcctttgtactataaggactttttttgagcagatatgctcagatgtgcaattcatctcaccacctgaagaggtgggagaattcttgctacatttgttaaattcagattccgacaagaatacaatgggtattctatgtgatccggatcggggtagaagaggtgtaggtaagtgcatcggacagaatgcataaaaataatccgaaatgtttgtgtattcattcgtatagacgaaatcgaaaaactgtagtattctgaaactataatttgtaaaccgattttacaaaattaaaagcaggaggttttgtcatgggaattattgaaaaaatgcgtctggacgggaaaaaaggctttgtgacaggcggtgcacgcggcatcgggaagtgtacagctacggcgtttgcggaggctggcgcggatgtggcgatcgtggatctggactatgcagaggcggtaaagaccgcgaaggagctggcggataagaccgggcgtaaggtaattgcgatcgagacggactgcacagtgccggagcaggtcgatgcgatggtagcgaaggtcgtagaagagctcggcggacttgatttctgtcacaacaatgcgggtatctgtatcaatgttccggctgagaaaatgacctatgagcagtggctgaaggtcattaatgtgaacctgaacgggatttttctgacggatattgcggcaggaaagtatatgctggcccatgatggcggctcgatcatcaatacagcatccatgtctggccacatcgtaaatgtaccgcagccgcagtgcgcatacaatgcgtccaaggcaggtgtgatccagctgacgaaatcgcttgcgattgagtgggcaaagagaggcgtgcgtgtgaattgcatcagtccgggatatatcggcacggagctgactttgaattctccgaccttaattccgctgatcgagaagtggaacgggatggcaccgatgggccgcatgggcaagccggaggagctggagtcgatttgtgtgtaccttgcaggggatacgagcaccttcacgaccggatcggatttcgtgattgatggcgcatttacgtgcttctgaccggaattgtgtgcgaatatctgctttaccgaaaaaagggcctgaagaggcccttttttcggtttgacggtatgattataaaataaacattctggcggttgccacttcatggacgctgtgcccggtaaattctacggtgtatggtccggtctgctttacgcctggatagtagctggcgcggtgggctttgtaatgatccttgaagctgatctccatggtgagtgtttcaggcagctggatatggcagctggcacggttttccacaccttctctggctgcctgacggatgcgctcgcaggcttcctccggtgtgatgctgatcgtagcctcaccgagtccttctttgaccgcaacggtgcggatctgaggatcccagtgatggacgtgggagcagagcgcacggtcgccgctcagaaatacggacggtacgccgagctctgccgcatagaaagcgtgcatgagaaattcactgcagagctctccgttgaatttgacataattattgccgcggttcatggtatggcttaacggattgccgtcgaagccggccgggctgtgatatccgacaaacagaacggcgtcaaagctcttgtcgatgccgccgatcatggaatccgggctgttcgtccagtcgcggatgaaacggcactgctttggaaaaccggtgatatccatgttgcgtccactgtcatgtgcatctttgatatagacctcgtcagctccggcatcaatagctcccagcgctgcggccatggcctcgcgcttcatctgttctgccacggcaccatgctccaggtttccgaggttggtggactcccaggatgtggatccggtcagtccttctacgtctacgctgatgtaaaccttcatgtcgatttctccttatgataaaaatttgataaaaactattttttcagaagctttctggtgagtgtgtactgcatggccacaccgatcttcaggcagtcgtcatccagaaggaagcccgccgtatggacaggagcgccgaccggtgtttccggggcggtacagccaaggtggtagaacacaccgcctttttttgcagcttcctggaagaaagagaagtcctctacgccaaggcttggaaattccttccagttgatgtgctcttttccaagaatctcgtcggcacattctgcagctgcatccaccagagcattgtcgttgatcagcgcatcatagccggagtggaagagcacgtcggcggtgccgccgtaggcagcggcaatggaggtggcctggttgcggatgtattcctttgcctgggagcgggtggccgcatccagcgtccgtaaggtaccatggatccgcacgtggtcgcagacgatgttgcaggcggtgccaccctggatctctccaaaagagagcactgcactgttgagcggggagatcgtgcggctgacgaaggtctggagggagctgatcagggtagcggccatgacgactgtatcgacaccgccttccgggtaagcgccgtggcaggatctgccgtgcagatcgatcagtacttcgtcgctggcagcgttgagcttgccatacttcatttcaagttctccggtgtggaactgaggcatgacatggagaccggtgacatagtctacgtcaggatccttcatgcagccctgctcaaccatccgctgtgcgcctccgaccgtttcctccgcaggctggaagaaaaattttacggtaccggaccattcactgcggtgcagctgcagcagtctggcagtaccgagtgcgattgtcgtatgggcatcgtggccgcaggcatgcatcattccggaattaagggaacagcaggcgtgggaaggatcctcctcaatgggaagcgcatcgatgtcggcccgaagtccgacggtgttgccgaccggatcacttccctcgccggtgagagaagccagaataccggtatcagcgatcatccggtaaggaattccccaggcgtccaggcagcctgtaataatgcggtcggtttcaaattcctgggtacctttttccggatgctgatgaagcgtgtggcggatagtcacaagctccgggagcagtgtctcaatatcacggcacaggtcagtggccgcaaaagctttcgaaaaatgagtttcagaggaagtcatgttattacatcctttctttataaactttataaataagaagcaaaaataacgtgcacctggtcaggcattcatataaatcctggcaggtcgtgatgagagcctggaaacaatctcatttttgttagtctgggccagctggctgatctcctggatatcgggcgcgttgtcgctgccgttgccgtagataatggcggtatctccgatctgggcgtcaggtacctggcttaagtctgccatgcactgatccatgcagatcacaccgatgatggggcagcgtacaccacggatggtgacaaagccacggtcacgcaggttgcggggatagccatcggcatatccgaacggcagggtcgctacccgcgtatcttccggggcacgccaggcataatcatagctgacaccctcgcccttacggacgttggaaatatggcagatttttgtttcaaaggtaagtgcctgacgcacttttacaaagcccttgtggaagccacgcagaccataaatcagtgctccggcccgcaccatgtccatacggtattccgggtagtctaccagggcgatgctgtccgcgatgtgccggaaacggaaagaaaagccttcggcctgaagcgtattgatgacgctggtaaagcgctgatactgttccagattggaggcatcatctaaaagtgccaggtgggaaaagataccgtcggtcaccaggtaaggcagctctttgatctgaagcatttcccggatcccggactctgagtcggaaaaaccgatccggtggaagccggtgtctactttcagatggattctggccggctggcgaaggtcagctgccgcctgattgagcagacgggcctgatgcaggctgtcgatcgtctggataatgccgtattcagcggcgtatggaagcgcgcggtccggcgtcagtcccatgaccaggaccggatagtccggaaaagcctgctttagctccagcgcttcttctaaggtggcgaccgccagcagtgcggcgccatgctcgatcagagtgggggcgattgcccgggcgccatgcccgtagccgttggcctttacgacagcagccacagcggtctcttttcctaccagctgacagatatgttccatgttttcagcaattgcagataaatctacgcggatcacagtatcccgcagtccgcagtttttgatgtcagtattcataatccatctcctgtgtgtcattcttatccgctaatattaaaccattttttttaaaataacaagatgaaacagggacagaaaagctctgataataaaaagaaaaagatatttcgtgaggtttgtgtattgacagtgggaacagcttgtactaaactgtactttagcgtacaaaaaggtaccattagcaagatggtacctttttttaatatttgacagatcactgttgtaaagtaaagaagtgacttgctgcaaatgatggacgcaaaagataaattgaagggggattgttatgcttcgctatatcgtaaaacgtgtgattgcaggatttctttcgctgtttatgctgatcacgctgacattttttctgatgcatgtgataccgggtggaccattcagcccgggtgaatacagaaagacaccgccggaggtgctcaagcagatccaggacagctacggtttgaatgatccgatctatgctcagtatggacggtatctgaataatcttgcccacgggaatctcggcgtatcatttaaaaagctgaattattcggtgaacgagctgatcggcaacggagctccggtatcagccaaggtgggattctgggcgatccttctggccctgattatcggcattccgcttggaactaccgctgcggtgcggcgcggccatttggccgacggtatttccatggtgatcgcgacggtaggagtatcggtgccgagcttcgtgctgtgtgtgctgtcgatgtatctgttctgcgacaagctgaagctgctgccgacctacggactggacagctggaactgctacatccttccggtgggctgtatggcatttggccagattgcctacattacacgtctgatgcgttccagcatgctggagaccatgcgccaggatttcatccgcacagagcgcagcaaggggatcccggagctggtggtgatcggaaaatatgcactgaagaactccattcttccggttgttacttatgtgggtccaatggtagcggcgctgatgacgggtacctttattattgagaaggtattcagtattccggggctgggccggtattttgtaaatgcgatcggagaccgtgactatgcggtgacactgggactgaccatatttgtaggagccatgattatcatctgcaacctggttgtggatatcatttacgcctttgtggatccgagagtaaagattgacaagtaaaaggaaaacggacatgaatacaaatacgaattatacttatgagacagagatcccagacacactgctggcagatttgccggaggaagcccgggatcaggaaaatattaaccgggtcagctttacttactggcagacctgctggaagcggatgaaaaaggacaagctggctatgtttggtattgtggtgatcattgcgatggcgatactggccgtttttggcccgatgctctgtccgtattcctatgatgatgctgactttatggcaattttgcagggaccgtccctgaagcactggttcggaacagacgggttgggccgcgatatatttgtccgtaccctttacggcgcacggatcagtctgaccatcggatttgtagccgcaatcgtcaatatggtgatcggagtgctttacggcggcatcgcaggatatctgggtggctgggtggatctgatcatgatgcgtatcgtggatatcttgagcggtattccgagcctgatttacctgatattgattatgatgtttttaggcagcagtgtgcagagtattctgctggccatgtgtctgacctactggatcacgacagccagaatggtaagaggacagattttcacactgagagagcaggattacgctctggctgccaaggtgtgcggccagaccaaatggcagattctgatccatcatctgattccgaacagcatgggaagtatcattgtaacgatgacgttcctgattccttccgctatttttgaagaagcatttttaagctttctgggtatcggtatccaggtaccgaaggcgagctggggaaccatgtgcaatgacgcaatccagtatctgacacagcagccatggctgatgattttcccggcgctggcgatcagtatcacgatcttttccctgaactttatcggtgacggactgagagatgcgttggatcctcgaattaataaacagtgacggagtagagagccatgagtaatatgacagagaataaattaaaccagacagacaggttgctggaagtgaaaaacctccggaccacattccgcaccatctccggtgaggtgaaggcggtaagagggacttccttttatgtgaatgagggagagagtatcggtattgtaggagagagcggctgcggaaagagcgtatctatgctctcagtacttcacctgctggatgataatgcaaaaatggaagcggatgaaattatgtttcacggaaaggatatttcgaagatatccacccgtgaaatgcgtaaactgaacggtcacgagattggtatgattttccaggatccaatgaccagcctgaacccggtttttacgattgaacagcagatcagggatccgctgatgcgccatctgggctatacaaaggaacaggccagagagcgggcgctggaaatgcttcaggtagtaggtattccgagcccggagagccgactgaagcaatacccacacgagctgtccggcggacttcgccagagagtgatgattgcgattgccatgtgctgcaatccccgcctgctgatagcggacgagcctacaacggcgctggatgtgacggtacaggcacagattctggatctgatgcgtaaaatgaaagacgattctaagacggcggtcattatgatcagccatgacctgggtgtgatctccagcctctgcagcagagtcatcgtgatgtatggaggactgatcgtggaggaaggtctgatcgatgatctgttctaccggacggctcatccgtatacggccggactgctggcatccatcccgaagggggatggagagaagctggtgccgatcaacggtacgccgcctgatctggtaaatccgccgaagggctgtccttttgcagcgcggtgccggtatgctatgaagctgtgtgaagaatgtatgccgcccagatatgatctggacagtcatcattactgtcattgctggctgcaccatccgtcagtcgaagcgaagaaaggaaaggtaaagctggtatgagcaatatttgcatcgaagcacagaatctcaaaatacagtttccgctgaagcataaaatgtttcaggagaggaaatatctgaaagcagtggatggcgtcagctttgccattgaacagggaaccaccatgggactggtgggagagagcggatgcggcaagaccacggtgggccgtgcactgctgcggctctatgatatcgaagaaggtggaaagatcctctttgacgggacggatatcagcagactgaacgacaagcagatgcgtccgtatcgcaaaaagatgcagatgatcttccaggatccctataccagcctggatccgagaaagaccgtcggtaccatcatccgggagccgttgatttccctggggctgatggagggaaaggacgcacaggaccgcgtggaagagctgatcgacatggtaggcttaaagagagatcacctgaatcgttatccacatgagttttccggcggacagcgtcagaggatcggaattgccagagcgctggcggccaatccggagttcattgtatgtgacgagccaatttcggcacttgatgtgtctatccaggcacaggtaatcaatattctggaagaactgcaggataaatacagctttacctatctgtttatcagtcacgatctgtccatggtgcgccatatcagtcaccaggtcggtgtgatgtatctgggcaatctgattgaatatgcccaggtggatgagctgtatgagaatatgctccatccctataccagctgcctgatgagcgcagtaccgattgcggatccggagcagaaccggcgcagccacaggatcattcttcagggagatgtaccgtctcccatcgatccgccatccggctgtccgttccgcaccagatgcagccagtgcaaggaaatctgcaaggagaaaaagccggaactgaaaagaatcaatgaaaagcatatggtggcatgccacctgtatgattgatgatacctcatccgccgaagctttgcgtgtgaggattcagcagcctgtgttttggctgcgacaggaaagacagtatctgccttggcagttctgtatcatcggggacaaaataccttttgaccccgatctcataaataaaaaaagaaaaggagaatgagtatgaagaaaaaactggtttctgtattattggcggctgcaatggcaatgaccgtgcttcctgtaacggctgcggctgagggaaacaccctgacctatgcaatttcaagtgagtgtgagacacttgatccgggtatgtgcaactatctgggttccagcggaatgatcatgaacctgttcatgggtctgtaccgtgcggattctaccggtgcggcactgacaaacggctgcgcagagagctatgaagtgagcgaagacggaaagacctataccttccatctgtatgatgatgtattatggagcgatggaacaccggtaaccgcaggcgatttcgagtactcctggaagcgtatgctggatccggctaccgcgtctccggctgtcagagatctgtttgatatcaagaatgcggaagcatacaatgcaggcgagtgcagcatagatgaagtgggcataaaggcaaccgatgatacgaccctcgtggtagaactggaaaatccgaccagctactttgtcgaaaaaactgcagtagccagcctttctcctgtcaataaagcggcggtagaaggctcctccacctggtcacagaaggcagagacctttgtcaacaacggcgcatttatcgtagaagaaatcaatccggaagagagctatgtgctgaagaaaaatccgaactacaaatatgcggatgaggtaaagcttgacggagtcaaggtcgtattcatggcacagggtacctctactctgaccgctctgaaaaacggcgagatcgatatgaccaacaatatttctactcaggcacaggcggaattcagcggtacggaccagctgctggactttgactgccttggtacatcctattatgacattaactgcgagaacctgacggatgccagagcccgcaaggcgatgtctatggcgctggatcgcgatacgatcacccagagcctggtagcaagcaaaccgaagccagctaccggatttgttccggccggactttcctactatgattctgatgatgattatcgcaccgttgtaggtgacctgattacctatgatgtggacggggcaaaggagctgcttgaggaggcgaaggcagacggctttgacgcagatgcaacgtatgagattattattaaaaacgatgatgagctgaagctgattgcacaggcgatgcaggcaatgtggaaacagaatctgggtctgaactttacgatcaccacctatgagtccggttcctactgggatgagttctatgatggaaactttgatgtggcatttgacggatggaccggagactacgatgacccgaatacaatgcttgagtgcttcacgcagaaggcctgcgcgacacagaacagatggagcggtgagaaggcagaagagtacgatcagatcattgcagactgtgcgactatgaccgaccagaccgagcggtatgcaaaattcgtagaggcagagaagattctgatggatgagagtccgatccttccgttgtactacagaaaatctcagctgctggtaggcacgaatgtggcgaaggcagtcaacgatacgcttggtcatacactgctgatgtacacggagctgtcataagatttttatcgacagaacactgataagaaaacgaggacacagaagatggcaatagaagaaaaggcactgcggatgccgaaacaaatcaagccgggtgatacactgggagtggttgctcccagtatgccggtcaaaccggaggaaaaggaaaagctgactgcgtacctgcaggacgcaggataccgggtaaagcttggaaaaacagtaaaagagctgtccagttttcatggctatatggccggagatccgagggtacgtgcggaggatgtcaatcagatgtttgtagatccggaggtggacggaatcatctgtgcccgtggcggatacggcagcagccaagtgatggaatatttggatctggatatgatccggcagcatccgaagctgtttctcggctacagcgacattacgaattttcattccgtcttcagccgttactgcgggtttgtcaccttccacggtcctatgctgatcagcaatatgatcaagaactttgatgcttacagtaaagacagcctgaaaagggcgcttgctatggaaaatcgatatgtgttccgcaatccggagggcgatccgatgcacatcctgacggcaggacgtgccaccggtgtggtgacaggcggaaatatcagcctgatcgcgcattccataggaaccttctaccagccggtgacggagggaaagatcctgcttcttgaggatgtcgaggagagcatcgcacatctggatatgatgattacacagctggagcaggcgggagtcatgaagggcatccggggcatattgctgggcaatttccagggctgttccaatgaacgctatgacgacagctatcagatcgatcagttcttaagagaccggtttgccggttatgatgtgcctgtgcttgcaaatgtctgcagcggccatgcaaagccgatggggacgattccgatgggaaccgtctgcacgatggatacggacagtgacgagcttgtctttacctgttaggggtcacgtcaggtatctggaaaacaaaatgttgaaaaagggcctgtccgggcggagatcagaagatttccgtccgggcaggccctttctgcggcagaaaacaggctccggtaatcagcgggtgatatcgcagaaggttcctttgcttgctgcggcgagatcctgcggggcgagctcaatctggatgccaaggtggccgccgctgacaacgatctgcggataattctgcgcggcctcggcgataaagaccgggtactgcttcttcataccgatcgcagtgcagccaccgcgaatgtagccggtcacgctgttgatatccttgacgtggatcatagcaagcgacttgacaccagcctgatgcgcacactttttcagatccagctcggaatcaattgggatcacgaatacatagtaggccggttccgggctgacggtcacgagcgtcttaaacatggtctcatgggcagcgccgatcaggtcggcagtgtgctgtgcgtcggtaaattcgtcacattcataggtaaacgttttataggaaattttcatgcggtccagaatccgcatggcatttgtctttggctctttattttttgccataatatatccctcttttcttcgaaaaatggctgctgcttgtatcatacatctaaacatgggattgcgcaagtatggtttgccggggctaatttgcagttcgtatccggagaggagcatttatggtcagagttcatatattatatggaaaaaacagaggatgggtttgctatgagcaatgatcaggaacgacgggcaccgagtgtatgccgcagtatgtatatgtgtatggaagagattgaccgggagcgggcgcaaagtgggtggaatccatatgcaggagaggaggagccggataaaaagccctcgtggctgccgcaggaaattttaaataccggcacaaagcaggcaaggttaaatacagttccacgatttcaggtgccggatcgggaagtgctgatgcagcaggagcaggaatttgaacaggatctgcagcgtctgcagtcgctgtatccgaagtcggccgtcctgttactcccctatattgaggaagcgtgtgagaaaatggaatatgacggcagccagatgtatctcatttatccggaccgggaaatgctgaaccggatcgtggcagggatttatgaggcggtgcgcgacctgcttccgccggcggaagagccggtgcgcgacgagatgctgattatgcagagctgtgagagcgtccggaagtccggcgaaaaccggacagaagacatgatccggtgcatgcttttgcaggaaatgtatcgcaggcgttgtcggcatgcgcggtgcaggcgaggctttatgtaaaaaaaacttgttcaaattttatctggatagtatactgagtggagtgtgagcttcacggcaggaaaacaaaaagaaagacggagaacacgaaaaagaatggaagaactgagaaggctattagaagaactgttggatgcccggctgcttggaatcgtgctcagtgcaccaaggcagaaggagtcgtaccggaggattcgtatccgggcgctggactgtcgcggtgcgctgcggtttcaggccgcattctgggatggaaagaaagagtttcataaaaattatgaaaaagaagcgctgattccggagcttctgatatggatgagccacgattaccggcagctgcaggcggagagtacacagtacaccgcatccgtgcttgtaagcaaaaaggggacggtgacagtcaaaaaaaaggcacgtgcgacagaggcaaagcaggcggatatgacgcacaaccggacaaagcagtatctgctgccggaaggagagccggtgccgtttcttgtgaagcttggtgtcatgacaccggaaggaaaggtcgtgaaggcgaagtatgataaattccgccaggtcaatcgctttctggaatttatcgaggatattaccccggtgcttgcaaaggaccgggagatcacaatgatcgattttggctgtggcaaatcatatctgacctttgccatgtattactatttacatgagcgcaaaggatatgaccttcggatcaccggactggatctcaaggaagatgtcatcgcccattgcaaccggctggcaaaggagtttggctatgagaagctaaactttctgaccggagatatcgcagactatgagggcgttacgcaggtcgatcttgtggtcacgcttcacgcctgcgatacggcgacggattatgcactggcaaaggcagttgcgtggaatgcacgtgcgatcctttccgtgccgtgctgtcagcatgagctgaatcggcagatcaaaaatgaggtgctgcagccggtgctgcgctatggccttttaagggagcggatggcagcgttgatcacagatggactgcgggcatctatgctcgaggagcagggataccgggtgcaggtgctggaatttatcgatatggagcatacgccgaaaaatattcttctgcgcgccataaaggagccggaaaaaatccgccgcggcgatgccgcaggaaaacaggaggagctcgagcgctgtatggcatcattgcatgtcacaccgacacttgaaaaactgctgcggggcgcttgccggaaaggatgatgatcagaagctatgcgtgagaaattaaaaaccgtaaaaaatgcagtcgtgcatgtactgatactgctgcttgtgtttatcggagcggtagtgctgtttgagaagctgatcaatcagtcaacgccgaacagtgcacaggacatggaaaactccacgtttccacttgtatatatgcagaataagggtgtcagctacaactgtctgcatggctatgcctatgagatggatgtcgcgaatatccgtgatactgtgacggtgctcggcgacagtcatgagctggatattcagatccagccgttcagctcaaatgtggagagcgtttcctatgaggtgctctctttggacgggacagaatcactggaaaatacaaaagtcgtacagcttacagaggagagcaattacctcactgcgactttgaacattcagaacaatatgctgctcaatcaggagtatatactgaagcttcaggtgacggccggaggcagagatgtgtacttttatacacgattactgctggaggatggtctgcatctggaggcttacctgaattttgtgagcggattttacgaaaaatgtgtaaacaagacggatgaggcgacactcggctcggcagtagagccggatgagacgacagatcagaaaaataccctggcagaaatggacattcacagttcagtcaatcgcctgatgtggggcagtctgaatccgcagatcttttacaagccgacgccaagccttgtggatatcaacgggacgaccgcatccttcgtgctggactaccgaatctccgcgatcaattccgaaggaatgacggagctttacaatgtaaaggaattttatcgtctgcgctatacggatacccgtgtgttcctgcttgattttaccagatcgaccgatgaaattttcagtgcagagggaacggtgatcaattcgaagggcattaatctgggtgtggcttcgcagaacgttgagtttgcgattgacgaaaagagtaaggtggctgcatttgtgcaggaggacgagctgtggacctatcagattaatgcaggccgtatgacacgtgtgtttggttttccgcaaaaggaaaacatggactatcgtgatttttatgagaagaacaatattaaaattcttcgtgtggactctgatggcaatgtctggttctgtgtttctggctatatgaaccgcggccggcatgagggtgaaaatggtattgcggtttattattatgaggatgcttctgcaaccgtcgaggagattctatttgtcaagacgatggaatcctatgatatgctgaagctggatatcggatcgctggcgtatattacggaaaatgcacaggatttttatctgctgctgcaggggatgatttatcggattgatttgaataccagggagtatgagcgtgtcgtggacggtgtcaataccgaatgctataccgtatcaaagtccaaccggtatgtagcatggttaaaagaaggcgcacgctatgattcacagaccctgtaccgcatggatctggagaccggtgcagtacaggagcttacgtgtgatgcggatgaccggatacggccggtggcctttataggtgaggatctggtctatggagtggcccatacatcagacattgatatgactcatgagggaagcgagctgtttccgatgtatcgcctggcgattgtaggctcagacggagaagaacgaaagaactatgagccgggaaatgcatacgtgctttcggtagaacagtcggagaatatgcttgtgctgtcccgcgtgacgcgcacagaaaacggatatgaggagacgacagaggatcatatcgtgagcaccaatacggatgaggaagtggcgacaggaacgacgacgcaggcttcttccgtgaaaggctcagaggtcatcctgcggcttggcacgacgctgagagatacgacggtgcagacggtaaatgcgaagctgcttacagacggtgcggcatcagagatttccatcccgacgaacaagaaccgggaaaagctctattatgtctatgcaggaggaagcctggagagtgtctggacgaccgctgcggaggcaatccgccgagcggatgaaaaggtgggtgtcgtcatcaatgacgagaaggaatttgtatgggagcgaggaaatcgcgcagagacagcaaagatcagcgtggataaaatcccgcaggcgatccagaacggagtgatggatcttgatacgctggagtcgcagcttggaaaggtagtcatcgatctgaccggctgtaccctggagcaggtgctgtactttgtcggaaaccgtcatccggtgctggcatggaccggtacggagacggtaatcattaccggttacgatgactacggcaatcttattttgctgaagcccggtgagacagagacgtacttttacgggccggaagacagcaaaacactgtttgaggccgcgggcaatcagtttatgacgtatctgaataccgatttataataaataaaaagctgctattttccactacactgtggatttagcagctttttaacttcctcaagtgagcgccggatctgcagcgcttttctgttaatacagggtttatcgcaggtcagaagatagcaccatcttcgaataccggtgatacgcatcgtcatcccctccctgctgttagaatatgtcaggaatgccgatgcgtgcatttttttagcacttatctgacgtggaaaggaacagctcagcggcagatgaccattttgcagatgggattgcccatggaggagaaacgctcctcatattcagtcatgatattatcgcgcatcagatcctcatcctgatggaggtcaaaggtgcagacgagcagcttccagccggcagcttctgcctcctctaaagcaaaatcaaagagagggcggttatccgtcttgaactcaacgcgtccttccggagtcaggatctgtgcataccgtgccagaaactggcggcttggcagacggcgcttggcatgccggtcctttggccacggatcggagaaattcagataaatgccggagacttcaccttcaccgaatacttccggcagatcctcagcatccatacgcagatagcgcagatttgtcagttccgggagcagctcgcgcttctccagtgcgcgcagcagcacgctcgaatatttttctattccgacgtaattgttttccggattccgaccggcgagctccgtgatgaaacggcccttacccattccgacttcgagatagagcggctgagccttctcaaagacggtgtcccattttccttttttctcccgcatgacgtcctcatgcacgacatattcgctggcggcgatcgtttcccgcgcgcctggtatatttctcagtctcataatgcctcctgtgtgatgttattccgctttattgtcgcagaaaccgtaaaaatgtcaagcgtttctgctggtaaatatttctttttgtaggttccagttattgactttttattaaatatcgagtagtattttaaataagatgtaaaagttttgtaatctttggttttatcttttttgagaggatctttattatgaaaaaacgaaaagcgcttgtgatgctggcgctgaccgggctgcttgcgattggcggaccggcggctacggcaaatgcagcctggaagacgacctcttccggtacgatttatacccagactgccaagcccggctatttgaccggttttcagaaaatagacaagaaggtctactacttcaatggacagggcatcctgcagaagggctggatcaccgtagataagaagcggtactatgccgatgccaagaccggtgagatcgcgatcagcaaatgggtgaatcagtattacttccgggaggatggctctctggcggtcaatacgtggattgacgggaaatgggtcggtgcggacggacgctataccggcgtgaagaataacgtcggatttgtcacagacaatggcaagacctattattatgatgccatgacacaccaggcggcaaagggctggctgaacgtgggaggcaagacctactatatggatccggtgaccggagcgatgaaaaagggctggatcaaggtcggtggcaagacctattacgccggaccgaagaagggcgtgattctgaagaatcagtggctgaatggaaaatatttgcaggcagacggttctgtagcgaccggtatgacaaagatcggcaagaagacgtatttctttacctcggcaggaaagaagcgtaccggttgggtgacctatcagaagaagacatattacttcagcaaaaagggtgttcttcagaagaataaatgggtcggcagccgctatgtgaactccgagggaacggttgcacatggctggacgaagatcggcaaatatacctattattttaattccaagggctataaggtgaccggttgggtcaatgaaaacggcaaccgctatttcctgaataagcttggtcagctgcagaaaaagcgctggctgtggtcgaagaagtattatgcaagtgcatccggggcagttctgaaggggctgaacgcgatcggcggcaatctgtactacttcaatacgacgaatggcgcgatcataaagaaccggctgcaggcagtcggcaacgacacctactatctccagaaaaatggtacggcagcgaagaataaatgggtgacgatcagttctaagaagtactatttccagacagatggtaagatggcgaagggaacctgggtcggacagtactatgtagatgcaaatggcgttaggacgtctcagacgaagaccgtcggctggaagacgaccaacggccagaagtattactttgacgccaatggaaatatgacgaccggctttacaacgatcagcggcaatcgctacttcttcaataattccggtgtgatgctgaccggactgcaggagatcgcaggtatcaaatattacttctatccggaaggaaatatggcggtttctacgacgatagtcgtcggcacgaagcagtatacggtcaatgagaacggtattgtcaccgcagaggaaaatctgaagattaacggcgcaacgaccggcgcgcagatcgtaaacttcgcactcaagtatgtcggcaatccatatgtatatggtggaacaagcctcacgaacggcgcggactgttccggatttgtacagaccgtattttcgacattcggcattcggctgctgcgtgtagccaacgaccagatgatcgggccgtccgcctcctacatccagaattatggatacaagcgtgcgaccgtagtcgatatttccagcattcagccgggagaccttctgttctacggctccggcaactatgcgagccatgtagcgatctatatgggcaatggccagatcgtacacgcgagcaactcacagccgtatccaaagggtggaatcaagatttccaattacaactatcagacaccgatcaaggcagttcggtactggtcataaaagaaaataagcagaaaataagacaggcggaagcttccggaaaagggcttccgcctgttttttttaaaatgcatcccgtaaagcaaagcatagaattgtttatatcaagaagaattttcagagtattcagtatattttaaatgatttccgattttaaaaatgcccgcatttttccgccaaacaccgtcattttttgcggttttatcacaatccacaaaacgtccgttcttttttaaaactatgtaaaccacgtaatccacacactaaaatgtggacaatgtggataaatcagtgtataagtccatttcttccgcattctttcatccacaatctgtggataaaaagttgataaaaaacggttatccacatgcgaatcgaaatatcacgccttgtttttgtgcagaatttcacctaaattttacatgtttcgtgttgcatggaaaaaggtggaaaataaattatctgataatagaaaaactaaagtgaatattcgcaatccgctttgcagtttgattcagttaaaaaaagccggatgattactcatccagcttcatatctttcagtgcgttgtctacgagggtttcagaaatattctttttcttcagccggtactgcaggtagaggtcgaagagataattgatgatggccacgaccggtacgccgaggaacattccgatgacaccgaacatgctgcctccgacggtgatcgcgaagatgatccacagcggtttcatgccggtagagtctccgagaattttcggtccgaggatcagcccgtcgaactgctgcagacagagcaccatgatcgcgaagatcagagccttgaccggcttgacgaacagcaggatcagaatacccgggatggcaccgataaacggtccgaaataagggatcatatttgtaacgcctacgatgacactgatcagcaatccatatgggagccgcaggatcgtcatcagtatgaagcagagcacaccgatgatggaggagtcaataaattttccgacgacaaagctgctgaacagccggttgcactctgccagaatctcatggcaggtattaaaatgcttctgcgggagaaaggcgtaaataattttccaggccgcccgcatgaggcgcttcttatcgtacagcatatagatcgatacgataatggtaatcagcaggttgacgatccagttggcgatccacatcgaaacggaataaatagccggtaccatgtttgtggcgaaattccgcagcgtggtgatgagatccggtaccgcatctgtgatcggctttgtgatcgcttcgatatccagatccgggaaccgtgtctgcatatctgcgatcagctccagaagagagctgtacgcgctcggaatgaagtttacaaagtctacgatgttatttacgatctcaggcaggatgtagagcaggatgagcacgataaagccaagcccgatcacataggtgataaggatggacagaaccgtctgtaccgtgtggttcatccgccggttcagcttctgacagaccagatcaaagagatggtaaaaagcatgtaccatcgggttgagcacgtaggcgagcaatgcaccgaagataaacgggctgaggacgccggcgatctgtccgagccagcctttcgtcttttcaatgtcgatgacagccttgaagatgatcgcagaggccaggatcatgatgataccgtaaatgcagatcgtgaaatagcgattgttttttatgaagcgctgactttcacccggcggtgtatcatcgcccggatggaagctgtgtgcggcggcagaagtaacatggtcagaaaccgatgccgcgtgcctctgtgccggcggtggtgcgacgctttcggtgcgtgccgtgtggagagccgcatccgaagaaggtggagcttctgtagcacaggtggcctgtgccgcagatatggtttgtgacagcatagatgtcccacctgccttaagctggtcaggagacaactgtgcggaattcgtggcaggctgacgcgtttgtgacttctgcgcagtatgccgtttggttgattttttgtttttagatttcatagattcctttctgtctggtcgctgtcatttgaacgcagatcgcgaagcgactgcgttcatgagcaagtagcgaagctaggccctgtcagcagagctgcagggatggattgcgaatgtccgctttactctgtgaactattctgtcggctcattcctgcagttttgcaaaaacaatcagcaggagtttccgatccctggaaagtagaagcagattctggcggaccgtgtagtgactgaaacatgtatttttcaattatatgttgttggggtcaaaaggtattttgacccttgtgacacacggattgcttcgcatttcatgctcccgcaatcctaaaacacctcaaatccgctcatttttctacgaaaaatggctacttttcggtgttttgcgggtcaataagtcatgctttttcatgcaagcatgaaatgcatgactttttgacccttgtgtcattatataatgcagggaaagcggattcaagtatcttgggggcagaaaagtctaaaagaattataaagacaagatcgcggagcgactgcgttcatgagcaagtagcaaagctgggccctgtcagcagagctgcagggatggattgcgaatgtccgctttaggaagagggcttgctggattcggttaaattgtcggaaaattcaagaaaaaacgggaaataaaaaaactttaaaaaaattgaaaaaaccacttgcaattccaaaaaactatgctataataagtcttgcttgtgagggaaacgaaaacaaagaaacaaaacaagcgacaatcaaataagcgcgattagctcagttggtagagcacctgactcttaatcagggtgtccagggt

SEQ ID NO: 3248 - DNA, 4649 bp, Unknown
  16S sequences of unknown bacteria
tacctcttctttcccatgcgaactccaaactgtctcattctgagtccgcacatcctggcgaccgtgccccggggcgggcacatgctgaagcgctccgagacgattccaattgaatcgccgcgcctcaccatgtgaagcatcgtgctcgagctggggataatgctcacgctcgtgccgctgcagccgagagcctcaagccgcgcgaataatggttggtattgaaaggggggcgtggacatcagcagcaagtgttcggcctgcagatcatcgacggtaatgcccgccgtgggaagattgcactgcgtactcgcgagcgcatacgcgcgcgaccggtacaggtcgaccgccttcacgccggcgtaggtccgctgcatgcacatgacaaacgcaacgtccgcatcgccagagaggacgtgctggtagcactgctcgggggaatgctcggaaaaatgcagcaagtttgcgcggatggcgaagtactggtcgacctctggcgggattcccgcgaggaagttgacgcccatggtgacgttgagcggggcgtcggcatcttcgatgctcgtgaacatggattccatctcgtcgaccttggacagcacctgcctcgccttgtgaatgacttgcagcccttccggcgtggggaccatcgcattgccctggcgctcgaagatgctgatgccgagctcgccttcaatcgatttgacggcatgagccacgttctgtctgctcgtgaagcatgtcttggccgcctgggcatagctcgaggcatctgccgccgcaaccaggtagcgcaattgctggatttccacgtctcccccgcttctcatccatgacaagtgctgaccgaacgcatgaacagcggacctgtcaggcccacaaaaaagaagtggacctgttcacgccagacccgcttctcctttgaaaaagatactacgcagattttagattatcaatgcgtcggagataatcctggcacttcgcggcataggcctcgtcggcacgatgcagcatcgactgctcgagcatctccttggcgcgctgcctcaggcgccgttccttcttcgggttgccctgcgcctgctctgccaaatagaaatgggagacgcccacgcagtagagccacatccagtccgacgagccaccgcgcatcgtgcggatgaggtcgtaggactcgcggtagcggccgaggtggttgtacgcatcggcgacgtcaaccagcaggtagttatcgcgctgccgctcgggaagccccatcacaaaatcggcaagatcttgccactgctcgtctgcctgcagttgtttgacctttttctcgatgcggtaccgcttgaagggattgccgaacagaggattcatcgtgattcctgcccctcgtatcagacgggccaccggcggtgtgcccgtggcccgagaatgtttgccccgcttgccttatgcgagtcgcgcgaacttgcgcttgccgacctggaggacggcgccacgcagcttgtctgccggcacgtggtacgtcttggcgggaacggcttctccgtcgaccttgaccccacctccgtcgatgagacgacggccttcgccgttagaggatgcgagctttacgtcggcgagcaacttgggcaggtacacgccgccgttctcggggtcttcgacgagctcgacctcgaaggtctcgatgtcctcgggcacctggtgctccttgaactggcggtcgaatgcggcttctgcctcgcacgctgcctgctcatcgtagtatgcggcgacgatttcgcgccccagacggcgtttgagctggttggggtcgagcttgcccgccttgtagtcggcctcgatctggtcgacctcggagacggggagctgggttgccagacggaagtacttgggcatgagctcgtcggggatgctcataaccttgccaaactgctgggcgggctcgtcggtgaggccgatgtagttgccgtaggacttggacatcttcttgacgccgtcggtgccctcgagcagcggaagcgttaggcagacctggggctccatgcccttcttctccatgagctcgcggccagccagcaagttgaagagctggtcgttgccgccgagctcgacgtctgcttcgatcatgacggagtcatacgcctgcatgaccgggtagatgaactcgtgcagcgcgatcgggagctgattgtggtagcgcttggagaagtcgtcgcgctcgaggatgcgcgcgacggtgaagtttgacagcaggccgagcagccccgccatgtcgaggtcgaagatccactcgctgttgtggcggacagtcgtcttatccgggtcgaggatcttcatggcctggtccatgtaggtacgcgcgttttcctcgatcttctcgcgcgtgagctgcgggcgcgtcgtgtcgcggcccgacgggtcgccgatgagcgccgtgccgtcgccgatgatgagcgtcacattgtggccgaggtcctggaactggcgcagcttgcgcagcgggaccgcatgcccgatgtgcaggtcggggctcgtcgggtcgacgccgagcttgatgttgagcggcttgttcctctcgagcttcttcttcatatcctcgagcgggatgaggttcatcacgccagactgaatgatgtggagttgttcttcgcttgaaagcacgtatctcaacctttcgtttgctgtcgcctgatcagttttcagacatggtatcacgagagccgcagcatcccgctgcccgtcgctcactacttgacctgacggaacaggtgccccgtcgtcgtattctcctccttggcgacgtctttgccgcgcaacgcgcgcctcacgcgcccgagctcctcttcgacttgcggggcatccgcgagggtggaatccaccgcaaagccgcgcacgcccgcattgaccaggtcgccgatagcgtgcaccgtgtcgagcggcacggcattgtagatatgccccctgccctcaacgtcggtggtcacggggaactggtaacccttgcggtcggcaaggtagcgccgcgcccccgtgcggcgcctgcagacggcacacttgcggtcgcattctccttcggccatgaggaagcagtggtcgctcaccatgagctcctggttgccgtggacgacgacgcccagcggcagcgggctgtcatcggcgagcagcttaagctggtgcagcgtcagctcggggctcatccacgcgaaggtcgcgccgagcgccgcccaggtctgcagcgcctcgatgttggttgcgtagagcttgggaccgatcgccttgccgggcgcgaactcctcgagcgtgcaggcgatatcggtctggctgaagtcgatgtcggtggcaaacggcgccatctgcgacatgtcgaccacgccgcggaaatcgagaagcggctccggcgcgttgccgttgccgagctcgacgcttgccagcacctcggacacgaacgcatcgagagctgccttcctgagcttgtgcagctgcgagaagcccacgccagcgccctcggagacctcgacgttccaggaagcgcaggtgaacggggtattgcccagacggccgacatgctcgatgacgtcttgcctcgtcactgccttggtgcgcgcgggctccacgacggcgccttcaaccgaggcagaatgcccggcctcgtcggaaaccgagatgcgaagcggctcccccacgaccaccctgacgtccaaggcgacggggatggcaagtccctgctctgtgcgcgcatcggcatctgccgcaagacgcgcggagcgcacgcggaagatgcggtcccccggagagaccgcgccgcggatcgcgagcttggccttgccgggcgcgagggaatcggatgtgtcgaccgtgtacgtgacgcgccccttcgtcgtccagacctcgagcaggtcgcccacgtgcagctcctcggtcgcgttgacgcggaccaagccgttgccaaagccggcgacgcgtccgaccgcgacgccgcggttgttggggcgcttgtagcccatcatggcattgccgcgctcgccggtgagaaacgccgtggtaaagcccctgctgaacgcctctgcaagctcgcgcttctcgtgctcggttgcccgatacgacgctgtatcctcccacgcgcggtcgagcgcctcgcggtacgcgcccgtgacggagagctttacgatagacggaggtcacggcgaagacgtactcgggcgacttcatcctgccctcgatcttgagggaggcgacgcccgcgtcgatgagctgcggaaggacctcgatgccgcacaggtcgcgcgggctcagcaggtactggcccacatcggcgagcttcttgccgtctttgtccacgagggaatacggcaggcggcacggctgcgcgcacagaccgcgattggcgctgcgcccgccgacgagcgacgagaacaggcactgccccgattggcagatgcacagcgcaccgtgcacgaagcactcgaggtccatgccgaggccgcttagctccttgatctgcgcgatgctcagctcgcgggcgagcgtaacacgcgtggcgcccagcttgcgggcgaactcgatgccccgcggcccgcggatgttcatctgcgtagacgtgtgtagctcgagttcgggcagctcgcggcgcagcaccgacatcaatccgatgtcctggatgatcg

SEQ ID NO: 3249 - DNA, 2385 bp, Unknown
  16S sequences of unknown bacteria
cgatacttaattgctttgtttgccatttttcttcccctgtgacattatgtactgcctgataatatctacggtagctccacttgtctgttagatacgactgattgtaaatatatcatagtacagcaagatgaaggagtcaagaaatcgccgtgttaatcacaattcatcccaccacttatagaagtgggggatttcttgctcacggcgtgttaaatgaatattttacagttgctttgtctttcataattgatatttttcaatatacttatctgccggtcagacttctgcctgtgcagtatataccgataagcattaccgcaatagaaatccccagaatcactcccgatacaaaatccttaacgtcagttcctcctatcgtatgtgatactgcctgaagcgcaatgcccataactataagaaggactccgtatattatatttttctgtcttgcaagctcctgagttcttctcagcaactcgactatctgcgcatcgtcatatgccctgatgcttccgtctgcggcgttttccccgtccataagctccgctacggttatttcaagctctccgcacagtgcctcgacaacactgtaatccgtcatgcatttgccggtttcccatttggaaaccgccttgtttgaaacacccagcttttcggcaagctgcgcctgcgtcatatttttttcttttcttttccttgcgatatactgtcctgtaataagctgattcatatctatctctccttcacaaaagctgctgtgattgtatcatcagagacttcataatcaaatcccctgtcggtggaatacagatggaatccgcctgtttacatagatattctacactttttaatacctgttttcaaacatagcgcggtttttcatctgcattttctgtcctgccgcaaaaataccccgccccgactgctgatatatataattccaatttttcagtaaatatgatacaattgatacatacatttcacacatttttcacaataaaaaactattctgtatatagaacaaagacggaggtatgatatgcctaaaattttaattgtagatgatgaacagaaaatccgcgaggttatcagagaatactcagaattcaacggatatgaggtcgaggaggccgctgacggcatggaggctgtaagcctctgcagattaaacgactacgacctgattataatggatataatgatgcctaagcttgacggttattctgcctgcaaggagataaaaaagacaaagaatatccctgtaataatgctttcggcaagaggcgaggaatacgacaagctcttcggctttgagcttggcatagacgactacgttgtcaagcctttcagccccaaggagctgatggcaagagtaaatgcggtgcttgcaagaagcagcgccaagcaggaggaacagcctgaaatccttaaattcaacggccttgaaatcaacatacctgcaagaaccgtaaccgtagacggcaagaaggttgagcttacccctaaggaatacgagctgctgttttaccttgtcgaaaacaagaacattgccctttcaagaaacaagctgctttcagatatctggggttatgatttcttcggcgatgacagaaccatagatacacacatcaaaaacctgagaaataatctcggtccatacagagattatattgttacactcagaggggtaggttacaaatttgaagtataaacgccgcaaattcgattccaacagccttaaattcaagctgtggctgtactttatgtgctttgctgcccttatcatggcggtagtatggctggcgcaggtatatatgctcaacaacagctatgaagatatgaaaacaaaccaggtaaacaaattcgcacagtccatatccgcgcagtacaggaccggcggctttaccgacaggtttttaaacaatatcaagactatggccagcaccaacgatatagatgtgatatttgaggacgcttcgggttatacctattatataacccagaatacagatgaagcctatactggtatgacccagcagcctgcgtattcatatatcagagagcgcgccgagataaaggctcagcttgaagaaaacgggcggttcagaggctacaccgccaagagtcctaaatcctcgggcaactacaagactctggtttacggcgcctatcttaacacctcaaacggtaacgagataatactttatctgtttgcgccgctttatcccgtatcctcaaccatagcgatactcagaaaccagcttgtatacgttacggtgcttgcgctgtttctcgcctttataacagcgatatggctgacaagacgtattaccaaatctttcagaaaaatttccgagtctgctgtcagactttcaaagggcgagt

SEQ ID NO: 3250 - DNA, 23919 bp, Unknown
  16S sequences of unknown bacteria
gcgcagagaaagggatttgaacccttgttacccgtggggtaaacacgatttcgaggcatcgcgcaaatgcctaataaaactaaccataccacatttaggtgtatggttataacaaaaaatactatatattgtgcttttttcgcaatatgattcatacccatccatacccattgcaaaaatagccgtctcctttataggagacggctcatattttttatatcttttttcaaggaatcaaagtgctaaggtatatcataataaaaaagggagcagttttacaactgttccctttttcttttatcctggataatattggtaacttcctttatctactccatcagttccttcttttccatctgcccccatgaaaccgcctgaagcagacttacctttttcacccggacttccgccgtaagaattgccgccattaccgccattacctcctgccgcaaaaacggcatttcctttcgtagcatcaccacctttgccaccgttataaccatcaccaccattgccgcctgattttccaccgccaatattacctacataccctccacggccgccgtctccaccattacctggttgtgcatacaaactcgtcttactcgaataaccgcctttaccgccattgccgccattgccacctctggaaggtttttgatctgtattagtatcgtcaaaaccatttccgccattaccaccattacctccgataccgccagtaccatttgttgaatcgccgccggctccaccgtttccgccgtttcccccacgaccgccgactccaccgtttccgcctgtacctcccgtaccattcgtggaaccgcccccttttccacccgtaccaccagctccgcttgaactaccgctactatttataggttttccatcgccgccattaccaccattgccgcctgtacctcccgtgccattttctgaaaaaccacctgcaccacctgtaccgcctacagcattttcgccatagccattaccgccattgccgcctgtacctcctttacctgaatcacctttagattttgttatcttactatttgatagaaaataattgcatggttcagcgccatttcctccagtgccacctttaccgccacttttaccttccttcgaagatgcgttaccattagcgccatcgcctccatttcctcccactcctccatttcctccagttaaaacgattttactgcaagaagattttacttgtatggaagccgcttgcggtatgtttaaagctaaaccaccatttcctgcattacctccatcattaccatcagatttgctaacaatcgcatttccgccattaccaccattaccgccagtcaaatacaattcattaatgtataccactaaagtctgcgcaactaaagctgttgctccagacactgcatcattaccagtagtagcatcctgcgcacttgcagcggtaactttcaaagattttccagctaaaattaatttatttaccgctatggccgtattaacagaattggcagaaggcatgatattacagtcatttgctacatcaaaatatatagtttgatcacctgaataattcagtgcacaatctgcgtaataaaaatacagattacttacattaattcttaatgaatcttgccgagaagcgactttaatgtttaaccgaaaatattttccaccaaccccgtcaatatttaacattttaatattagatggaaccgtaatcgttgttacaacttgcgtcgaatccgtagatgcgtaattaacataagccatcaatttactattaaagttaatttggttaatactcatacgcggattttgataattcaattcctcttccacgataaaggtacccaacatttcagaagtaaaagtataacgggctgttattgtggcgtttacttcccatctaatatcattcaaagaaacgcttagcgaggatcttgaatccgacacatccttaatagaaccatcattgacaagcaattcgttattggaacacttaaaggtttcatcggaattatatgtcatgttagattttgcgaaaaacgcatattcgtcgcttacatattctaatcgtacttctacctccggtgattgtacataaaaaattgcgaaaggtacgaccttgtccaaaaagctaacattaacggttactgtcgaagcattgccttcaaagaaataatagtaaccattaatcggaacaacagttttaccattataattaacaataaattgaggatattcttcaataccgcctataactatattattctcatcaactaaaagaaaggtataagcatttcctcgaatcaaatcatctacgacatttccatcttttgattgaattcttatggcaaaatcttgacttgcatcaattaaggcagcttttaccgaagatatcgatttaccgttaacggcatataatttttcctcattactgtcaaaattatattttatccaagccgcactgtcggaataatcagtatactttctgaaacccgtaccggtaatcgaccagaattcgactttccctaccaaagggctatcaacatataaaacataatcacccttaggtatttttataaaagtataatcattgttgctttttataggaatattcgataattcgtttttgtcaaacacagtaacttcgttctctggatttttcgaactatcttcaaagatcatattaaaaccaaggtaaaaatttttaccttctattattaattttacgtatattttacttgttgtagccgtaaaatttaacgatacaaatttttcattcgaatgtgccaaaacagttccatttgcatcagaaatttcaacacttcggggattggttttcagttcattcccaaaagtataaaatatatatttttcaccttgaatcaaattgtattgataatacgatgtattagaaatcattttagattccataatcgccatttcaggtacaatgttactcattttgatagtactgctttgatttttttcaccggttaccaaaacgtaatatactccgcttataattttatcgttcggagtataaaaaatttcgttaagcccggaatccaacagtaagtaatttaactcggattctataaaatacttgccagttaacgggagggaaacttggaacatctttgttccgttttcatttaaagtaaacgaggtgctttgatttaaaattaaagcatcttcttgcaaatcaactgtaacgttaaaattaataatcttaggattactgattgaaaaataaattgtataattattggggatatataacctaaatgttttattcaatataggtaaaacttgtccatctgcctcaacataataaaattgtgtgctatcacttaacgaaaatttataaatatggcttgctttacttgtaaacgaaatgaactgatatttattttttccagtgatcgaagtcgtgcctacggttttaagtttttgtgaatcacgttgaacgctaaatttgaccgatcctatcttgttcgcttttatgaccccgtaatatgtttttcctccctccattaaataactattaaaattattaccaatagcgggttgattcaactctataaaataggaatcaaaatcaatattataattttctatataataaagcccagtaactggtgctgtaaatgaaaatatgattttagtttcaatcgtcgtttctacaggtttatctaattcaactgcaagcccatctcctaaagttatttttgcattttgaactttattactatctcggtttacaatttccaacacaacggatttatgatgaccgtcattataaaaacagaattcatttccatttttatatacctctaaaagattatcaaaagaatccccgtacagatttacttcgaaatttttatcaaacgtatcaacgagataattccgattatttaagtcaacgctaaagtatatcgcctctcctccattcaaagtaatattttttgtcccgttgttaaaagcaatcggcgtaaattttatatgcaaagaagaacggacggcattttgtccgctgacgataatcgtatactttttcccttttgataattgaacgcttgcatttccagttccagtccataaagtcgatccagattggtccattacttttatattcagaactttattagtatcataaatttgataattccctgatgcatacggcgtataagaaaatttctgatttccgttttctaataaatagatatccgcactggtttccatgggtttattatccatctcagttaccggtgctgcttctgaaaataatgatttactataagtagttaaaaacggttttctgttgccattttcataattatcattatagtacgaaactctgccagcctctactgatactatatcaaaacgaatctgttccaatagacggctacgataatttgtatcatttaacaaagtaacacattcggcatagccgccaacatcgatatatatgtcgtttgccggattaatactactcgcacgtgtaaacgtttcatacgcatcatcggcttcttgccgcgctcttgatgcttctgtaaaaatgaatttatcttcgggggtagtgaaatcaatgtcttcagttttggctacaaaaccattgatgatgccatatagatccatagctgttgtcaaaatcccccaagcatcatcgattataggtattcttcctaaaatttgatttaaagaaaacttagttaattcttttaaaccagttccgctgacttgttttactccttcaaaattgaaaagagtttgttggataatcagcccctcatctttttgcttagaatatccccgttctccataatttactgcattttcattgagtaaaagcgtactgaaaccgacattcccaagttgaaagtccttatcaaaatataaaacatttgcagtaccaccttgttgataagtatatttcgcatcgctcttataccaggtttctactccatccgcgtccaatccatatttgaagttctcactgactaacggggtcactctcataatctgacgattaccgtcaaacgaccatttgaaatcaaatataaagatatgtaaaaaagctatttctccgtcattaggaggtacgttatggtatgaatgttcaatcaaaaagccatattcctctcctatatatttatattcaacaggttctccattcagcctaagatactctattggaattacattcggtaaatcccgaatcggcgccccatatttcgcggagttcaattccgaagcaaaatcaaaaatattttttcccgaactcgtattttttaaaaggtccgtactcgtatattgcttgcattttatatccaaatttgtcgcagcctgcgcacgctgcgacgaaaacagaattaataaactgcaaataaatgctagtatcaatgtaagcgataggctgaatacccaaaatcttttcgttttcattaaaaattctccttaggtaatatttttactgttaatttggctctaaatggaaaagccaatgtgctattagacttcatcgaaaaaagaatttcatatgtgccgatttcgtaaatcccatcattcggtttataattgatttctccttctggagatgtatataacatcacgtcacaatcaattctattttcatccgttaaatgttcaacgcaaccatcctcaaataaagcaagtaccataaaatatctatatcgcccatcaaactcgatttctattgttttatggttttctttctcggtcagttcacaataagcatcttctcttttatcatactcatgttcgacgatcagcatcgttatatgctgccgatttggatacggatttttttctccacaaccaaaaaaaacaaaagtaatcatgctgaatacaaatatcactaaaaacgttgcccaaatttttcttttcacaatttacctccttttattttatataataatttttgaatctccatcacctccttaaatgtaatgtactaaattatatactgtacttaaactaaaaagtttccataatactcttttttattttattaaattttgaaaagaaaaaggcgctgccctatcgggaaacgcctcacaaatttacgcatcaactattaaattcttaaaaactagtaatatagggatagatttgttctataaaaaaatcgacctattgcgattttgcgataggtcgatctgccccccgagccggcgattggttccgttagatacggctttaaaattgaaaattgtaaattagaaaattaagaataatattaaaaactggatgcacttgcacacaattctcgggtattatcatattaccataccccatatattttgtcaacaattattacaatatttaagacttgatttacagtctgtatttccgcgcgattttttcagtctgaatacgtataatattcatatgagtaaaaagattgatataaacgaatacatgacattgactgacgccattattaaaagaatcgatgagttgtcgcactttcacaatatccccttgcccaagtggagcatcaaagcagggatcacgccctcgacggtatacggaattatgaaaaagacttcgggctgcccgagagttcaaacgctcaaattgctttgcgacgcaatcaatatttctttatccgatttttttgatgcagactatatcgccaccgctatttgcgaggaagattgatcctttttttctttatttttccagttgactggaaaaaaggcgccgccctatcgggccacgcctctaaaaatcttttacatgaactattgactttttgaaaaagccgtgctataataaaatcacaacaagggcaaagccttttaaacggttagccccgtaactgttatttagtaataaccgccgacgtagccaacgtgataggcggttattgctttattgttacatagattctatctttcgtaacatgaaatgaggttatgtagccttcccggacaagccgaactaacagcataataatttcatatcgcataaagccattcaccccctttttacgggaggattgctaaccgccttcgaggctctgcccctattgcttatccatattataacataccccgcgccctttttcaacatttttcgcgcgggctttttctttattttccagttgactggaaaatgctacttgtatagcaatctgtttttatgatatgtaccactcgcggcatctctctgcactctgaaaaacttgacgagttcctttttgttttccatgtattttttgcggatggcgtaatccacgatctcgccgagcgtgattttaataaacatatgcagcgagcagcaattttgccgggcaaactccgcccgcttttcataaggatattgacggacggatagcaggatcttgtccgctttttttatattcatcgagttcatcgccatcgcacccaacggcgaaaaaaattctgtatagaacatttcataattagaccataagtgcgccgacgtcgatttcgtcttataacggatccactcttggcatacttcgccgaagggtttcgaattaaatttctttgtttgttgttgcatgatgtaacctccaaaatatttatattttttccagttgactggaaaattatgattgccgtaccgatcacggccgcaaatggcggcactctgccattgatcgcctatgctggctacttcgctcggtcggctcttccgctccggcccgaggctttgtatctttatccgccttatcgttctactgtaaccgcatttctgtttcagccaccgccgagattgattgacaggctgcgcctgtatggctatttcagtccttctgtcgcgcccttttgggcgcggggctccctacgcgtgtgagatacagtatgacactcgattgtgccttctgtgggatcagccagcgaaaaccgcgttccccccgattttcgattacccaactgatcctgcgccgcctcagccacggcagcgcaacgccctccaatttttttgttcttcggaaaaaatacaaaccgcttgctgtgcttggctgcacgcgccttaattcgtgcaggttcgtcaacgtcatttttcaccttgctcgaacggcagacaagaccacggactttttgagcggaagccgcaaaggcaaggacgaggaaaccgcatctatgacgttaaggaaaagcgccgacgttatcccgtcggcatctctacaaagatatcttgtaccacggtcagtttcccacccgccttcgatatcagcccggcctccgccagtttatcaatgttgtatttgatggtatttctcgaatacccgagttcttccgcgagttccgcatagtcaagccgcttgctttccgttccgaggcggtcgatcaggatcacaaggacgttcagttccgcgacgtgtaaattttgtatcgattccagacggatcgctctcatgtctttttacctcctctttttactctcaaaattttgcccgaaaattttttcggccgcaccgccaaaatcgcgcgggttcaaaaatttgcgacaagcgcaaatttttgaaatagatgcggtcgtatttttttatacggtcgcatggttgcacacgttgttgtgcttagttattatcactccccgcatctttccgcagggctcggacgctacgcgggatccgcacgagcaggcgcgcattcgcgcaccttcttttccgcgcggatcccgcgccccgcccgacctttttcctgcggaaatttgctattagagagtgattgacgccctccgcgcgtccgtggatcattttttcttctttttcggatttgctttcgctttttgcggcgcctgccttttcatgatctgcttttctcggtagtatttcagcatttggtcgtttacttcaaacgactgcgtatctttatgccctgcgggttcgagtttcaacacacgtaccaacacttcaccgggagcgcccgtcggtggtgcaaaccgctcgcccgtgattttgtactttacccccgcttgatttatgagcgtatcgcctactttgtcggtgctctgcctgtacacaacgccgcccttctcgttataatatacttttttcggtttcggtaaagcggcggctgcagtcgccgctcgcggcttgctttgtttcgcgggtacggcagcggttctgccgtatttacggtcatattccgctcgcaaatggtcgtactctgccttatattccgcatactgctttttgtttgttcgttcccattcggttttcgtacaattctttgtttttcccatcatctcgcttatcgcgcgcatttcttgggttaattctttccttgtcatgtgcttgtgctcctttttgatcttctttttgcctataagaaattacaaatattttttatattgatcttcgatacttttgacaaaatccgcgtcgtacttttcgacggggacgctccaagcctcttcgtttccgttccaatgccacccgcgcttttttagggcatagataagttgcggtttcggtttggtcgtaaatttcataaatacccgttccccgctttggattgtctttcgatatgcgttataactgtcgctttccattaactttttcggcggtttcttgcccgtatattcacccgttttcaccttgtcgtatagttttgcggcgttcgtattcttgcggaagtgatattctttgtcgtatttttcgtataattccgcatatcgtttcggatcatactgcgcgatcggcgtcaaccatgtcgccacagtcgttgcgcccatattcggcatggatctcattaaatgatgaaactcttcctctttacgtttcgcctcggtttttcgatcttcttgatactgccggttgctatttttcacgctgcgctccacgcccttaaaccaatcgctgatttccacgcttttttgcattgcccgctccgcgatcccgttcattttttgagcgggatactgcgccggccctgatactgtccacggtacataccgagcatcaagagagagtttttcatcgtactttttctttaattgcccgattaacttttctttctgcttaacgctgatatcccaaccgttgatctcgtccgcataggatttatacgcatcgaccgtattatccccacgattaaacatactgttgttattcgccatatccctattccaagccgacagttccggcacgggcacttgccctttgcggatctttggtatttttgccgctttcggtttcttttctttggcagcgcgttcttctttccgcagttcgttccatgcgctccatgcgtcgcgcggcgtcatccctgccgtcgatacgcccgctttctgtaacaacccgtacggtctacgataattcggcgttgcgtgttgcttttgctctacggtcttatcggatttcgtttcttcgcctttgtttctcttcatactttcctcctttttccagttgatcggaaaattatacttccgtcgattcgcgatattcctgtttcgtgatttcccgcaccgtgccttcgatatgcaaaaactcgcaaagcaatttcggatctttgggctttgcgtcgatttccatatacatgaccccgcctgcggcgtcggttatctcatagtaatacttcttactgttcatggtttcctcctgtattaaaaaacagcgttttatatcagacacagtactttgcatagtcggaatttttcggatttttaaaaaatattctgtctgaaatcgtttaaacggctttttcattttcagcatttctcggggattcgcgtactaccgaatagtttcgcagatcgtcctccgcgcgcaaggtcaagcgatcccatccttcaagttccagcggaagatccagcgccttataggtaaacctgtacgatctgtcgtcataatcatagatcaagcgcgacggcaatatgtaagtgccttccttgcctttcagcgctccgtcgtcgtgctccacgttgcccatgttcctgtaactgatctgacggtagcctatcgtacgcacgatcgcatcgaagtaatacacgaacgtattaaaccgaggtttatactttccggtttcttcaaggcggatcagccgcgcgcgaagtctgttatcgagccgcaaaagaaagcccggtttcaagatccatttttgcattttgcaatagatggtgttatccaaacatttgcggatatatttccctgccccgtcgtcgccctgctccgtcatgatgatcatgaaatccccgtaatgccgtacatagcggtaaaaatccgcgacgttatcattgactgtcgaagaggtattcgctcccttcgtgctgccgctctcgtcgtcaaagatcacgcaatattcgggcacgcgctgcatttgcaggaaaaacttattgttggctttgtacgcgtaccgcccgcacacgcgcatccccaacgtcgtggcaaggcacggaatataacagcgttcacgccttttgaaaaacaaataggattcctcgatcgccttgaacttttccaattcctccgtcatacccatttggatacaagtgcggatcctgcgtttgcgggtatggtactcatatttgagatcttcccagcgccgccgcgccacgcataccgccatatccccgccgagcgaagtctttcccgcgcccggaggaccggtgcagcagacagaatgttggttttccatgtagcccgcgctttgaccgtaatagacgaactcaaaatattttgctttgatcccctttttgaaaagcgttatgactgaaaacacgatcagcacgatcccgccgagttgtaacagaagtttccctatcttccagaccagcgaccagtccgcgcggatcccgttgaacaccgacacgtcgaaaaacgtacataatacgccgtaccatccgtggtaatagtcgcgcgtgagaaagtatcccaatagatacgcaagcgccagcagcacccaaaaacggcagtaaaaccgcgtgtttttgaaactctcggtgcgtcggcgttccgcccatgcgcagaatctcgaataccgcgtcaggcggcgcgcaccgcgctttaagtcgttgcgccaccgcttatattcttttgttttcagtatcgttccgtttgtttccatagcattttgattgacttccgtcccgtaaaatgatataattttaatcagaaagggcattagttcgccttcgggcttgaacattgcgaacaagtggttttaccgctcgcgccttttctttttttatgtcattttttcttttcgtttttatcgattacttcctgcaccttctttttatcgccgtcactgaatttccagcctttcagtcgttcattttttgcgcctttcgacacttctttcgttttcggctgtatgtatgcgggcttcggattattcggttcgggatttttttcgagcctgatatttaaaatatcattcgtctttcgtcccgacgtaatcccgattactttatatacctttccgttttcatcatatacatacgaaggatgcccggtcgtttccttgctatgaaatttgcgaaaatgccgctgaaaccgtttcgttttttctgttttatccgatttggaatcggattttttatttttctgacgattgattctaaacatagtactttgcaaaacaccgccgaagagtatttcggcggtgttccgctgccctccttttagttctttccgcgcttgccgatgcggagtttcccgcccgttacctttttggcgatcgtgcggttctcgtcgttctttttgtaatacgatgtaccgctacggtctactaccgcgatataattcggcgttgcgtagatatcacgagcctttgcgaatattctttcccgtttttggagtgctttttgttttgccgtcggcttttccgcctcgggcgactgtattttgtttcggggctttcccacccgtgttacctgttttactgcgcggggcgcttttgctcccgcctgttttgcttggcatttttttgccgccatttgcttttacctccctttcgatttctttggtttttatctcactgattttttcgctcggcggtttgtattccacggatattttttgcctggaagatatcgcggatatgatgatcttgatgatcaggtaaaccgcgaccacggccaagaaaagaataccgagcattaaaagcaagcgcaatataacttcgagcgggttcgtctgctctttgtctggcagcggcggcgtcacgcctggtattatatcgatcgggtcgtttaccgccgctatgaccgtgtacacgccgtccttatagaatttcaactgtatgatcctgaaattcaggaatactgtctgttgtgcagcatacccgcattccagccagggcaccgtgctttcatttacttcgctgatattgctcacaatcgacgtcgcatagtagtccgtcaccgaatagcggaagataaaaacggttttgtccgtttcttctgccgcttggcaatactggcggaaactgctcacgtcgtcgggatcgatatacagatttttcgacagactttcatcggacagtttgagttgtttgtccgtcacttcctcgatcgccttgatattgctgtacgtcgcgctttcgtagtcctttatacctaaaaacttataccagaaatttttattcagcacttcggcggtcaggctgtattttgtttcgctgtcgatcgtccgcacgttttccccgcgctcgtgtccttcgtctacgtagtcctcaaacagatccgtgctgtaaatcccgttgattttatccccgtccgccgtttcgctgtactctttgagcgctctttccatgcgttccgaagtgatactgtacgtatcggcgggcgcgccgttcgtataaaacgctgccgtcagcaaattgtaaacgtcgccataggtgagcacacccctgtcaccgttctcgttatagatccagcctgcctcgtgccgcacttccccgatcacggaagtccagcggtacagtcccgcaagcatataatccgacgtaaaccgcgtcatatccttgccgacgagcggcgtaaaagtgtcatgggcggttttgtcatcgaacaccgcgagcagccccgtcttgtattcgtcccaacgcgctttgatctccgtgatctggcggccgtattttttcagtacgtcgttcggcaccgcaaaatatacgctgttcagttgatcctggtgcccgtcggtaaacactccgtcggggcggtactgcgtcggtatcacttccagatccagcgtttccagatccgtgacttcgcacgtcagcgtcgtggcggcgtttgcgtccgagccgtaccccgcggcataacctttgtatgtatacgttccgccgcagccgtagtctttcgcaaggctgtcgcccttatagatcagttccacgctcgacagatcgtaacgccgcgcattgctgttcacccgttccgccattgtctttccgtccgcgctctcgtgatcctgcacgcggaatttgtaaaacaaattgttatagtcgccagtggacttattgcagaatttcaattcaaaattttcatagtcgtcggggctgcccttttcgttataccccacggcgaactgcgccacgttcagtatgcttgacgtatcgatctcacgacctgtcgggttatagaaatacagatacacggcataattcccgcgcatattggcggcgtaactataacaatattcgatcagcgtcacaagttgcacgcgaccgttttcgttatacggatagtccgttaaatcgaaagcgtttccgtccgcgtccgccgagcctgtcagatcgtccagcacattgacgtaatcaaactcgcgttcggtttccgcctgcgcctggctcggcgggtttactgccgcgcccaggagaagaaaaaaggcacataaaacagataatatttttctcatgcccgcccctccttaaaagattatgtgcggcggatttatgctgatcgtcggcttgtcagatacaccgaagtatataagtatggttttcccgtccgacagcccgacggacatgatccagaaatccgtgtttttcggcaattcatcgggcagcgtgaccgtttcgccgccgtacttttccgaaagcaccgccgaaagtgaataatccgaggggatattcacctcaaaccgatcctcggagatctctatgccgaaatactccgttacctccccgacatgggaaaaagattgcggatttccgtccgcctgaaacgtgaatttcgcctcgctgttcgcctggatcctgactgtatatttccccgcgcccgcagcgggtttcatgctcttgatctcaaacacgtttttcccgcgggcgagttttacgcccctttccgccgttcccagacgcctgccgttatactccacgtattcgaaacgggtaaacccgttcgtttctatggcataatagatcccgcacccgaccgccgcaagcaatacggtcaagaggataaccgcgacaagcctgcccgcacggctcttttttttctttgacttttgcggcgcagcccgcgctgcgctcgctttcttctttgctgccatttttacccccttttagaaaatgatctgcggcgggttcaactcgatctccgtcacgggaatatcgagatctactgtgccgagggtcagttcgagcatagtgccccaataacttacatagtcgggagccgttccgtctgatccgttggtgatcgtcgcggttacccttacgaccgcgcccgaatagcccgcatagcctttgtcaaattccgcgcggcccgcgctcttcacgccgtacagtttatacatatttgttttgctgcttacaaacgtgagcggttcgtttatcgccgtgaccgtgttcgacgccgcggggatcatatccagactgccgatttccgtatgctcttttacccagttgtaataatccgtatgataactgataccgatattcgtctgggcattttcatcttgcattgttccgacgccccaaacgacgttttcaaccgaaaaaacgtactctttgcccgacgcgctgatatccagcgtttccgtaatctcttcgcccgagcgtacgacaagttccgcgctttccattttcgacatatagtccagtttgcaaaccgccgttacgtcgggatatttccgcgagcgcgcggtcaggttgatcggttcgccgaacgcctgtaagcactcgaccgttgccgtcgcgctcccgtcgctttcgggcgttacttttgcatattcctcaaccgctttgccgcgcgcccaatcgctttccgcgttctcgaagtccacttcccaatcgatcgctttattgctcgcagtgtcgggtttgatcgtcgccgttaccgtgattcccgcgtttgccgtttcgctctccgacgtggggacggcaaaaaccatgtttgcgggcatttcaaacagcccgtcgctcgtcagttcgttccccgctccgtcatatacgcccgatattccgccgagttcctctgctttgtccgcagtgaaaatcaccgtcgccgccgtcgccgtcagcgcaagcaatcccgcaagcgcaagtgttatgatcttgggggcggcgcggtcgccgcccctgtcctgtcctttcatgctgcactccttttaaaattccaacgtactgtcgcccagcgtcaccgaatcgaccgaccgctcctcggataacagcgtcgtgtcaaattttacgttaaacacggcaagtactttgccgcctgcctgctcaggtcttgtcatgagcacgatctcgtaggctgttccgttatacgacagcaacgcttctctgatattgtttcggatcgtcgcattgttttggtgcaccgagttccaaaactgcgcgtcaaataagcaatttatattttcatcggaggtgatcactcgcagccgttctgcggaaaacccgcttccgatcttcgcgtccaacgcgtttttcagtccgtccgtcggacggatctcgaaatatcctgcggtattttcatctaaatacgtcttggtatatgcttcggaatattcgttgaacattccgccgtcaaaattagacagccgatacaacgacacctttacactctgctccaatacttctttatcttctgaatattgcgtaggcataaaccattcgttcctatccgaagagataccctcattaataaacccgaatttatagcccaaaagttttctcgcataatctaccgtgcaagtcgcttttgcttccgcattatcccgcgatgtgaccgtaatcaggatctgttcgccgaaattttcaaggcaagtcaccgtcgcgcgggtactcccgtcgccgctcggcgttacggatatataatccgtcgccactttattctttgcccacgccgcagacggatttttaaacgtaaccgaccaatccactgttttgttcgctgcattatcgggtaaaacggtggcctgcaacgtcaccgacgccgagttctgcgccgccgcacttttcgtaaagaccattgccttcggcaattcgtagactttcccgccgtccagttcgttcccgtccccgtccatgaccgacggcagttccgtgaccgttctgcctccgctcggttttgatacgtaatatccgatcactcctgcggcaagcagcaatatgaccgccgcaagaattaaggatatgatctttttcggggcggcgatcacgccgcccctgttctgtttgttcataataccctccttacctgcttagaagatgatcgtgccgtcctcgatctggatacctgtgaccgctttgccgatactgcttgccgcgtacgccagataataagtgtccgtcacgtcctccgtgtacgtgcttgtagtcgtaaccgtcactacgaacggctgcgccacactctttttatccaacactttgccgagttcgtaaaggttgggcacggtcgcaaagtccgcgccgagaagttgtgcgaaaaagtccgtgtttgcggtgatccccgcgcttgcgtcgtaactgccgcttactgcgctcgcgttgattttctttgcttccgccaacaaagccgcgctcggcgctatgctcaccgttgtggtgtatgtatcttcaatcgtgtacacctcggtagtgttatacgcgaaagacgctgccttttgcccgtctttcgacagatatgctttgaagatcgcccagttcgaggcggtgccagtagcattgttcagcgttacgatcgtgtcgccttccaaacccgcgcccgccgcgtacgtcacgtatgcgctaccgagtttctgcgaacagtccaccgtgcaggtgtccgtatattcggggttatcctgcgacgtcaccgtgatgatgatctgctcgccgaacgcctgtttaaacgtgaccgtcgtggtcagttcgttcgtgtccgtgatcgtcacatagtccgatagcgttttgccgttcgcccatgccgcagacggatccacaaaggcgatcgtccaatccacgagttggtttgtagcgtccaacggctcgatgatcgctttgatcgtcacgctcgtcgcgggcgtcgcgccgcgcagcgcggggcggaataccatatttgacggcatattgtacaccgtgtcgccgttcatctcgttcccgtcgccgtctatgaccgtgcccttttccgcgtcctttttaaaccacgtgcttgcgtcccagtttttaaaaccctcggttacgatcccgaagaagatacttgcagccagcagtatcgtcatgaataccgcccaaaagcgggcgaaaccgctgcttttactgtaatttgccattttttgttttcctccgttttctatttcctgattttataatttccctgatttctttttgctcatagcccgaaattttccagtcaactggaaaatttcgggtaaaaactcgttttccctgcgggcatgagcgtacccgcagggttctatctatgccccgaggagattatgcggggcgggatgggctttgttatggcgggcgttcacgctctttcagtatacgcacgtttaccgcaccgcctaataaattttcatacacgcgccgcacacgcgccgcgcgggacgacgatacccgtttataccgtttcgttttccccttgtattcgatttcaactatcatcgttcccctccgtctgttctaaaaaatatttgcatataggctcgccgttttcccatgggatcaactgtttgtttttgcagagcatacacgcatacgcgcgcggattcgtcaataaatacgcattgatatctttgtagaaacagtaataattcagttcattctgccttttttccaactcacgccgcgcgcgtttcgtatgtttcccgttttccataagggcgcggtattcttcatatgcgccctcgatcgctttgtttaaggctataaattcctgatccgcggcaaaactttggctgatccgctccgacatttccatgcatagcgccataagtacggcgcactcgcggcggcttttttcttccggcgtttcttcccgtgtttcttcttcctgtgccccgtccggttcgtcaacgggcttttcgttctcctttttcatctttcgacttctcccaatactccattattttcgaaaggtgtttttccacgcattcgcacggcttgccgttcggcaaatatcccatatcgccgcaggctttacactgcacctttttttgcatcgcagcctgatccattccgaataatgtgagtatcgccgcgcgttcacgtttcgctgcgtccagtttcgtttttaatatacggatctcgaacgcatcgcctcggttaaattccgctttcgctatgtcgtgggataataccgatatttcttgttggatcttctgataccgcgcatccgctccgagtttttcgttcattcgttcgaggcgcgcagcctctttcgctcgcatctgcgcataatagccgcggattaccgacgcgggcggttcggggatcttgtatttcgaatatgtaccgcttttcaatttcttgaacacacctaaatgcaaaataaaatgcaagcggtttcttgtatacttaaacagcgtgccgtccacgtctaccgtgtagatctctttcctgtcccgcgcgcggaactccgcttttttgatcgtgtacaccgctttgtttccgtacatccccacgagccatgattccccgactgcgtattcgaatgttttatacacacttcacacccccagtttcaacagcaattcgttctgaaatctgataaagtctttcctgcttatatgttttatcagttcgctgcttaataccatgatgcattccgtgagcatttttgtttcgcttttttgtcttgaaaatcccttcatgactatatccgctccggtgtctgcgatcaagattatgctgttaccttttaaatcgtccacttccatgtttccgtttctatctaaatcatctactattatcccgctcggcatttttatcctccttcggcacgacagtttttatgctgccgtgcctattttatttttgtgttgctttcatgacctgccgactataccgctatctttacgcgaatctgcttgcgctcttttataaacgaaagccattgttcgcaaaatctcgcaatctgcggatcgctgtcgcggccgccgttgttgccataaccacggcactgcacgatcctctccgtatgcggattatattccagcatataaaacggctttttcggttggcggcgatccactgccacaaaaatcatcgaattacccgcagcgatccgatccgcataccccgccgaacagttcgaaaataacgtcgcatagtatttcagttccgctaccgtccgtaccgggcgtagggagatatttcgttgacggaaacagtaactttgatattcggatgccttttcttcaaatttggcgtaaagttcttttgtggtttcatactgaacgaggctcgataaccgagcgtgcgcacggttcaaatttttcgggtacaacacttgttcgtctgccatgttcaggtgcagacgctctgcctgctctatgtaatcgaagtaatcgccgaaaacggcacgctttgagattttctgtctgttcaaatattttaaggttcgacgcagacgctccgcatcgcatctgtccgcaaattcattaaaatggtgattgcggcatatttcgagtttgtcgcgcgtgatcccgatttccgctttcacaagccgccgaattatggggatatcctctattttcagcgaggctttctcttcattcgtcagcgcgtcgagttttgagatctcaatttcaaaaaagtctttgagcgtgcgacgtcttttcttgatgattttcctgaaattcgatccttcgtcggtaaacgaaaaaatatagtctttcgcgatcccgtaataccccgcctttatcacttctttcaatgcgggcgtatcgaacagagccaaaagcagcaccgcttgcagtacttcgtctgtaatgtagccctgcgataattcgaaatactttgtatagccttccaataacgtccctttcgtttcctgctccaataggttaaaatctgcaattcgttggaataattttttcttgcgccattgcctttccgtgatcgttgtacatcccgagtacggattgtaattcgattttagccgcgaatagattgccgttgtacgattcgcattataaaaaattcgcagccattcggtttcgctcatctctccgtcgcggcgaagttcgtacttctcgcccgaaaaatcaaaggcgactcggaacgctcgcaatacgatcccctgctttgtgcgctggtaaaaggcaatatcgctcttgcggatcagatctttatgttcgtatactgcatttttcaagtaacatgattgcgaacagtttctttcatacgggcatacgtcctgcatccgcgatacgtttcccgcgtgacagccgcagccttggctcatcaaagcctttttatcctcttcgaaaatttttccgtgctgcgggcaatagatcacgatcccgtctttcttgggactttccggaagaaatatatcgttctcatcaaaaacgtatttttgatcgagataaaacgcaacgccgaacggcatcccttcgcggatcctgctttcataatccgcagggcggtaacttgcatcaaattcgtagccttcgaagatcatatgaaatcctccaaatttacgaattttcgctcggtcatgccgagatgttcgctgatgaatttttttgcattttcgggatcgaacatatagatattggaatgtgtattttgcttcgcaaactcgtacatttctttccataatccgtcgatcgttttattcggatccacttcgcatccgggattttcattgatcaatgtttcgaccgcttgcagcagcattgccagcacttctctgtctttatgcgtttcgatatcctcacggcacattttcacaaattccgttccgatcatgactgccacccccgtacaacggcgaggaacgccgcgcggcttttctcacgcagttcgtctttcattttttcaagtacgcccaatagatcgtttccgagtttctgccaatctgaaaacttgattttaaattccgtcatggccgcatcgtcggctatgagtagttttttattcagccgctcgatctccgcttgcttttccgcgagttccgcaatagccctatcacgggccgcgactgtttcagcgttttctacttctttgacgggcgggtttttcagtttgtcgttgagtttctttttatcctcttccaactttttaatcttttcgcgcagcgcctctgcatccgcgcgcgcgtgtgcagcctccgctgcctttgcgtccgcctcttcgcgggcgcgctctgcctccgcttgcgcctgctccgccgctgattgcgctgcggaaagcgcctcagtattttccggttgatcgggattttctgacgttttcagccgttccgcctcggcgttccactccaattcggtgatcttattctctttttccgccacttccccgcgcaactcttcgatctttgcctttaattctttgacagtcgtcgattcgacgtctgtcgtttgcgtgagttcttcccgttccgtttctgtcaaatccgccaaaaggctgatctttgtaatgccgatttttccagtcaactggaaaaattcttcgccgagcgtatccagcgcctttatgtacgtgtacgcttggctctttttgatgccgagcgcggtttccgtgtactcttcgaacgtagaataaccgcccgccttgaacagtttctcgtcgttcatgcgtttcaatccctttgccatctgcaaaaggttttcgcatgttgccctgccgtacaccaaaatttccgaatgtaattcgaaatagttcttttcctgccatagttccaacggagtgctctgctccgtcgatacggccacgctcgctgcgttgccgcttgcagcctttggcggctgcattttgctcaaatctaccatcatgctcattaacctccatattcatttcctattggtaacagttagattataaaaaaagggttatgttaccaaccgtcaacataatatcatatgtattcccgtttgtcaacagtaaatataaaaaaaactttgaatttgttcccgaatggcaatataatgaatttggaggatcaacaaaatgattgataatacaaaattcatagaattgttaaatgcagcaaaaggcgaacgaactcaaaaccaatttgcccttcattgtggaattggttcaagcacaattactcgatttattaaaggagagcggaaacccactcctgccgttttaaaaaaaatagcctccaaggcatataatggtgttacttatgaagaattgatgcaagccgctggttatttagatgaagttcaaatttatgcaccttgtaatcctgatttaaaagaaaatcggcaagccgcagacttaccgattcccaaagaacgctctgaaataatggaattgattgaacacgatgattattttaaacagttcgcaaacc

SEQ ID NO: 3251 - DNA, 7073 bp, Unknown
  16S sequences of unknown bacteria
ttcaggggtcaacaagtactgacccctccggggtttgagcaaaccactagtttactggtggttttaatttttctgttctagcttaacgtatcccaaatgagtttgataaccaaaagtcccattgcggtgagaagaaccgggcggataaatttaccgccaattttaattgccatttttgttccgatatagttgccgagaatggaacagattgccgccggaatacccagcaaaaataagacatttccatggtagatataggcgattaaccccccgatattggaagcgaggtttaccaatttggcattgccactggcgcgtatcaaagaataacccagcaaagaggtaaaggccattaccataaaagtgccggttccaggtccgaaaaagccatcgtaacatccaatgaccaggccgatgaaagcactgcgaagataaaggcttttgccggtttgttctgccttttcttcttttccaatatttcggttcagaatcatgaaaatagcaatggcaggcagaagaatcgttgtgcagtactgtaatgtctgcgcagacagcgcgacaaccagtcgcgctcccaaccaggagccgatcaaagacatagctgcgcagacaaaacctggtttccaatggataaatccgccacgtccataattgaaggtggcgattgccgtaccaaagctgtttccgaatttattggtaccatatgccatatgaataggaactcctgcaaacatgtatgccggcagcgtgatgataccgcctccgcctgctactgcatccataaatcctcctaaaaagactaaaggacagacaattgcaaacgtttgccaggtgagttccataaaatctcctcctcgatttttgcaaaggataatggatattaacgatacggcatgggaaacagtttgaccggcgtgtgtaaatatgcaaaaaaccgtatccatcttacgccaattttctgcaaaagtcaatgaaaagcggatatgcaagtctgaatttccaatggttgtcatacaatgaatgtgtggagggtcatttcatgaaacttggaaagcagtctgttttttataatgccttttttttatgtatgtcttcgataggtctgcagctgattggttttgtttaccgcatcgggctcagccgttttggcggcgctgaagtaatggggatgtatcagctcattatgccggcctattcggtcattatgtcttttactatgtcaggactgactttagcagtatcacgcttatgcgcccaatatcaggctgctggagacagcgcaggagtaaggggagttgttcgattttcgcaattagtatttctctgtttgttcgcctgtgccgcgattccggtctgtttgtttccggatctgattgccggtgttgtattaggtgaaccgaaaatcaaggtggcgctgcttttattgcttccatgtttgtttttgacaggatttgaaaatattttcaagtcttgctttcatggaatcaaatacattttgccgcctatcgtatctgaattgacagaacaaatcgttcggacaattgcagggttggggcttttactttttctttgccccgaagatcctggtgccgctactgctatgattgtcctgggcatggtgatcagcgaggtgttcagtgtcgtaatccttacctccttttataaaaagacgggtagacgtattctgccgaaaagggaggggcatctcaaaataccaaagggcatgttccgaagagttgcagctattgcagttccggtttcttctgctggcctgcttaataattttctttccagtgcaacaacgattctgattcctaaccgattgatggcagccggtgtttctgcacaggaggctatgtccagttttggagtcatggtgggtatgaccatgcctcttttaatgctgccaacagcttttattcatccactgaacacggtcttacttcctcgcttttcccaatacagcgcaaaaaataatgaagcacaaaccagacgaaaagcgggaaaagccatacagattaccagcatattgatctctgtctcactctctattatgcttcctctgggaaatgaactggcgcagctgatttatcatcagtcttcggcgggagagcatatttttgccctgtccgtggccaccttctttaccttttatcacatcacaacggggagcattttaaacggaatcggaatgcaaaagcaagcttcagcaagtattgtggttactggtgtcagtgaaattttatttacttggctgaccgtaggcagcatgggaattggtggttatgctctggcttgcgtaggaagcgagctagttggagtggcaatgaatttttattgggtgatccggtcggtaaaaatcaaaatacaatggaaaaattggttcctcactcccttcctgtccggagcggctgccggctgctcctcctggctgatattttttcgtttgatacaggcaggctggcctcagattctatctctttttctcagcgtctgtactgctttggggatttttgttctctgcctgtcttttttgggaatccactttttccggtacttccggacgctttttgatgattgagtatgggaatttgcgtaccggtgtgttataatttctcataacggagtgcaaactttttatctttctaaagatctgccgttagacggatgtaaactcggaaaaggttattgcatgctatacgaagaatcactggtcaaattgggaagatgtgtaaacggctgggaggattattttatggcggtttgtcgtgattgcccccgacgctgcggggtggagcgtccggattcttttcaaacagcggggaaaatgggaatttgttctatgccctttgccccggttgtcgctcgggcagcgctgcactttggcgaggagccctgcatcagcggcagtcgtgggtctggaaccatatttttcagcggatgttctttacgctgtgttttttgccagaattaccgtatcagcacagaaaattttgggcaggaggtcagcgtttttcggctgcgggagatttacgatgaactgattgcacaaggcgcccataacattaatcttgtgaatccaactcattttgtgcgagcgattgcccagtcattaaaagaacttttgccggtgccggtgatttataactgcggtggttacgaatctgtagattctctgcggatgttagaaggaaaggtgcagatttatctgccggactttaaatatgttgacaatcagctggcaatacgctattcaggaacggcagattattttgaacaagcaggcgcggcaattcgggaaatggtgcggcagaccgggccgtatcgattggatcaggatggcatgctctgttcaggcgttttgattcggcatttgattttaccggggcagatacaaaacagcaaacaagtaattgattggatttcagattgttttccggcagggactgttttattcagtttgatgagtcaataccttccttgcgggcgggcagcggactttccggaaatcaaccggagattatatcagcaggaatatgatgaggtagaagaatacttgtttcaaaagggaatcgaagatggttttttgcaagaactttcttctgcagatcatgtttatattcccaattttgatttgaccggagtgctttccggtacaaaaaaataagcaggattttcccggataaagcggaaggctggaaatgaaaaaaggacgccgaggcgtccttttttttcacgagacacaaaagatggatttttcggacagtatacgcagagaacttattcgctaatgaccagttgtccgtccacacagtccgctttcaggacagtttccggtttggggtctttctccagaatatagcgggccagcagcgtctccaatttttgctggatatagcgcttcaaaggtctggcgccataaataggatcatagccttcctgtacgatcaatgatttcgccgcatcggtgacggcaaggccaagctctttttccgcaagccgctttttcagatcaaccagcattaactcgacgatttggattatttcgtctttggtcagtggtttgtaaaatacgatttcatccaaacggtttaaaaattccggccggaatgcagattttagcatctgttccacctgattttttgcctgttcggagatttgcccctgcgcatcaatcccatcaagaatagcggcagatcccagattagaggtgagaataataatggtgtttttaaaatcgactgtcctgccttgcgaatcagtgatcctcccgtcatccaacacttgcagcagaatgttgaatacatccggatgcgccttttctatttcgtcaaacagcacaacggaatagggcttacggcgtaccgcttccgttagctggccgccttcctcatagccgacatatccgggaggagcgcctaccagacgggaaaccgtatgcttttccatgtattcggacatatcaatccgcaccatactgcgttcatcatcgaacaatgcttgggctaccgctttggccagttctgtttttcccacaccggtaggccctaaaaacaggaaagagccaataggacggtcaggatcctgaatgcccgctcgggagcgcataattgcatcggcgactttccgaacggcttcatcctgaccaatcaccctttgatgcagcgttttgtccagatgcagcaatttttcccgttcaccttccataagacgagtcactgggatgccggtccagcggcctacgatgcgggcaatttcttcttccgtaaccttatcccgaagcagtgttgcctcttgagtaccacctttttcttccaagtttgccagctgcttttgcagctcggggagtttgccatattttaatgccgcagccttgtccaggtcatactcccgttctgccagttcgatctgggaccctacctgctcgatttcttcacgaagcttctgcacctgtccgatcgatgctttttcattttcccagcgagctttcatttcttggaactgttcccgcatttccgttagttctttttgaatctccgccaaatgttcggcggacaaacggctgttttctttcttcaatgcagcttcttcaatttcgtgctgcataatttttcgggagatttcatccaactcagcgggcatagaatccatttcggtgcggatggtagcacaagcctcatctaccagatcaatggctttatccggtaaaaatcgatcagtaatataacggttggagagagttgcagctgcaatcagggcctgatcctggattttgacgccatgaaacacctcataacgttcctttagtcctctgagaatagaaatcgtgtcttctactgtcggttcatctaccagaactggctggaaccgacgttccaacgcagcatctttttcaatgtattggcgatattcatttaatgtagttgcgccaatacagtgcagctcgcctctggctaacattggcttcagcaggtttccagcatcggtggaaccttcggttttgccggctcccacaatggtatgcagctcatcaataaacaaaaggatttgcccttcgcttttttttacttcgcccagtaccgctttgagccgttcttcaaattcgccacgatatttggcgccggcaatcagcgcgcccatatccagcgaaaagatggttttatcccgcagtcctgccggcacatcccctcgaacaatccgctgtgccagaccttctgcaatagcggttttaccgaccccaggctcaccgatcagcaccgggttgttcttgctttttcgagacagaatacggatgacatttctgatttccgtatcccgcccgattacggggtccagtttttgcttgcgcgcctgttctacaagatccgttccgtattttttcagtgcgtcgtaggttccttccgggctgtcagtggttacacgggtattgccacgcaccgacatcaaagccgaaagaaacgcatttttatctatgaggcactgctccatcacttttttgaccgctgcatccgggtgttccaacaatccccagaacagatgctcgactgaaatataatcgtctttcatggaatccgctttcttttcggcagcggtcatcgcacggtcaagattttgagaaatatagattttatctgcttcccgcccgggaccggatactcccggaagctttttcgcttctgcctcggctgcagacagaacctgctgaggagtcagatccattttgataagcagctgggggattaaaccctcctgatcttgtaccagcgcccatagtaaatgaatctgttcaatctgcatgttttccaattcacgggaataattttgtgcggcctctaccgcttccagagattttttcgttaatctttgcacattcatactttttccctcctattataaaagtattttttccttttgaagcgctttttgatatcgcaggctgatttgatcgattcccaccttccaattttgctcatccagctcaaaaaaggcttttaatgcacagtcaaaattctggatgtaagaactgatgctttctccaagctgcgcattggtgcaactttcttccggccagaaaaaagtacggcagtaccgtccgttttcaattcggcaggaaacccccgcagggtaaacagcggacaagtagcggttttctaatttttcccataatcgaaagaaatgatccagcatgcgtaaaaggccagcattctgtgtgcgtgcggaaacgcgtagttcccctaatattttggggtcgttgcggaaaagctctacactgtaacgtaccgttggtttatatttgtaggccagtgcggtacggacagaaagtatggcatccgaaggctggaactgaatttgaaaagcattctgttgtaccatcaacgcctcgatctgctcaaaaatatcgtgcatacgttgttccggtgttttaacagataggtgttcagctaaaatttggttaaccatgttcgaacgactggtgttttgtgcatatgccaactgatctactgcccgaatgatatcatccatcagcagtaaactgtatatactccgattcatatcgcccctccttcttttac

SEQ ID NO: 3252 - DNA, 6562 bp, Unknown
  16S sequences of unknown bacteria
ggcatcgtcggaggcattctcacaggtatcttctgcgtgccgagcctgtcgtggactgactacggtggactgctctacaccggcgacccgagcctgctgctcagccagatcttcggtatcctcatcacgatcgtcttcgtggctgtcgcgacgctcgtcatcggtctcatcgtcaagacctgcttccacggcagcctgcgcgtgagcgaagaggaagaggcgcgcggcatggacatcgcggtacacggcgaagacgcgtatcctgcgtttgacggcatggactaggaggggcgactatgaaacgagtacaggcaattatccgtcctgattttctcgagcctttgaaagacgcggttcttgcgagccagatcggcggcatgaccgtcagttctgtccacggctgcggcaaccagtcgggatggaaggagtacttccgcggcaacgaggtcatcatgaacatcttgcccaagatcaagtgcgagttcgtggtgagcgacgacatggtggaagacgtcatcaacatcgtgtgcaggacctgcaggaccggccaggtgggcgatggcaagatcttcgtctcgccggtcgaggaggccgtgaggatacgcacgggcgagcgcggcgacagcgcgctgtaggcctatcgacaacggtcaagacaacggcgggcaacacgctcgggcgcggccgtttttcgtacgcggtcacggggcggggaatcgggccaaaatccacaaatctcgcggcgggcatcgagggggattcatgtacaatgtcttaccgtgtgcggaataggccgcaccgtgatgcatctattggccctcgagtataagtataactacgactacttattcgcgcgggtcccaaagaaaggggacctcttgagcgaaatcaagaatccttccgtcatcgacatgaccgacgttccttccgatgaggagctcaaccagctgatcgatggcaccatcaacccgtttgacgagggcgatctcgtcaccggcaccatcgtcaagatcgatcgcgacgaggttctgctcgacatcgggttcaagtccgaaggcgtcatccccgtccgcgagctctccatccgcaaggacgtcgatccctccgaggtcgtcaagctgggcgactccatcgaggctctcgttctccagaaggaagacaaggacggccgtctgatcctctccaagaagcgcgccgagtacgagcgtgcctggatcagcgtcgaggagaagttcaacaacggcgagaacgtcgagggcgaagtcatcgaagtcgtcaagggcggcctcattctcgacatcggcctgcgtggcttcctgccggcatccctcgtcgacctccgtcgcgtcaaggatctcagcacctacatgggcaccaccctcgaggcacgcgtcatcgagatggaccgcaaccgcaacaacgtcgtcctgtcccgccgcgtcgtcctcgaagagggtcgcaaggcagagcgcgccgaggttctggcaaagctcaccaagggcatgcgcctcaggggcgtcgtttcctccatcgtcgacttcggcgcattcgtcgacctcggcggtatcgacggcctggttcacatctccgagctctcttggagccatgtcaaccatccgtccgagatcgtcaaggttggccaggaagtcgaggtcgaggttctcgacgtcgacctcaaccgcgagcgcatctccctcggcctcaagcagaccaccgaggatccgtggcgcacgctcgtcaagaactaccccgttggcgcaatcatcgagggcaaggttaccaagctcgttccgttcggcgcattcgtcgagctgggtgacggcatcgagggcctcgtccacatctccgagatggcaccgcgtcatgtcgacatcccgagccaggtttgcaacgtcggcgacaccgtccaggtgaaggtcatggacgtcgacctcgaccgtcgtcgtatctcgctgtccatgaaggaggctgctgccaccctgggcgtcgagattgaggtcaccgagctcgagaagccggaagaggagcaggctgcagagccggctgccgaggccaaggctgaggcttccgaggagtagacaacttgtctgaggatgcccccaaggtattgctcggaatgacaggcggagtcgattcgtcgctctccgcctggttgttaaagcgtgacggctaccaagtggtaggcgtcacgcttctctttcacgacgctccgtcaatccagaagaaaatcgaacatgccaaagaagtggccgagacgctcggcatcgagcatcacgtcgtcgatttgacggagcgtttcgcaaccgaggtcaaggcgcagacagttgccggtatcgaggcggggcgcttcccgttcccgtgctcgatttgcacgccgggcctgaaaaatcccgcgctgttcgagtgcgcgcgcgaatacggttgcggcaaggtggcgactggccactatgcacgcatcaccacggatgaagagtttggcgtcgggttgctcgactaccagctccgcgtgccgttcgacaagcacaaagaccagacgtacctgctgtatcgcctcacgcaagagcagctctcgcgtctgatcttcccgctggcaaacattcataagggcgtcgtgcgccgcatggccatgcagcacggggtcatgcagtttgcgccggtcgaagacgggcagggcacgccgtgcttctttgaggacggcagttttgccgagtggctcgagggcgagggcggtatcgagcccaggtcggggagcatcgtcagtctcgtggatgccaagaaggtgggcacgcacgaagggctgcaccggtatgagccggggcaagaagtcgatggcaggttcgtcatcaccaaagacgtcgagcgcaacgagcttctcgtcggtcccagaaacttggcatcgttcgagatgtgccaactcaacaatgtgcactggacctctgtcgagccgccttccaagaagcgctcgtgccgtgcgcgctttaccgcggatgggcattccgtcccggtcaagattattcccaccgccgatggcgttgcggtccttatcaacgagaccatgtccggtttggtcgaaggccaagacgtcgtgctgtattccgatgacctcgtcctcggcggcggcatcatcgcatattaagattccccatttcgccgattgtttggcgtcatgccaaacggccattggcggcatggcgtgccaaacggcctttgggcatccgcggtggcgctgtttccgccataagcggcccggcatgccaaacggcctttgggcaaccccgatgacaaccgaacgcctcgtcctcatctcggcgcgttatgcggggcggtttgcggtatgcttctgacccatggaacaagacaaatcacagctcgacgagttcgcgggcatgtccgaggcgggcaaggccgcgttgctgcgtgcgcgcaaacgtcgcgagaaagccgcacgtcgctcggtcagggcaagcgggcagacgccgggtgattttcgcgccgaggccgaagacgacgacggctatgacccatattccgatttcatggatgccctcaatcgcagcgaggtagaggagccatccgaggacccctggaggtaggcaatgtacacggtgatggtgaccggcggtttggggtcgggcaagtctacgctgtgcaagctcatctgcgagcacggtgccatgtccatgaacctcgatgagatctaccgcgggctgctcgagagcaacgagaacatgattgccgacttggcagaccgctttggcgacgacatcctcgacgactcgggcatggtcatccgcagcaagctcgccgaagaggcgttcagcgacgagcagtccacgaaagacctcaacgccattacgtttccctacatcatggcgatgacgaacgattacctgctcgacgtccactgcgtgccgcgctcgagttccaaagtcttggtcgtggaggtgccgcttctcaccgaggttcccgaattcgcgcagctcgcggacgagatcatcgccgtcaacgtcccaagcgacgtgcggttgcagcgtgccgtcgcgcgcgggatgaatcccgccgatgcgctcaagcgtctgcaagtccagccgaccgacgccgagcgcgatgccatcgccgacaccatctgcgacaacagcggcacggaagacgatttgcgtgcttgggctgatgcatggtgggaagaccgtatgaagaagctcgacgcggcggaatcgaggtagcgcaatggacgaggcacaggcatctcttatcgacggacggcgcgaggcgggcaacgcctttcacgtcgttgccccatacgacatggcgggcgatcagccgcaggcggtcgaaaagctggcgaagggcgttgaagacggcttgcgctaccagacgctgctcggcgtgacgggatcgggcaagaccttcacgatggcgaaggtcatcgagaaagtgcagatgcccaccctcgtgctcgcgcccaacaagaccctggcggcccagctggcaagcgagctgcgcgagttcttcccggacaacgcggtcaactacttcgtgagctactacgattactaccagcccgaggcctacgtccctcagaccgatacctacatcgagaaggattcctccatcaacgaggaagtcgagaaaatgcgccatgcagccactgcggcgctcctgacgcgcaaggacgtcatcatcgtcgcgagcgtgagctgcatctacggcatcggctcgccgcagaactacgccgacatgtcggttttcctcgactgcgacgtgcccatggaccgcgacgacttcatctacaagctcatcgagatgcagtacgaccgcaacgactacgagctcgagcgcggcacgttccgcgtgcgcggcgatgtggtggacgtgttcccgccgtatatggacgacatgctgcgcatcgagttctttggcgacgagatcgagtcgatcacgcaggtcaatcgcgtgacgggcgaggaggtcatgacctaccgttcggtgcccatctggcccgcctcgcactacgtgacgagccgtccgagcgtcgaaaaggcgctcgtgtccatctctgacgagctgcgccagcgccttggcgagctcaaggaaaacggcaagctcctcgaggcgcagcgccttgagcagcgcacatcgtacgacctcgagatgctcgagaccatgggcttttgcacgggcatcgagaactactcgcgccatctggacgggcgtgagccgggcgagccgccctacacgctgctcgattactttgggcgtcacgacttcttgaccatcatcgacgagagccatgtgaccgtgccgcagatccgcggcatgcacgagggcgaccgcagccgcaaggtcacgcttgtggagcacgggttccgtctgcccagcgcgctcgacaaccgccccctgcgtttcgacgagttcgaagagcgcgtcccgcagttcatctacgtctcggcgacgccgggcgactacgaggagcgcgtcagcgagcagaccgtcgagcagatcattcgcccgacgggtcttttggaccccgacatcgaggtcaggcccacaaaggggcagatcgacgacatcctcgacatggtgaaggacaccgtggcaaaagacgagcgcgtgctcatcacgacgctcaccaagaagatggccgaagagctcaccgactacctgctcgaccagggcgtgaaggcgcgctacctccacagcgacatcgggacggtcgagcgcgtggagatcttgcgcgacctgcgtctgggcgagtttgacgtgctcgtgggcatcaacctgctgcgcgagggtctcgacttgcccgaggtgagcttgattgcgatcttggatgccgacaaggaggggttcctgcgcaacaagcgcagcctcatccagaccatcggccgcgcggcacgcaacgcggacgggcatgtcgtcatgtacgccgacaccatcaccgactcgatgcgcatcgcgctcgacgagacggcgcgccgtcgccgcatccagatggcctacaacgaggagcacggcatcgagcccaagacggtgcgcaaggccatcagttccatcatggacgagctcgagcagggcaagggtgcaagcgagatctcgacgtccgaggcgcttgcccaggaagtctcggagttgggcaaggacgaggtcatgcgcatgatccacgcgctcgaggagcagatggcggaagcctcgcagtcgcttgacttcgaggccgccgcgcgtctgcgcgaccaggcggggagcttgcgcgcgcaaggcgagagcaccgatgaggaagacgccctcaagcgcctcaaatcgacggcgcgcaagggctcgtttgcgggcacgcgcaaaaacatcggcaagcatcgacgctgagggacaagcgcccgccctccagctcagtccgagacaatttcgtcgtaggcgctctcgtgcttctctccacatactgcacagcccgtctcgcggtagtagtcgacgacgcgctccgtgaagctcgtgtcgtggtacttcgagcatacggggcacttggaaagcacgcgcgtgacgctgctgccgtgtcgcacggtcgtggcgg

SEQ ID NO: 3253 - DNA, 11730 bp, Unknown
  16S sequences of unknown bacteria
aaatgcccgtggatacagtgttttcaagggataatcaggtttcggcttgatttttaacgggaaaaatacagcagcagccaatcaggccgcagttttacaaaaaggcttgcaacagcttggacataaagttttaattgtaacagggtctacaaaagcaacagaaattatattggacaagggtatgctatgttgccctgctagtaaatccaataatttctatcgtcaaagtgctaataaaatatatgcacatatgctggactattacataggtgcatttaaaccggatgtgcttcatatattgactatgtctgaaatcggaatggccggactgcgctttggacaaaagaatcacgttcctatcatctccactgtacatgaatttcataatgcacagcaattagatggcgagcagtctttacaacaaatattcagcttaattatgcagccattggcgcaacgtcacgctcaaaaaattttatctcactctcaaattgtaacgtattcttcgcgccaattggtttcccacattaaagaatacgctccaaaagcaaaaattatccgtattccttattgtgtaaatgacgttaaatttcgtatgtacggcatcagtgaacaagcatgttgggaaatgaaagaacgcctgcgtttaaaacccgatgatacaggtgtcatttttgcaggtcaactttacaaaaataataatgtggaccaactgctttattactggaaaaaatgtgtaaaatctacagacacattaagactgattattgccggtgatggaccgcaaatgaattatctgaaaaacttagcgttagaatatggtatcatgtcccaagtaacatttacgggagaactgtcacaagaagaattgaacacttgttttgctgtatgcgatgtattcgtcagcgcaaccggctctatgaccatgaaggcttccccgctggaagcaattgcgtgcggcgtgccggtcattatcccaaagaaaagcgcaaatgcagatattgtaatagaaggacaaaacggatttacctatgaaaacccaatagatatgtaccgattgatgcgcaattttacaaatatgagcagccgacaaagagcttatttgcgtacattggtcagcaaaacagcagaacgtttaacacctgccagtcaggccgaaactattcttaaattatatctgtctttaaaaaggaattccaatattgttcaaaaataaaatcgtaagtatgattggtattctaatgattgaagcaacataaaaggcagctcctcacaaattgaggagctgcctttttatcataaattattcagattttctttttcttgcaacaacaaatgtgcccatcatggcacctgctgccaatatcgcaacagtaatccaaattacagtattactactatcacctgtttgaggtgaatgtattgctttttccgttgttgtggttaccggtgttacatcatcagatggattaaccggagcaacaggttctgttggctcaataggagttgctggttcttccttaactgtataagatacagtaggcttagcaaaaatttgtggttttcccttatcgccaaaactattcacaggatataaagttgcagaattgttggtatataatcctgcatagtttttgctaccattgctgtcataggttccgtatacacctgcttcagactttggattatccaacttcacggtataggtcaactgaacaggagcgaaattagtaacaggctcattaatattccaaacaaaatgttccgtatcttccaaattgccttgagtataggtgacggtataagcgtactctccattttccaaaggcttaaaaccatacgtattttcatctatgtttatcgcctcatatttttttctacctactgttaaatacaatgcagaagcatcattgacaaagttaaaattatagtcgcccgatacatagcccatataatcttcaacataagagccggagtctaccaaatatacaatatcgttttgaatttcatcaaaactgatattctttccttctgccaagtaattcataaaagaaggaccccaagcatactgaattcctgaagtctggtttgcggtcacggcataacaatgataaccagcagaaactgcttcctgatatacctgatttgttaaataaagtgccttatccacagaatttgcatagctagattgttcctctacgggagtagattgcacaatggtgccgccatatggatattcataggtagttccttgtattgcaatttgattttcaacttcagctaaatatgtatcccaatcggcaggaggtgcattggttccatatttagaattccagttatcaggcccagcccagttcttctctccatcagcccaaaaactccaagctgtagctgtaggagcttcatgatacatgtaagtaatacaatcgctgacaaaaattaaaaacttacggttagattctacttccatatcagaatccaacatggatttacctgccaacaatcctgcatgagtattggtaccgctggtaaaatcttgttttatcgctgtttcaatctcatcaaactgggtggacaaatccatgaattcgctcgcatttgcaactttattaaaaattacaactcccacgttgattttagcacctgtcccctcaatttgagatttcaagtcccccagtatatcaagtacttgattttccaagtctgtgctggtggatttatccaaaaccagaaccacatctgtaaccagttgtttttctgcagagggtaaagataaagtaacctgagattcaaaaagctcatttaattccgtagcagttttagatctggaaacatcccactcctccgtagatagctctgtttcttctgatacctctgcagcaaaagccatgcccggcagaatagaaaatatcagaacaacaacaaaccaaagcgctattacatattttgcttgtttcttttgcatgtttcattctcccatctttttagtgtagcaattcccttaaggagatacttttgcaaaagtgtacctttgtaaaagtataaaaaatatgtaaaaaagcacattttgagccaaaaaagcacttgaaaatcttatttaaatgttgtattattctaataaagtgattaaatggtatttttgtaaaagtacaccttttcaaaaaaatcatcaagtttttagacaatatgttatatttttgcagcataaagtatcaagataaaaagaaaagagaattgactcatatgagtcaattctctttttcgttataaaatcagattgtagttgtaatcgttattttttcttaaaactatcttttaatgaaaccgtcctgttgaataccaaatgttcaggtttactgtccttagaatcaaaacagaaataaccctgtcgcataaattgaaatgatgcgtgggagtccagttctttcactgaggcttccactttacaatgttccagcacattcaaggagtcaggattaatacattccaacaactcgcccgcttccggatctgcctgagtaaacaaattatcatataaacggatttcagcgtccaaggcattttttgcatcgacccaatgaatggttccgcgtacttttctgccgtccggagtggtaccgccccgtgtttgagggtcatattcgccatatacttcaattacattgccattttcatcttttttacagcctgtacattttacaatataagtggttttcatgcgtacttcattgcccggataaaaacggaagtatccttttacgggttcctctgtaaaatcatttctttcaatccaagattctctggaaaatgtaatggttctggtaccatcttcaggacagttcggattgttttcaatctcaaattcttctaccaaatcttccggataattggtaataatcaattttattgggtctaatacagccatcacccgttgcgctgtcatattcaaatcttcacgcaaacaatgctctaaaaaactatattccacaacactgtttaccttggaaacgccaattcgctcacaaaaattgcggatggaaagcggagtatatccccttctgcgtaatccgcttaacgtaggcattcttgggtcatcccatccatctaccacaccgttttctaccaataaacgcaattttctcttactcataaccgtatggtttatgtttaatcgcgcaaactcaatttgacgaggtttacaaggcagttcagagtgctcaattacccagtcgtataaaggtctgtgtgcttcaaactccaaagaacacagcgaatgtgtaatgccttccaatgcatcttcaataggatgggcataatcatacataggataaatgcaccactgatttcccgtacgatgatgatgcatatggctgatacgatacaatacagggtcacgcatattaaaattgccggaagccaaatcaatttttgcacgcagcgtcatagagccgtcttcaaactctcccgctttcatacgtgcaaataagtccaagctttcttcaatcggtctgtcgcggtatgggctgacagccggagttgtcaagtctccacgattttcacgtacttgttccggagtacattgacagacatacgccaaaccttttttaatcagattcactgcaatttcatacattttaggaaaatagtcagacgcataataaaaacggtctccccaagaaaagccaagccaagcgatatcctctttgattgcatctacatactcaacgtcttcttttgtcggattggtatcatccatacgcaagttgcataaaccgttatatttttcagcagttgcaaagtcaatgtacaatgctttggcatggccaatgtgcaaatagccgttaggttcgggaggaaaacgagtgtgtaccttttttccttcaaatctgcctcccggcgccatatcttcttctataaaatcatgaataaagttgctccaaacctcttgtgtttcttctacattttttagttcttcactcattctgtttccccacttattctttattctctgcttttaatttttccagaccgatattcaatcttcttaatgtttcttccttgcccaaaatagctaatatttcaatggctccgccgggcgttactgtcatgccggccgctgcaattcgtaccggccacagtaaagtaccattttttacttccagttgttccggcagtgccaaaagtgtgtcatgaatggcctctaccgtccaagtatctaaacgctccaatacaggaattgccgcttccagcatagtaactgaattttctaaattggttttactttttttgttgacaaacaattcagcggaatactccggcaactctttgaaaaagccaatcatatctgcaatttgatttaacttggtaacacggggctgcaaaatagaagacagcacctcccaatttaaatccgtttgtggaaatacctgtttatagcttggcatagcaagttgagtaaattgttctaaggtcatcgcgcgcaaatattctccgttgagccatgtcagtttatcatagtcaaaaatagattgtgatttactgattccgtcaatggaaaaatgttctgctaacccttgtaatgtaaaaacttcctgattatctttcggacaccaaccaagcagcgcaatataattgataattgcttccggtaaatagccgtcgtttaccaagtcggaaaaaccggtggaaccatgacgtttggatagttttgaaacacttccatcctcatttttacccataatcattggtaaatgcacataagttggtaattcccagccaaaagcttcatataataaattatattttggggtagaagttaagtactcacatccgcgcaccacatgagtaatgtgcattaagtggtcgtcaatcacattggcaaaattataagttggatagccgtcagacttaattaaaatttgatcttccaattcggaattttcaatggtgatttctccgtaaaccgcatctacaaatgtcgtggaacctgtaacaggcattttttgacgaattacatacggtacgccttcttttaaaagcttgtccacttcctcctgtgataaattgcggcaatggcggtcatatccgccaaactgattttcaccttcattgagactgtccaaacgttctttgctgcaaaaacaataatatgcttttccatttttcacaagttcctgtgcataaggtaaatacatatctttcctttgactttgtacatatggtccgtatggtccgcctacatcaggaccttcatcatgtacaatacctacttgttttaaagtatcataaataacatctactgcaccttcaaccaaacgttcttggtctgtatcttcaatacgcagtacaaattttccgttcaaggattttgcaattaaatattcatacaacgctgttctcaaatttcccacatgcataaatcctgtaggacttggcgcgaatcttgttcttacttctttcatttctattttttaacccctctcgccgtctcggaatgaatccatatcaaaatacgtattagctacgtatcatttattctttttattataccaaaaaatacaactttatcaactatcagtcccgcaaaatgtcagtatataaaaaatcctgccgcgtatttggcaggacaccttgttatgattgctgtgaacgaacatactctatatattcttccaaacacatatgcaactcgttcatctttttggcatgctctacacccacataacggaaatgccaaggttcatacataatacctgtaatatcttctttgtcttcgggataacgcagtacaaaaccgtaatcctccgcatgctccataagccaagcataggtatttgtatttttaaatgaatcgtttactgtattaaaatccatagccaaaccggtattgtgttcactgtaacccggtttttgtacagccctgtcagcagcttctacagcttcattctctgtcatgcctttggccaagttattgtcaatttcttgttgatacaattgcgcctgtaatgttggagaacgatagcctgatgaaatccataacgtgattccatcttgcgatgcagcctgatacatttgtccataagcatctaatgcacgtttgtctaacgtaatatcatactgttccaccacaccatcatcagtgccgtccggcattttatggtctgcatttaccaatacaagtaacgggtcatccaattgagtaaattcaaccgtattggatgaagtatttaccgcggagtcatttgacgtattctgcgataaggtatttatcggcgatgtttggtctgaccctgaacgattggtacctccaaaatcatataatgtaaaaaataaaaacagacccgcagctaccgcagcaatgagaacaattacgataattgtaataatcaaatttttcttatcccttacattgtttctactcatgagaaacctccctaaaacaaacagagccctcgctcttaattacaaaaatatttaaaattccaccaaatagcaacataatctatttttcactcaaatggattatgaatataatataaaatttatctgaacttttacttctaacctcacacttatcgcatacaaataaaagtacagaatctttctatctgcacaaaaatgagtaaaggaggatgcgaatgtttgtgataaaatgtaaaccctttttactaagtattttagttcccgtcttaattgggtttatctcaggaatgattatattaccggacgttggaatctactctatgcttcaactaccgccaggggcgcctcccgcatttgtatttccaatcgtttggaccatactgtatgtgttaatgggtatctcatcatacggtattttttcatccaaatcagattacatcagcgtatctttttggatttatgctctgcagctggcattgaatttcttttggcctattatcttttttaagtcccagttatatacattcgcatttgtctggatacttttattaatttgtgcggttacgctgatgataatcatgttttctaaagtaaacaaaataagcgcatatcttatgataccctatctaatatggtgcatctatgcagcatacttaaacttaggtgtggtagtactcaattaatatttagagttttggcctgtactgatatagtataggtcttttttatgtctttaatcatcctcaccgtaaatacggcaatatcactgcatatgcctgttttaaatcatcatatgtcatgcgacaattggcaggactggtagacggaagtgtaattgccggaatacccgttttggaaagacaatacttttcatacaacacagcagctttacttcctgtagtaaatatcgctttcatagaggtcttctgtaaaagaagatgaatcggatttgcaaccggctcctgaatgctggtatcatctgccccctgaatagaacatgactgcagaacatcccaaagtgcaattttatgtgtcagcaagaattgtattttctcatcttttgtaatgggaatatcgcaggaacataaatctgcaatgattgtccaaaaccgattacgtgggtgactgtaataaaaaccaacctcacgggatttaggagacggaaatgttcccaacagaagcactttggaatcttgattgaaaacaggtgctatggtatgtatcaaatgttttcgttccatgatttattcacctatcctatcatatcaaataaactacagaatacctagtaatatgacaaaatcgttacaacaattttacgattttcattttcttaataaaaaaataacaaaaaggaaagatttatagtaaaataaatttataattaagcaaattttggaggaatcaatcatgagacgaaaagaccgagaggttacggacgactatcaaatagatacaattatcacctcttgcaactgctgtcgtttgggtttttacgaccaagacagcgtatatattgttccattaagctttggctacgagaaaaaagctggaacacgaattttttatttccacagtgcaaaacaagggaaaaagattcaactgatgaaaacgaatccacgtgttggatttgaattggatacaggctatcgattacaggagggaaagactgcatgtgaatattccgccggattccaaagcataatcggaaatggtattgtctctatgatacacaacgatgcagagaaaaaacatgctctgcaatgcttaatgtatcaaaacacacataaaaatcactgggaatttagtgagaaaatgattgacaccgtatgcgtatttaaaatggaagtaattactctctcgtgtaaagaacacaaataaaaaataaaaaaagattgacatgttgctatcccattacttgtgcaactttcatgatggaaacatccataatgagaaaaatttatcaaaaagagaaaaagaaagaattgcaacacattacaaaatgtgataaattgtaaataagcatattgcacaatgaaactgtgaaaaggaaagtgaacaattatggcacaaaacaacataaaagacacaacacatctattggtatacggtcatgaaggttggctggaagaatacccatcccattatcatttgggagatcctattatggtaaaaatgcaatggggacacaaccttgcagtagacggtcttcctaataaagattacttaaaacatcatatctatgctccggacggaacttgcgctgaggcctctgccgaaccaagcggagatttgtggtacgatattaccgctgataccaatcaggaaggattccacatgctggtaaccagctatgacgaatgctgggcacaatatccaaacgaagattataaattaggtacacgcgaacaatatcctgacgccatcgaagtacgcgactattgccaatatgccactacctgcgtttctgttggtcaccatcacgataccgaagtaacaccaatcaaaggtttggagatgtatctgcttcctgtttccaacccaaactatgtggttggtcacgaattaaaattacaattaatgctgcaagataaaccagccgatacacacaaaggtactttgatttatcagtctgaaaatggattggtagaaacagaaataacttctgatgcaaatggtgtctttacagtgaaacctgataaggtcggaacttattgcttaatagtacgtcacgtgacaaacgataaaaaggacggcatttacgaaggcagaaacttcacaattacacactgctttaaagtaggcgaacacggacatcatcaccatcattaaaaaataaaaccgacagagtttatctgtcggttttatttttctctgaaagtcgatacttctgtttccattcatgaaaatcccatcgctgcaaaaattccgttgccgcatttactccattttgaaaaagtgcttggctttcttccgaagtaatcgcaaaatctgttgttcgtattttttggtctgtgccgttgactgtaatgtgtaccggaatctgaatagaacgttgtaaatctccttgtgaatgcgcaatataccctttatcataaacgtccatcattgttgaaacaagctggcccatatattctacaatattcatacggttacatttacaaagtgttgaacattctttttgttcgcaaaacttaaatccaattgtgggatactgcggttctgtggttccttcgtccaacaaccacattggataattgcttaacatgcctccgtctacaatataatgttttttcccgctttgatctcttaatataaaaggttcataaaaaacaggaatactcatgctcatacgcactgcttttgctatggggtacatatccgccatgattccaaatttgtggaaatctcttggaaatacaagtaattcctcatccgtaatatctgacgccgttacttgcagtttatatttacaatgtccggtatgcgagccgcattttaaatcaccaaacgtgtatactccttttcttgataacagttctgtaagccactgctcaaaataatctgcactgtatatgccgaaatgaaataaaatgctgagtagttttcctacaataccgaaataatccagtagatgtttttccttgaatttaaagtaattgacacgcttcatttcctcgtatatttcttcacctgtatatcctgccgccaaaagagaagctataattgcacccgcagatgagccggctacatttccgaatgtatagccgctgcgctccatttgatatactgcccctaccaagccaataccacgtacgcctccgccttcaaaaactgcatcacatcttttcttcaaaaccactcacctcatgcatatcatatgagtggacaaaataagatgctcccattgattcatagataaagggagcatcttactttataaactattttattgggtactcgtaataaaaaaagccgtaggttttaactatgactctcgtttggaggtgccacccagatattgacccagttcaaatcaaggcttcggtgctcgtaataaaaaaagccgcaggttttaacccacgactctcgactggaggtgccacccagatttgaactggggaataaaggttttgcagaccttggccttaccgcttggctatggcaccatctctaagttcagtatatgctgaacctattgataaaatgacgctttatttaaaaatttttaaataagcgtcattttgattcgtatggagcggatgacgaggctcgaactcgctacctccaccttggcaaggtggcgct

SEQ ID NO: 3254 - DNA, 32759 bp, Unknown
  16S sequences of unknown bacteria
ctccggccccggctcctgccgccgcgcccgccccggctcccgctccggctcccgccgccgcgcccgctggcgccgaggccatcaaggccccgatgcctggcaacatcctggatgtgaaggtggccaacggcgccgccgtgaagaagggcgacatcctcgtaatccttgaagccatgaagatggaaaacgaaatcctcgccccgcgcgatggcgtggtcgtgggcgtgagcgtgaccaagggctcgaccgtcaactccggcgacctgctcgtttcgctgcaataggccccggcctattccgaagggaggagggttcagtttgacgagatatgcaaaaatgtgccgcgtgctggcggtgctgctgctttcggtgctgctgctgggcgcggtagcgattgccgagcaggcgacgcagcccaccgccggacccacggataccgaggcgcagaccgacgtcggtggcgcgtctcttgagggcgaagtccttgtggaggaagccgcggcggaagaagacgacctgtcgctcgatttcgtgggcggcatgaaaaacatcctggaatccaccggctttgccaacgccacctggcagcaatacgtgatgatcggcatcgcctgcgtacttttgtatctggcgatcgtgaagcagttcgagccgcttttgctgctgccgatttccttcggcatgctgctggccaacctgccgctgggtggcatgatggacggcccgacgttccagaactttaccaacgcggcggaagctgcgacgtttgctgcgaagtatgacgtgggcgtcaccctcacggcggacgagctgggcaacaccatttatcaggtgcaaaccgccacgggcggcctgctctattacctgtaccagggcgtgaagctgggcatttacccgccgctcatcttcatgggcgtgggcgcgatgaccgatttcgcccccctgatcgccaacccgaaatcgctgctgctgggcgctgccgcgcagctgggcatcttcctcgccttcattctggcgaagttcctgggctttacgaacgcagaagccagctccatcggcatcatcggcggcgcggacggccccacggccctgttcgtgaccactcggcttgcgccgcacttgctggggcccatcgcggtcgccgcgtattcgtacatggcgctggtgccggtgatccagcccccgttcatgaagctgcttaccaccaagaaggaacgcgccgtggtgatggaacagatgcgcccagtttccaagcgcgagctggtcatcttcccgatcatggtcaccatcatcgtggccctgctgctgccctccgccgcaccgctgatcggcatgctgatgctgggcaacctggtgcgcgtgagcggcgtgaccgagcgtctctccaaaaccgcgcagaacgagctgtgcaacatcgtcaccatcttcctcggcctcaccgtgggcgccacggccaatggcaacaccttcctcgattgggctacgctcaagatcctgctgctgggcgtgttcgccttcagcggcggcaccgtcggcggcgtgctgctgggcaaggtgatgtacaagctcaccggcggcaaggtgaacccgctgatcggctcggcgggcgtttcggccgtgccgatggctgcgcgcgtttcgcagaaggtggcgcaggaagaaaatcccggcaacttcatcctgatgcacgccatgggcccgaacgtcgcgggcgtgattggctccgcggttgccgcgggcgttttgctggcgctgttctaatcgtatagctatgaggtgagaatatggcaaaagttctgattatggataccatcctgcgcgacgcgcatcagtcccaggccgccacgcgcatgcgcctggacgatatgctgcccgcgtgcgaaatcctggataaaatcggctactacgcgctggagtgctggggcggcgccacgtttgacacctgcctgcgcttcctgcacgaggatccgtgggagcgcctgcgcaagctgcgcaaggccctgccgaataccaagctgcaaatgttgctgcgcggccagaacattctgggctacaagcactatgcggacgacgtggtggaagagttcgtcaagcgcgcgatcggcaacggcatcgatatcatccgcatcttcgacgcgctcaacgacccccgcaacatggaaaccgccatcaacgccaccaagaaatacggcggcatctgcgaagtggccatgagctacaccatcagcccggtacacacggaagactatttcgtgaacctggccatccagctggagcgcatgggcgcggacaccatctgcatcaaggacatggcgaacctgctgctgccctattcggcctacagcctggtgaaaaagctgaagaagtccgtgaaggtgccgatccacctgcacacgcacaacacctccggcaccggcgatatgacgctgctcaaggccatcgaggcgggcgtggacatcgtggacaccgccctctcccccatgggcaacggcaccagccagccggccaccgagccgctggtggccacgttgcagggcacgccctacgacaccggcctgtccctggaactgatgagcgaggccgccaagcacttccgcggcgtggctgaccgcatgaagaaggaaggcatcctggatcccaaggtgctctccgtggatatcaacaccctgctctatcaggtgcccggcggcatgctgagcaacctgatcaaccagctgaagcaggccaacgcctccgacaagttctacgatgtgctcgcggaaatcccgcgcgtgcgcgaagacttcggctatccgccgctggtaacgcccaccagccagatcgtgggcacccaggccgtgatgaacgtgctggccggcgagcgctacaagatgaaccccaaggagagccaggccctgatgcgcggcgaatacggccgcctgcccgccaaggtgaacgaagaggttcgccgcaaggtcattggcgacgcgaaggtcatcacctgccgccccgccgacctgctggagccggaaatggacaagtatcgcgccgagtgcgcccgctgggtgcggcaggatgaggatgtgctctcctacgcgctgttcccgcaggtggccgagaagttcttcgagtggcgcgattcccagaccctgggcgtggacaattcgctcctcaataaggacgccaaggtcatgcccgtgtaaaaccatacgtcttgccccggccgcggagttttccgcggccgggttttgtgtgcggcgcaatttttttcgccttgaaagggattggggattgcaaagttggtcaaatcatgatatgataagcaatagagattccagggaattggtatgcacaaatttgacccggctttgcccggcaaataggagaaaggggaatttccgccatgagcaaaatcaaagttgctatcatcggctgcggcaacattgcgaacagcgcgcatttgcccgcctatcaggcggccagcgacctgtgcgaagtgaaatacttctgcgatttgatcgaagagcgcgccaccgccctgcgggataagtatggcagcggcatcgtttgcgtcgattatcacgatgtggtgaacgatcccgaagtcacctgcgtttccatctgcacacccaactatgagcacgcggtgatttccatcgatatgctcaacgcgaaaaagaacgtgctgtgcgaaaagcccgccgccatgaacgcggatctggccgcacagatgcaaaaggccgctgacgacaacggcgtgatcctcaacatcggcgtgtgcaaccgttttaacacctctgtgaacaaaatcgccgagctgattcaggcgggcgtgctgggcaacctgtatcacgtgtattgctcgttccgcgcgcaccgctccatccctggcctgggcggtgcattcaccaccaaggcgcgcagcggcggcggcgcgctgatcgactggggcgtgcattatcttgatttgatcctctattgcctgggcgatccggcgatcaaaacggtttccgccgcagcgtatagcgtgctgggcaaggatatcgagggctatgtctacgagagcatgtgggctggcccgccggtgaaagacggcgtgtacgacgtggacgatatggtgacgggctttgtgcgcaccgaaggccccacgctttccttcaacggcgcgtgggcgcaaaatatcggcgagggcgcgacgttcatcgagttcatgggcgataagggcggcatcaagctgcaatacggcggcggcttcgtgctctattccacgctcaacggcatgctcaccgaaacgcactttaagtatcaaaccgaaaatatgtacaatgccgaagtgcgcgatttcctcatcaaagcgccgcaaggcatcaaaaccaaggcgaacatcgataaggccatcatcaccagccgcctgatggatatgatttaccgttccagcgagctgggcgaagaagtaaaggcatagagcccgggcgcgcgttgtaaaacgccacactccgcggccccgctccaatcggcggggccgcgattcatttcgaaagaccgcgtgcgaggaggattgccatggcaaccttggaaactttggagcatattttggtggaagcgggcgtgtaccaatatgggcgcgtggacaccgcggacatccgctttttgcaggaagtgcgcggcatgtgcgaagccaacacctgccgccaatatggcaaaacctgggcttgcccgccggcgatcggcaccgtggaagagtgccgcgcgcgggtgcagcaatacgatgcgatgctggttttcagcgtgaaatgcgatttggaggattccttcgattacgaaggcatggtggagggcggcaagcggtttaagcggatcgcccgggccatccagcaggcggtttcgcgggaattggacgattatttgctcctctccaacgagggctgcgaccagtgcaaggaatgcacctatcccaacgcgccgtgccgctttcccgaaaaaacgcatggcgcgttggaaggctatggcatcctggtgagtgaactggcgggccaggcgggcatccgctatatcaacggcgccaacaccgttacctacttcggcggcctggcctatcattcacagcgcgcttaatccgcgcgcgcattcgtaagaggggcttttttcatcaggatttcgtgcataatcgccatgagcgccagcgccagcagcaaataaaccggcagcagcgccacggaaatgtggttggcaatcaggccgaacagcggcggcatcaggcaggtgcctacataggcgctggccatttgcacgccgatgatggcttgcgagcgctccgcgccgaagtgccctggcgtggaatggatgatgcagggatagatcggcgcgcagcccaggccgatgagaatcagcccagacagggaaaacgcctgtccacccggcagcagcatggccacgatgcccgcggcaatcagcgcaagccccgcgcggatcatctgcggatcggtgaatttcatggtaatgaatccgcacagcgcgcgcccggcggtgatgccaatgaaaaacatgctggcaaagccggcggcggtttccggggaaacgcctttttgcagcgtcaaatagctgctggcccacaggctggtggtctgctccagggcgcagtagccaaaaaagcaggccatcaccgctttggcgccggggatttgcacgatttcccgcagggatagcgccttgccagcgcgctgttcctgcgcggcttcctggcgctgccgcttccacaagggcaggctaatccacaaaatcacggatagggccacctgcaaaatgccgatgtattggtatccggcgtgccaaccattgccgccggtgagcgcgtagcccatcacatagggcccgagcgtagcgccgatgccccacatgcagtgcagccaactcatgtgccggctcttaaaatgcagcgccacatagttgttcagcgcggcatccacgctgcccgcgcccaggccgtagggcacggcccacaggcacaaaagccagaacgattttgtgaaggaaaagcccaatagcgccacggcggtcatcgtcacgctgatggccgtcacgctacccgcgcccaagcggcgggtcaaccggtcgctttgcaagctggaaacgaccgtgcccacggcaatgatcatggacacgatgccggcatacgacagcggcacgccaaattccggctgcatcgtgggccaagccgcgccgagcagcgcatccggcaatcccaggctgataaacgcaagataaatgatcgccaaaagcaattgtaccatacaaatctccgcgctagcccggtatccttccatatgggccagccaatttcagcataccattataccggcccgctgcccaattgtccatgaagatcctgcgaaatcgtataacaatttcgcgcgcacttttattgacgccattctactgaaatatttcagatgtgaaccgttcgctttgaggctatggcaaaaggcaaaatttgcacaacaaaacgagccgcgacgcatcttcgcaaacgcgcggcccgcttattttctgcgttataacgcgctgtggcggaaccggctctccagcctctgccaacggcgcagaaaatccgccccttcttcgctacgggcgatttcgcgcatcgccacttccacggcctgcacgaaggcggggtttaggccttttgtgccatagcgcatcagcgggcacatggcccaggcgcgccaatccatgcgtacgccccagccgctgcgccgcaaaaccggcgtgagcggaaaaatccggcatcccaatggacgcagcgcgcgttcacacgtgccgttgcacagcaaaatatgcgcgtccgcgccctccatctcgcacggcgttgctttagcccagggtacgccagcgtacagcgtctcttcgccaggaaacaggtatacgccgccctgcccgtccgcatcgctgtggcagcaggccgcgccgcacagcgccccgcaatccgtaaggagcggcgtgagatcgcaaagttgctcgcgcgcggccatcactgccgcgtgacattcgttcaaaattctccctcccccatgcatagcgccagcgcgagcggcgcgcttcccgccacatctgcgggcaaaaatacgcgcgtgcccccatccgccgcctcacaagccaagggacggccgtccgccaccagacgcacaccggacgcgcgcatgggcacgagcaaggtttgcggcaggcattcgccctcgggcaggcaatagatcgcgtagcgctcgccgccgcggcgcgtgaagccgaagcgttcctgccggtagggcgcgcaaatgcgcgtgccataaatcgcctcgccattttgcttcagccattcgcccatgcccagcgccgcgcgcatacctggctcgggcaggcggccatcgggcatgccgcccaaattgagcgccagattgccgcccttgcacacgatatccaccaagaggtgtacgagctgacgcggcgatttataggtatcatcgtatcggtaggaaaagctggtgccgatggtgatgcagctctcccacggcacgcgcagcggcttttccggcacggtttgttcgggcgtaatgtagttttcgtacgggccgcccaccgtgcggtcggcaaacagcagccacggctgcaccgcgcgggcgcgggcggccagctcgcctaggcgaatatcctgtccgttctgcgggcgcacctggccgccatcgagccagaggatttccaaccggccatagcgctccaccagttccatcatttgcgcgtgcgtaaagcgcacaaattgttcccacagctcaggatgctcacgcacatcataagtgggattgcgccaatgccccaccggcaaatccatgcccgcggcccagtaccaagggcagtgccaatccggcttagaaaaatacgcggcgatccccagtccctgcgcgcggaacgcgtcgaacaggtggcgggcaatgtcggcgtattggtgggtatgaaaggggcaatcgggtgcggtcaccttataatccgtctgctgggtatcgaacatgcagaagccatcgtgatgcttggtggtgaaaatcaggtagcgaaaacccgcgtccttcgcgaagcgcgcccacgcttccggctgaaagcgcacgggatggaaggtgcggttcaacgcgaaatattgctgccggaagcgcgcgggatcgctttcccagtccacatcccggcgcgaccagctcgcgtccgcatccgaaagcggccaggattcgcaaatgccccactgggaatagccgccccaatgcaccatgagggccagcttttgatcctggaaccattccaggcgggaaagcaacagcggatcggttggcgccacgtagtccgccgcctcgctgtggttgatgatgtctccccgcggtttttcctttgccatgcggttcccctcctgcgtttttttcagtataacacagttttctggcgtgcgcaaccaaaaaagttacccgcggcactttgccatttggaaaaaatgtggtataatgggaagcggtatggcgcctgcatctggcacgcaaatcgtgcggcctggatctgccaaagaacgaggaggaaacacatatgattcttttggattccgccaagcccttttataaagccaattttcatctgcacaccacaaattcagatggcaggcgttcgcccgaggaagcgatcgccctgtatcgcgagcagggatacgatgtgctcgccataacggatcactggaaggtcacgcgcgaatcccatctggacgaaggcatgctggtgctctcgggcgtggaattcgatttcaacctgcccggccaggtgatccacatgctggggctcggcgtgcaacccgatattttggataaggtttcgcgagccagcgggccgcagcgcgcggcggatgaaatttcccgccaaggcggcgtcgccgtgctcgcacatcccgcgtggtcgctcaacccgccttccaccatgtgcgctctatcgggcgtgacttgcgcggaagtttacaacacggtttccggcacgccgtggaatggggatcgggcggattccacctcgcttttggatgtaacggccgcccaagggaaactgtatcgcttcctggccacggacgacgcacatttttacaacggcgatcagtgccgttcctttaccatgctgcaagccgaaagcctcacgcaggaaggcgtactcgcagccctgaagagcggcgctttttacgcttcgcgcgggccggaaatttaccgctatacgtttgatggagaagtttttaccattgattgttctccggcttcccggatcgtgttttcttctgatttgaactgggtcaatggccgctgcgtcgcgggcgaaaacctcacgcacgcggagtatgtggtgcaaaccaaccgctatgagcgctttgtgcgctgccagatttgggacgccaatggcctgtgcgcctggaccagccccgtggcggtcgggccgaactgccattgacgcgatccccgcggataaaaaagctttgtgccggcccaagagacgccgtctcttgggccggcacttttttctttggctgctcttggggcaacggagaaagggcagccaacctgtaataatgcttttgttctgccgccataaatccatattagcgcaagtagaacttactccttttcttccgtcaggcgctggtacatcttcatcagcgccgcaacgcaagtgctttcggtcatatcccggacagaaaagccatatgcctgcatcacagcccggtcgttttgctggtgggcggtgcgcagctgagacggcatggtcagctcgtcatagaggtcggcaaggctagcatcagggtacaaggcgcgggcatccagaatagcctgcgcagtctgtttgatcttggccttctgcgcggcggtgggcgtgggccaggggaagttgttgtaaacaatatccttggaatagcgataatcgctttttaatcgtccacaaacagctcgcatccaggccatatgtacatttgaggttaaaatgccgaaattgtataaagtagcattgggaatcaaaaataccaaatcgcttgcaataacttcttttggcaaaaaacccataggaacatattttctgcgctcagaagatactttgggaaccactatgtattctgagtctggctgggcaatctgacaaaagagcgtaggtgttgcagcaaattttcttgtacctgccgcaacactgttagcccgaaaatctcgaacctgttctattctctgcattactgtcgggcactttttaagttcactaggatctgcatttaccagccatagacaccacctcgattttctgttaatgaattcataggctccaatatagggatgtacccatttttcagccagaggttcattggctattaattcggcgcgttcttcgtcgtttaatataaagcctccaccgtctctcggcatacttccaaagcgcataggaggaactttttccaacggtttagaacgactctccacaaagacagtaggcgcatccatcaaatatgagtttatattttccgtttttctttgttttggatagtcaaaaagtatgccaactttttttacatatgaaaagccgacaataatacaatgcacatgtgctttgatttttgcctcgctatcccatataaatgtgcgataagcaaaagttatttttatgccactcgcaaaaataggtttccatagcgatacagcctgttgtccttgacagatagagttggtcgaaacaaatgccgcatcaatcagagttccctgcatatattctaccgcttttttataccaccctgctacatagtctaattctccaacaccctttacaccatccagcagtgtaactatatcggccttttgctcttttgacatcatcatcccgcccacaaacggcggatttcccataatgtagttcagcttgtgcttgggtaccacgctctcccagtccagccgcagggcgttcccctccacgatattcgcataggatttcagcgggagaaaatcgaggctcatgtggacaacatcctcggtttccttcatcatctggctctcggcgatccacagagcggtctttgcaaccgtcacagcaaaatcgttgatctcaatgccgtaaaattgtccgattgagaccttaatgggattgcccacatcgaacatgatttgatcgtgatgcaacagggcaagaacctgattttccaaccgccgcagggacaggtaggtttccgtcaagaaattgccggaaccacaagcggggtcaaggaaagtcaggtcagatagcttttgctgaaacgcctccaacttctgcttgcgggtgcgttccaccgggattttgcggattgcttccagttcggctttcaggccatccagaaacagcgggtcaatcaccttgtggatgttttcaatgctggtatagtgcatgccaccgctacgccgggtctccgggttcaaagtgctttcaaatacggcgccgaaaatggtggggctgatggcagaccagtcaaaatcttcacttgccctgcggaggatcagcgaaacgatttcctcattaagccgcggaataatgatattttcatcagagaacaggccgccgttgacatagggaaacgccgccagatcgtcgtccatatatgggtcgcgttcttcgggtttctggtcgagtacccggaataagtcgatcagggcgcgacgggcctcgcgctcatgggccgaaagatagtcatggaacatcagatggcggccaaaaattcccgcatcctcggcatacaggcaaaataccaagcggacgcacagggcgttgagacttttcagcgtttccgggtcattcggtttctgatattgttccagaaacgcatcatacagcacaccgacaagctcgccagcctttaaggatatgtccatttcctttttaatgtggtcgctggtggtgtcgatgataaactgcaaacggtgatattctttttccaaatccaccagctccaaaacttccggctcatcgttggggcggttcatatcgtggatatggaattctctgaaattgcagacgatgatccagcggggttgttcggactggggaagatagccgccataccgccgggcctgctgatagggcgaaagcaaggagccatcggactgcctgtaacctttccgcaagtcaatatccatccccttctgctcgatcagcactcgcgtctgagggatgtaaccgtcaatgaattttgtcgtactttttccggttttgggatcatcgacttcgacgcgccgctcgaagctgatggttttttctggttcctctacgccaaaaattttttgcagcagtgccagccaaaaagcctgtgtttcctgcttctcatcgccgtgttcctgccaatccaaggcaaattgtttggctgccgctcgctgttctgtgtcgttcataacttcctcccagtcacgatattttgtagcggatcttaacctttcctgcatggctgccgttgcaaagacctatcccgtatgggaagaacgaaattccctgtcataagatgcttattccaaagatgctccgaaagcctgctgtacctcatcggaatctttgccagatatcgttctgccggtagctatttcgattgcgctcagtaatttcttagcgcggtcaatcatgaaatccaggaattcattatttcttagcagcgtgtggtcaatccagtgcgtctccacatagccatccaaatccgatggcaatacagagcctttcttttcgagttttccaagatagacggatggtgcaacgccgcctatttcccgattgctgcttgcggacagtggcgtcttattcacgatactgttccatttaagcttgtcgtatcgttgcccgatgcagtaatccttcggaaaaatatgatgaatgtcgattttctcgtttgaatatgtcgagaagtccatctccgcaccggaaataaaatcacgggcatggttctttagaatcagagccataattcctttgtacgccgccgactgtctggattgcaagctgagaaggcgtgtcggattgaagaaaaaatcagtgaccgtcttcggaagatcaccgccgtctataatccacttgataacctgcgtaatatcgttggcataccttgtctcatttgccgcgccgtacagttcgccaaatactccgcaccaataccattgctttaccatgttcttggtagtggtagtgttaatcctgttcccgtccatcagcaccgtgcaaatagccgcgagggggataagttgcgtactgtacggcaggtcacggctggagaatattcgttcctcttgtaacagtttggctgcaagagtaaatcccttgcaaaggtcatctgcatacttcttatagaatgacagacttaaagccagtacatcttttttcttacaactcaccgtcccacctgccataaacgaggaaagcagcgtaagagatgtcaggaaatccgtggccgttacattgttcagcagatcgctcgaaaagtatttttccttccggtcttcccaatctttgcgcaacggaaaatcgtccatagcaaaaatcgcggtaacaagctcaaaaaccgttagggaaacaccgccagtatttacattctcgaagacttggcacaccgcctccttcggagtttctttatcaaggagaatgaccggcatcgcatacttttgagtcggcataatgattttggagaaaagctccgtgaactgctggataacaaccggatcatagttgtaataagcataatactcgttttgccatccctgctcctcgctggaattcagaatgatattaagcggaaacattttcagcttaaactcgtcttgccttgtagaaagatctttatcgatccttctgccgaaatcagatgtgacctgtttcgttgcaggaattgaaacaacaacttcctcatcatcggcgcttggatcaagcgctttctcaatgtccaaataataatatctgtcgatttccttgcccttgtccgtttttgtgtgaacgggattcttgctatacagagcattatagagggaggtcaatctctgctggccgtcaagaataagctcatccggttcagtgttgaaatcggcctctgacccctcaatcggtttatgcttgaaatgaatgctttcatttccatattccagaaacattgctgcgcctactggaaaattatgaatcacactgagtatcagcgcccgaatgcgtccatcgtcccacacccagcctctctggaaatcagggagctgcgccgcaccggtgtccacggcattcatcaggtctgtaagcggtctatcatttgttttcatatgcttcctttgctccttcgtttttgtaacggcacttcatgtactctccactttttattctcgcgtcagcgggtttcggctcatcaagaatcgccctcgcggttgccgattttcaccgcgcccggtatgcgagcctcattgcataagattggtatgcgccggggcaatgcttcatcgttcagcggtccgcgggacaaataaatatttcatcactgctgctcctatcattagatacaaaaccacaatatatattataatccgattagcaaatgaaatcaatacggaaccgacaaaaaacgatataaaaacaagcaaggcagtccaccgatgcgggactgctttgcttgtttgtctttttctttcgcggtcctcacggttgggattcgagtcgctttataacgccgttcgagaaataagtgttttcatatcgctcaaaataaacaaataatccgaacccgccccacagtaaggaactggttcggattatttgggtttggtgccggtggccggacttgaaccggcatggtttcccgccgcattttgagtgcggtgcgtctgccattccgccacaccggcgaatctttcgtactcttctattatacacaacttgaatttgaaaatcaaccccttttcgaaatttcacaaatggtgtataatagagcaagacacgagaccaaagccagaatgggccgcggccccaaagggccagtcgcgtccaatttggcgcgaatgatatgagcgctccacaaagcgctactacagaaaggagggtggacgatgcaaaattcccaggagcgggcgttgattgaggctgccgcgggcggcgatccagcggcgtttgaaaaattgatgcgcatgcatgaaggaaaaatgtacgccgttgccctgcgcatgtgcgccagtcgggaagacgcgcaggactgcatgcaagaagccatgatccgcgcctatcgcgccatagagaattttcgctttcaatcgtcgttttcgacgtggatatatcgcatcaccatgaacacctgcctggatgaactgcggcggcgcaaggtgcgccaagccgcgtcgctggacgcgctactggatgcgggctgggccccggcgggcggggaatcgccagaaggccacgccatggaacaagaccgcaagcgcgccttggagcaggccatccgcaccctgccggaggatatgcgcgccgccattgtgctgcgggatatccaaggctattcctacgacgaaattgcggacattctctccgtaaatgtgggcaccataaaatcgcgtatcagcagaggacgcgaaaaattgcgcgaaatcctttcggaacacacggaacttttcgagcaaagcaacgtctaaaatgtggtaggatcggagggcggcggttcaagatggaaattgaaggaggtgcgcacatgaattgcggggaatttcgtgaacggattgacgattacatggatggtctgctggatgaagcccttcatgcgcgcatggacgcgcatgcctgcgaatgtacgcagtgcgcgggcctgctaaagcaggcgatggagatcaaggcggcgctggcagatctggacgacgaagcgcccgtgcccgcggaagtatccgccgcgtggcggcgggccgtgaagctcgaagccgagcgcaggcggcgcgcacgtgtatggcgcggttggcgcgcgtttgcggcggctgccgcggcgctggccatttgggtgggcgccacggcgttgctgggcgacgcgggcttgctggacaaggtcgtgcccgcggaagacggcattgtccccgcttcctatagcggcggagaaagcgttttgacggcggatgacgaagcggcggcgtatctggagtcggacggcgatggcgaagcgccgggcggcctgttgctgggcagcgcgcgcagcgcaggcagcgacgcgcccgaagcgcagcctgtttcctcttccctgcgcacaaaaacggtgacggggcagattctctgcgccagcttcgataccgacctcgccaacctggacgatctggtgagcgaggtggacgggtattacgaaactgaaatggacagcgaaatcgacggcgtgcccaacgcgcagcgcaccatccgcgtgcccatggaagagttggacgcattcctcggcgggctcagcgccgtgggcaagcccaccaatctggtgaaaacggaagaagacctgacgcagcaatacgccgagatcaacgcccggctcaccacgctgaccgcgcaacgcgaccaatacaaccagctaatcgcacaggcggcgagcgccgaagagattgaaacgctggctgcaaacgcggaaagcgtgcaggcgcaaatcgacgcgctggaagaagccatccgcgcgtgggacaccgcgtgcgaatacgccacggttaccctttcgctaggcacgcaagcggctgcgcctgccggtttggaaggcagcgaagacgcggccctgggcgcgcgcatgggaacggcgttttcccaaatgttggatttcttgcaggatatgttggtctccctggcctacctcgcgccagcgcttttcgccattgccattgtggcaatcgccatagcgctcgtgcgcaaatccaaaaaaacccataaaggcggtgaaacgacatgaaaaaattttggtgcatgattttgattctcgcgctggccgcgagttttgcgggcgcagccttagcggaagcggagccgccaacgcccccggcggacggagcgcaggtggaagaacccaaagaacccaccagggatgaagaatcctccctgccggaggacggtgactccagccttacgcgctatggcgcggccaagggcgcgacgatttcggtttccggcaacgccaccatcctggtgccggcggatacggctacggttcgcttgggcgtgacggaatcggcacagaacgtgctggaagcccagagcgccatgaatgccaaaatcgaggccattcgccaagcgctgctcgaaagcggcatcgacgaaaagtccatcaataccgaccggctgaacatctacaccaattacagctacgcggaagatggcactgagcgcgtttccagttatacagccagctccacgctctccattgtcacccaggatatggacgccacgggcgccatcatcgacaccgcctttggcgcgggcgcgaacactttgaacggcatcgaattctccgtgcaaaacacggaggaagtgatggatgaggcctatgtgcaggccatgctcgacgcgcacgacaaggcggaattgcttgcccaaaccgaaggcgcttcggtgcgcggcgtggtgagcatttcccagggcagcgcgtattcttacgatagcatgaccaattccctgcggatggacgccgccgtggcggagggcgcgggcgccggcacctttgtgcaggccgcgctgatcgaagtgagcgcgtcggtttccgtaacgtacgaattgcaataacgccttgattcctttggcccgccccgctccgcgcgggggcgggccatgtttttgttcgcaccgtatatttcccccttgctgaatgcgcgggtttctgctataatatccttataatgtgaagctacacactgcggaaaaagaggagagagccatgcagaacatcatagaaggcaacgccatcctattccgcggcaggaagcgcgactatatggttcggtcggagagacggccgggctatcgcgtgcagccgccgcgcaagccccaaaaatccggcaaagacaaagcatacctggcggcgaccatcgtgctgctcattttgttataccccattggcctggtgctgctgtggctgcgccggctaaagtggcatacgctggtgaagctgctagtttccgtactggctggcgcgatattcttcctgtggatctccatggccgccacgctggaaacgaacaatccggcgctcgtgcgcgtgcaggaaggcattcgcacgggctatgaagccgtaggcaacgcggcggacgcggtgggcaattggttcgccgaaggttggaacgccaccgttgccgaagcaaaccacaaccttgccattgtgcgcgagcaagggccaagcgccctggagcacgcgctgcacacggtgggagacgccgcttggaacgcctataactgggcggcggatctgctgggcgtgcccgcgctggatacgcctaccacgccggaacccctcgaagaggcaacgccgctcccgctgttcgccacggccacgcccaacccgtcggctctggtgtccgcttcgcccacgccgagccccacgcctgcgcctacgcccagccccacgcctgcgcccacgctgcaacccattggccgcgtgacggtatatagcgtggaaaacggcacctattaccacatgaacgatacctgccgcaacatggagggtggcattcccggcacgctggaagacgccgttgccgcgggtctgaatccttgctcccgctgcggcgtgcctcgcgcgagcattttgaatgaggaagaacctctggtatacctggatgaagaaatgctctaccacaccagcgtgaattgcgacgcgtttaccggcgcgtggacgccgcaaaccctcatgctcgcgttctaccgcggatatgaagcgtgtcccgtgtgcggcgcggatcactacgtgtatcagccggaagaaccgtttacccaggcgatggacgcggcgcgccacatcaccgtgtactatcacgacaattccacctattaccacgccgaatcgtcttgcggttctatgacgggggccgacccgcactcgctggccgaagcggtgctgctggatgagaaggaacgctgcccttcctgcgatccgccggaaatcggggcggaggccacggaagcgccggagccctccgcgcagagcgaaccataagggggaatttccatgcgcgttctgtttgtggacatcgataccctgcgcccggatcacatgggcgcctatggctaccaccgcaacaccacgccgaatatggatcgcgtagccgccgaaggcatgcggtttgaccgggtgtattgctcggacgcgccctgcctgccttcccgcgcggcgctgatctccggccagtttggcatccacaatggcgcggttggccatggcggcaccgcggcggaccggcggctcaccggcgcgcaccgcggctttatggatgaatgcgacaccgaaaatttcacccacctattccgccgcgcgggcctgagcaccacttccatcagcacgttcgccgagcggcattcttcgcattggttcaccgcgggcttcaacgaggtgatcaatgtgggcaaatgcggcggcgaaggcgcggaagaagtgctgcccaaggcgctggattgggtggagcgcaatggcgcgaaggacaattggtatctgcacttgcacctgtgggatccgcacacgccttaccgcacgccgctggactttgatccgttccacgatgcgccgctgaacacctggatcacggaagagatttttcgcgagcatctcacgctttcctcgccgcatgggctgaacgaaatcggcatgtataccgacgtggaaaaccccgcctatcccaaacaccccggcagcgtgcgccagtatagtcagctccgccgcctgctggatggctacgacagcggtgtgcgctatgccgacgaagccgtgggaaaagtgctggacgcgctgcgtgccaagggcgtatacgacgatcttgccatcatcatcacggctgaccacggcgaaaactttggcgaattgggcgtttacagcgagcacggcaccgccgacgagccaacttgccacatcccgctcatcatcaagtggccgggtgtgcggcccggcagcacggatgcggggttccattatctgctcgatttggcgcccaccgtggcggatttgctgcgcctgccgcactcgccgcgctgggatggacagtcttttgccccggcgcttatgacgggcgtagactgcgggcgcgaggtgctggtgctttcgcagatggcgcacgtgtgccagcgctccgtgcgttttggcgattggctgtatattcgcaccgtgcacgatggattccgcctgttcgatcgcgaaatgctcttcaacctcgcgcgcgacccgcacgagcagtgcgaccagaaggcgctgttcccggaaatctgcggtgaaggcgcgcgtaagctgctcgcctggcaggaaaccatgatggaaagcagcccaagccccatcgatcccatgtggacggtgatgcaggaaggcggcccctaccacacggtgggcgaactgcctggctatgtgcgccgcctagaggccacgggccgtgcggataaagccgcgcagttgcgcgggcgctatcgctgccagagcgcggagtgagcgttgcgctagcgtcgtttctcaggaggttcaccatgcgcaaaatggacaaatggtttgtaggcgctccccgctattggtttttggtgggcgcgctgtggtgcgccgcagccgttgcctctttgtgggaaggccgcgcgccggtagccgctgtaccgctgttcgccgcggcagccattagctttgccgtgggcgcgcgaaaatgctggctgcaaagcaggcgcaatttctccgctcgcaaaacaatgccaagataggcgctgggtagtttctctgtatatttccacggaagcgctgggatggacaaacgccgtcccggcgctttcttgccgtttttgaaaaaggcagcttcgtaccaaaaattgcaggaacctacaatacgcgcgcgcggcgggcgctgtataatgggggcacaaacaagctggccgaacggttggaaggagagcaaatccatgaattcttacgaacgcgtgatggccgcgctccagcacaaggagcccgaccgcgtaccggtctatcccattctctgcggcgtgatgcgcaagcgcacgggcgcttcttacgcgcagtggtcgcaggatgcgcaaacctgcgcggaaggctttttgcgcagcgtgcaggattttgatatcgattgcgtggtgacgctgatcgacctttccatcgaatgcgacgcctggggccagaaattgattttcccggaaaacgaagccgcgcatccggattattcccagtgcgtggtgggagatatcgaggaatatggcaagatcaaaaaagtggatttccgcacctctcagcgcatgatgatgcacatcgacgtgctcaagcgcctggtgaaggagctgaaggggaaaaagcccgtggtggcgtttgtgttcgggccgctgggcgtgctctccatgctgcgcgggcagcagaatctctacatggatctgtacgacgatcccgacgcggtgcgcgccgccgtacacgaagtgaatgagacgctcaaggaatacgtggccgccatttgcgacaccggcgtggacgccgtgatgttcgatacgctctttgcctccggctccatcatgagcaaggccatgtggaaggaaaccgagggtcaggccgcgaaagaactggccgcggtggcgcacgaaaagggcgtggcggtgatggtacacaattgcggccagcgcatttatttcgacgcgcagatcgaggccatgaaccccgtggcgatttccttcctctatccagcggacgattgcgcggactttgcggaaaccaaggcaaaatacggcgataaggtaacgctgattggctccgttaccccggccaacgccctcatcggcacggacgaggaatgggatcagcagtgccgcgaccagatcgacgccatggccgcgggcggcgggttcatcctggccacgggttgcgaatatccggccaacgcgcctctggaacgcgcgcagcgcatgatcgatatcgccaagacctatggcaaataccaataaggctggcatggctgcaaagcattgatagagctatactttatggacaagaggcccggcgcgcaacaaagcggccgggccttttgcttttgggcggcgcggttcacagaatggctctgcgcagtggagtgcatcatcttaaatggaaaggagctcttgcgctcttcgcaggagcttactctgtaaacaacttgatgccggaaaacatcttgtgaaggcggtgttcatcaaagggaagatactcggctatggtaaatccgacaacatccgcttgagaagcaatccgtccgagaatatccgccagcatatccattttcatcttaccgccaccgctgccatccccactaagctcagggttcgcaaaataggtggagtggaagaaatgctcgtcgagcacatcaatatccaaatgtacgaggatatggtcgaagcgcttgataaattcggagatctcctcggcgctgacaaagctgtccgtttgaactttatagtggactcccttctcgtccaaaaaattcttctgataatcatgaagtccctgcaagccaacataaaaaatttcgtcaggctcaaagtttcggttttccatccactctgtcaggctctcatccccgccgccaaggagcgaacccagcaccattgcgtgtgcgttaggatagccgtctttgaccgtggacacatcgggatgcgcgtcaatccagatcatccccgtgttcttatacttgccgtgcaaataatcgaacggagccagcgacacgaggcagttgccgccaatggtaatgactttatccggattctctgcgtttaatttgatctttgcttcttggataccgccaatcacctcaggcttgccataaatgccgtcctcaatcggcttttcccgcccatccggcggagttacattaaccttgatgagaggctgcttatcatttgcgggcaggatgtgtgccagcaaatgagcgccaaaataatacgtctcaagcccgccgcttacatggtcggggtagagcaaacggattgttttcatgcgcatcattcctttcttggatttatatctttcacttttcttttgttttttggggcagttgcgtcatagctcatatatagcagcatctttatctgttcatccggcacgctgccatccaaggcaacggaaatccagttcgccttgctcatgtggtaagctgggaagattccgggttctttccgcagtgaaccgatgaggatagaggcacatttgaggtttaccacatccagaggttctgttcccactagtcccagtttgttcttaggcacatccatcacaatggcaaaccatttgcggttacttggatgccggagcacacagaagagcggatattttggccagagatattccccttccacgccatattcatccgaggtatgctgtatgaactgttctcggttcatcgtattgtgttcctcgattcggattagacagctataatgcccttgcccatgagcgcttttatttcagggctgctttcttgcacttcccccatcacaagccgcaaatacagcaaaagacactctatatccgtcctatcaagagcgacggacagatagttatctgtcagcccatcgtaccaaaatgaaattttccattccatgtcaatatcaacgatttcacaacccggtttgacatataggactttggggtcaagccgtaagtcttttttggggttgagaacaaaattgaaatctggctcgatacagttaaactcagtcggagcattaagccggtcatttagcagatcgtccagcgcttttgcaaggtcttcgatttcacaggcaaggaaaacttcatcgttgtctttgctgtaatttagccactcgtcagagacgaacgaaaagtcagttttgcaccatgtcgaatgccagtcatcagcggaaaccttacggtaatttctgatctgcattgaaagtcttatgccacttaaatcaagctttagccacataatttctccttacgcaccgagcaagctctggtcaaaggcgaacagagtcgcatggatctcgaagacattgtagttcccgtgctcaatgaaataccccgcaaatttaccgacttcattatacccaaaaactatgcgcaattcaaccacagaaagcgaggtatcaacaattatatattgcagccaagaacagatagacccggcaaacgccgcgtaaaggccgaagccgaagctggaatatccgaaaggacactacagaacacgaagcgcaacatggtcagaaacccccggcatttttgaatggaaagtttacttgacattccgcaatttcctattataatacctctatggaaagtaagctttccatagaaagaaggcgcgccatgaaaaaccgtttggaagaaatccggaaagagcggggcatcaaacaggaagagcttgccgccgcgctggaagtatcccggcaaaccattggctcgctggaaaacgggcgatacaatccctcaatcgtcctggcgtttaagctcgcgcggtattttgacatgcgcattgaggacatttttatctacgaggaggaaaagcggtgaaaaagaaaacagcggcatatcttgcgattggcgttgtgggcattgctcttgcgcttgccgcaaagtttcttttacagggctttttgagcaatgcgcaaagcggggcaatagtgggcgtgggcgccggattgtttggctatggcgtgggaaaatggtgcgtggccctgtggggcgaaaagcatcccgatctcatgaaacagagcgagattgaggaaaaggacgagcgcaaccaattcattcgcagcaaggcgcaggccatctccggcgagattctgcactggcttttgatcgcgggcgcttggtttggcatctttttggacgcgccgttttggctcaccctgctcctcgtgggcgtgttcttgctcaaaacgatattggactttgcccttatcgcatattatcaaaaaaggatgtagcggaggtttgcatgaaatttgtcatcgagcatttggccaagagctttgagaaaaagcaggttttgaaggacatcacttttgcttttgaagcgggcaaaatctatggtttgctcggcagaaacggcgcggggaaaacgacgcttttcaattgcctgaatcgcgatctcaaggcggatggcgggaatttttggattgaagaagccaacggcgcccgccgcgcggtcgtcgcggaggacattggatacgtgctttccacccctaccgtgccggaatttttgacgggcagggagtttctaaagttctttatggacatcaatgagaagtccctcaaaaatccgcgcagcatcgatgaatattttgattccatgagcattgcgccggaggacagggacaagctgctgaaggactattctcacggcatgaaaaacaagatgcagatgctcatcaacatcatcgcccagccgaatgttttgttgctggatgagccgctgacctcgctggatgtggtggtggcggaggaaatgaagcagttgttgcgctcgctgaaacagggccgcgttaccattttttccacgcacatcatggacttggcgctcgacctgtgcgacgaaatcgtgctgctcaaccacggagaactggaagtcgtggaaaaaacaaacctggacagcggggagttcaaggagaagattcttgcggccctgcgggaggaagaaaatgcgtaaaacgctgcggatctcgtttgccctaaaaaatacgtatcgcgtaaatggcattctattttccctaaagcaaatcccgctcttaaagcgcttgctgccggcgtcgctctatcgggtcaggggtctgaaaatcttcgcgaatgcgctgtccgccctgtgggaaatcgcctccgccttcatcggcaagttcctttactttgtcacgatggtttgcggcatcggcatcctttatcagcagttgccggaaaacgcggtattcctgcacatcctgctgtttttgacggtgattggctgcttcgtaaacaccaatcttttcaatccgacaaaggacaagtactacgcgatgatcctgatgcgcatggacgccagggagtatacgctggtcaattacctctacgcgattttgaaggtggtaatcggatttttgccgttcggcctgctctttggcatggacaggggtctgcccctgtggttttgcctgctcctgccgctttgcatcgcgggcatgaagctgtttgtggcggccacttctttgtgggattatgaaaaacggggctttggctataacgaaaacaagctgtcgaaatacgtatggggcggcgtcgccttgtttttgctgatcgcttacgccctgccggccctcggggtggttgtgccagcctcggtatccatggccgtatttttggcctgcattcccctgggagcggttggcctggcgaaggtgttgaccttccgcgattatcgcggcatcaacaaggaattgctctccggccttaccaaccagatggattcgcaggtggcagtccagatcgtcaagcaggcaaacgaaaagaaaatatcggcggatacctcgatttccagcaaccgcaaaggattcgaatacctcaacgagttgttcatcaaaaggcacaaaaagatcctctgggattccacgaaaaagatttcttgcgtatgcgcgttcctcgtcgccgcggtgctggtgggaatttatctgctgccggaagaaaaatccgccatcaacgaaatcgtgatgacctggctgccatacttcgtgtttattctgtatgtcatcaaccgtggcacgaattttacccaggcgctttttatgaattgcgaccacagcctgctgacctactcgttttataagcagccgggctttatcctgcgcctgtttcagatccgcctgcgggaaatcatgaagatcaacgcggttccggcattggtgatcggcgttgggctggcgctgattctcttcgccaccggcgggacggacaatccgctcaattatgccgtgctgattgtttccatcctatgcatgagcctgtttttctccatccattatctgacgatttactacctgctccagccctacaacgcgggaacggaattgaaaagcggcacataccgcctcattttgtcgggaacgtacctcgtctgctttgccatcatgcggctgcgcatgccaattttggtattcggcgccatgacgatcgccttttgcgtgctttatggcatcgttgcgagcatcctggtataccgcttcgcgcccaaaacgtttcgaatccgcgcataacgcaatcatggcagcaagggcgcgttctgccgcaggcccttgggcaggtggttcttgaacgtatcctccgaacccttgccccaccccagcggcatgccctgatagcgcgccaacgcccagccctgcggcgtatcctttcccaacgcgagcggcgcgccgccaagatacgcgttggcctgctgcgcgtccaactcaagggcttgccgcgcggccagcgccatgcccgccgcgtgttcggggcggaacacgccctttttgcaactgaacaagggcaggccatcgcgcaacacgcgcaaaccatccagcggcggcaatagcgcgctgcgcaaacaagtggtttcgccccgcaaaaccgcttcgcccggcggcaaagcggcaaaaaacgccgcgcccgcttccggcaaagccggcggcgaagccaagcccttgctcagcggctggctttcgcccgcccgcgcaagcaaagccacaaaatgcccttcgcccgccgcccggtgcggatatacgcgcaggcagccgttttgcgaacgccccagcgcgggcagggaaaaatccctcgcggaaaattccgcgaattcgcgcaggaaccactccacgttgtcctcattttccagagggctaaaggtgcaagtggaatacaccagccgcccgccgggccgcaccaggcgcgcggcgcaggcgaggatttcccgctggcgcttctggcagcccaggttgctggcctccgtccattcggcgatggcgccaggatcgcgacggaacatgccctcgcccgagcacggcgcgtccacgagcaccgcatcgaacgcttccggcaacgcctgggccaggcgcgcggggctttcgttggtaacggcggcgttccacgcgcccatgcgctccaggttcgacagcagcactttcgcgcgccggggttcgatttcgttggccaccagcgcgcctgcgcattcggccagccgcgtggccttgccccccggcgcggcgcacaaatccagcacccgctcgcccggctgcgcgcagagcacctcggcgggaaccatggcgctgggttcctggaggtaaaacgcgcccgcgaagtgcgccaaactcgcgccgggccgcgcgtccgtagaaacaaaatagccgcgcgggcaccagggcacctgcgccagcgcgaacgaacgcgcgccgcccgggcggcgcgcgttttcccgcaatgcgcgctggggcggcgcttgcatgctttccaggaaagcgtcaaactccgcgcccaacaacgcgcgcatgcgtctcacataagcttgtggcaaattcataggatcgcattcagctccgcaaaagaagatacgcattcgccatcccaggaaccatcctgcggcggcatccactccaggtaaaagggccgcgccatgcgcaccgcgcgcatgcccagcgcgcgggcggcctccaggttcatgggcaaatcgtccacaaaaaccgcctcgccgggcgcaacgcccagcgccgccaatatagcctcgtacatctggtgcgcgggcttgatcgcgccgatttcgcaagaggcgatggccgcgtcaaaccattgcagcgcgccgagcgcttccatggcctttttcatggaaggcatggcgttggaaagcaggcccaagcggtatttcccctgccaagcctcgagcgcgggaagcacgtcttcatagagcgaatagcactcgggggtgtaggtaatccagtgcgcgccctgcgccaggacttcattttccatatacaagcccaaatcgttcgtagcggcgcgcaaataacccagtcgcaggccatcctcttcttccagggaatccagcttctcgctctcatccagccattccaacgcggcgcgggcgcgcgcaatcaccacatcgcgcgcgggaaaggcgcgcaacgattccatcatggccggagggaaagtccaatcgccgtgcgtgggataggcgagcacgccgccgcaatccaaaatcagagctttgggcgtcctatcacaatttcctttctccatgggttagcctccaaacaggcccgtgatgcgctcccacacagtctgttcttcttcctccgccgccggctcttctgcctccacaggcagggactgggcgggaacgcgcaacacgaactgaatgctatcggtcgattctgcgcccgcgaacgagcggggcgcttccgtctcgcgtaggagcgattccatggccccgttgatgccgcccacatactggttcagtccatcgttgagctgggcgacgccttctttgagcgtatccagcgaatccagcatgggcaggaattggttgagcagcgcttgcatgagctgcgcgtcgggatcgtcggtttccatggtggccagggacgcgatcatcgcctgctgctggggggtgatttcaaagctgctcagcccgtcggacagcgcctgcatgccctcggtgagctgcgcgccgccgtcggtgagctggctgatgtcaaaatcgcccagcatgtcgcccaagttcatgggcatggcggcaatctggatgtcgcccagcacaaagctctccgtttccagcgaaaggtgcgcgttcagctcgccgcccggcaggccgatccaagcgaacgtcgccgtggagccggtcacagtctgggtcgcgcccgcgcaatcgacgacgcgcgcgctgtccagatccacggaaagcgtcatttgcagggccagattttcggcgtaataggcgtccgcgcaatcgggattgggcgcaatgtggatatcgatgtccaccggaccgctggcgccaatttccgcgctggtcgttacgctcaccgtccatggcagcaccgcgccttccagcaggccgtcaaagtacacggcctggccgtcctctatctggcaggtgaccacgccgtccgcgtagctcacctggccagaaagcgcctccacagaggcataattgcccgtttccgtatattcgccggcttcgccttccacgcgcacgcctgcttccacggaaagcacttcgcccgtgggcgagagggtcgcgtaaatggtttcatcgcgctgagccagcgccggagccgcggccagcaaaagcgccacggcgattgccagaatttttttcattgcattttcctccttttggtgatcaggcggtcgagcagcgcaagcagaatgggcagcacggtgagcaccataaagccgctcagcgccgcgccgcgcccgatgagcaaccccagctgcgcaatgccgctgatgctggaaacaaaatatacggtcagcccgccggccgtgaggatgcccgccgaggtgagcacggattcgcccgccagccgcgtggcgctaatggccgcttcgcgcggggattcgcccagcgcgcgctggccgcgatagcggtcggccagcaaaatcgcgtagtccaccgtagcgcccaactggatggaagaaacgatcatgtaaccgataaaactcaaatccgttccctggaaatagggaatggccatgttgatccaaatggaggattcaatcaccagcaccaggatcagaggcagaaggagcgagcggaaggaaatgatcaaaatgagcagcaccagcgcgatggagatcgcgttcaccaccgtgtagtcgctttccaccacttcgcgaatgtccgaaacgctgctcgcgccgccgactacgcccgcttcctcgccaaacacgtcgttcacgatggcgcggatatcggccacggcctgctcacaggccgcggtttcctgctctaccgacaggttgagcacatagcgcgtatagccatccgcgcggaattgcgaggcggccatttcaggcagcaggctctccggcatgcccttgggcagcacgttggccagcgtttgcacggaagccacgccttccacttcgctcaatcgcgcggcgatttcgcgctccgtggcgatatcctgcgtgggagctacgatggccagcggctcatatacgtcgaatttttcctggatgcgcgccttatccgcggccagcacggaaccttcgctggccataatcgcgctttcgccatacacaaagtggttttgtccctgcgcgatgaagcagggcaccaccaccagcacgcacacgatcagcactgcccagcggcacttgctcacgccgcgcgcgtagccgcccaccttgggcaaaagcggacggtggctcgtgcggtcgatggccttcatcaagatcagcgcgaggccgggcatcaccaaaagcacgctcaaaaggctgaatacgatgcccttggccagcaccaagcccatgtcccaaccgatggtgtagcgcataaacatcagcgccacaaagccggcgatcgtggtggtagaactggcggaaatggaaaggaacgccttctttaccgccgcggtcatggccacgacgggatctgtgccattcgcgcgctcttcgcggaagcggctgagtaagaaaatggaatagtccatggcgatggccatttgcaaaaccgccaccgacagttgggaaaagaacgaaatgctgggcaggaacgcattggttcccatattgatgagcaccgaaacgcccagcacaaacaggaagatcagcgcttcagcaatggaggcagtggcaaacagcaaaatgatcagcaccacaggaatggcccacagcacaaccagcagcacttcctccgcggaagactggatcaaaagccccgccgtcaccgcggaaccggtcatcgcgttatcgccggtgagccggtcgatctcctgcacggcggcgcgcgtgcgctcggaataatcactatcggcaaattgcacggtgagcagcgcggcgccgtcgttgtaatacgattgcacaacgctcgcgtccagcgtggaaagcggcgcgcgcacgtcggccacatcgtccagccacatcaccatgctcacgccgtccaccgcggcgatttgcgccttcatttccaggatttcatcgatgctcatatcctcgagcatcacctgcgccatgccggtgtagccgaacgtatcgtccatcaaggtcagcgctttcgtcgtcggcatatcctgcggcaaatacgccgttaggtcatagttcacttgcaccgcagccatcaaaaatgctgaaagaacgcccaaaatgagaaacaccgccagaatgccgcgccgcgcgcggacaacccagctgctcagacgatccagcaaatgccgcaccccccaaactcctcgtattttctgtattatagcaaaacattatggcaagagcgtgaaaggcgcatggaaaaatgccgcgccagtccatttcccgcccatccatctgctcctccaattccgtctccagtatgctctattcaatcgccttccgcgttacccatgcccgacactcatgcagagctttttcgttatctttg

SEQ ID NO: 3255 - DNA, 9895 bp, Unknown
  16S sequences of unknown bacteria
gcgagcccggtgaaaccaccgagccccgagttctgccggagaacccgccgcttctcttccttccattccgaaattgtcgcgtcctcgggaagctcagcgtcaaccgccgctccgatcgtcttcggtctcgtgtagatatggtcgtatccggcgagcgcggcacagccgcagagagaagcgatgatgaacccgaacccgacgttcttcgtacacataccgtaataaaggcatatcgtgcagaccgatccgccgataacagcgagaggtataagtctcagccttttcagcatacaaaccgaaaaaacggcgcacaatataaagagcaggacggcaaaagcgacgaagacgcactcgttctcaggcattccgagccttctaagcggatactcgtagctgataaccctctcgctcattcccggatagccgagcgagtcgagtctccggaaaaaggcgttcggcagagccagcgccagataatatgccttttctgcggcgcgttcggtcatgagagccgtcgccgctccgatgaccgcgatcagtccgcacccggcggcgaaggtgatccttccgagccccatgacggagaacaccagcgtgaacagcgcgctgattccgaaaagcgtcataaccaatgtgaatccgttccccagcgccagcgcgtcgcagatgaacagagcgaacccgaacgtgcacatgaatacaagcagggcgcgcgatatatatccgaccgcgtaccatccgccgggacaggtctgtctctcgggcagaatgagcgcgaagcggttcgatgtggtattcaagcgtatacctcgttccggatgagacggaagttccgccgcgcgcatccggacgcgcgggaacataaagattccggtgatctgacatcaggacgctgcgcctgtgcgcctcggctctttcacggctgtgtcttctgcgatagatccggcgcgatcacgctttttcgccgccgagcggccgggggtcagacgcattaccgcggatatcctcgcggcgtggtcggcgacattttccgccgcctcgtcgtctgtcacgtaaagcgattcgtcgacgcagagtatgagctctgatgagccgcccccgccatgctgcccggacgagacagtcatgaagtcgtccgcgtccgacgtcccgagacaggaggtcaccattatgacatttgacgagtcgatatcgggtatcagcgaggcgagcatctttatctgcccgtcgaaccttgtcagcggagccgtcgcgaacaccctgaacgcgttctcgaagtccgccgcgccggtcatcagcgcggtccgcggacagggctcgccgccgcgctcctcgagccatacgagcgagacagtgttcccggctctgagctcgcgtttcgccgccgcgagggcgttctcgacaacgagatcggagttcagctgatccatgatgtcgtcgtatccggcgagcggagtcagaagcggctccggggagggcttgtccggctgtttcttcgcctcttcggcgagcttccggcagttctcatagcgcgtgccgagatcgcagataatatagacacggtcaccgttcgagtgcgcgaagtccttgactatcatgtcctccgacttgctcgacagcttccagtgtatatgcttgaggctgtctcccttgacataggcacgcaggtcggtcggctcggtatcgtcgtttccggtgcgggtcaccgaagtgtcggtcacgttctcgctgtccgagaagccccgctccggcggcagctcgaagcgtctcggcatgacgaaaagccttgtcacgaacctgttgtcgagacgtatccgcgccatccgaaaaaagtcgtacacccacatatccgacagtcctatctcatacaccccgcggaaagcgaactccgcttccctctcaacctcgcagccggagagcggcgcgagcgaaagtcccaccgactcctcggtacagcgcgctcccctctcgtccggaacggtcagcagcgcctcgatgaacgggaaaggcaccggtccgtcattcgacgttatgaacctgtatgagacgggtgtattcttctccgccgtctcggcgccgcacctgaccgacacacgtatcgacagcacagccgcgatgaactgcaagacgatcccgatcggcatcagcaggacgaagacgaatatcatgtgcgagaccggctgcttcagcgtctgtgcgaaaatgagcgtcacgacgagcagcaccggatatatccacgcccgcgccgtcagagagagctttccgcgccgcttcccggtcttcaccggcttttgcacactcttccggttcttatccggctttttcacgtcatctttctcccttgaacggcaccggcaccgacttcaggacgtcctcgagcaccgcggcgcaggtcaccccgccgagctgagcctcctgcttcagtatgatcctgtgcccgatcgccgctcggaagatatccgagatgtcctccggaacgacataattcctgccgtgcatgaacgcgtaagcctgcgagagccttttcagcgccagagaggcgcgcgggctggcgccgagcgagaccgacctgtgctctctcgtcgccgagacaagcagcacgagatatttatagagactcctgtctatgcgtacatcagtcgtaagagcgcgcaggaagctgatgagcttcgccccggcgacagggctcacggcgtcaagtgggtcagaggcggtgcgctcctcgactatgcgcatctcctcgtccggcgtcgggtagcccattgacagcttcatgctgaaccggtcgagctgagcctccggcagaggatatgtaccgacgaatccggacgggttctgcgtcgcgatgaccataaacgggtccggaaggatgtaggtctttccgtcgacggtgactcttccctcctccatcgcctcgaggagcgcggactgcgtcttcggggacgcacggtttatctcgtccgccagcagtatattggtcatgacgagtcccggagtgaactcgaagttctcctcccggcggttgtatatgttgaagccggttatatccgacgccgtgacgtccggcgtgaactgcgcgcggcggaaatcgagcccggcggccttcgcgagagccgcggcgagggtcgtctttccgacgccgggaacgtcctcgatcagaacgtgtccgccggcgagcatcgccgttatcagaagcagcacttcgcggtgcttgccgacgatgaccttctcgatctcggacgtgagccttgacgccgcggcgtaagccttttccgcgtcgacgtcgtcgaacctgaccgacgtgaatttcggggtctggcgcggctccgcgcgtgtttccttttcggtttctgtctgattcatctttagttatgtcctttcgctgcacaacgtactgtttctatagttataaacctattatatcatttctgccagagagatgcaacaataacgccgaaatttaataattattttacgaaacattctgccatggtacagcggcgcgttccgcggggatccgaattagaaattatgcccatcacacgccgaactttttccggattttatttgaatattggtcttgacaattttaccgaagcgtgttagaatattgacaaacggatttttttcgtcgctcacagattttaaggagtaatacgatatgagtagatcttatgatatagtaataatcggggcgggcataaccggctcgatgctggcgatgaagctgtcgaagtacaagctgggtatcgccgtcgtcgaggcgacctgcgacctcgctgggggcgcgacgagagcgaactcggcgatagtccacgcgggcttcgacgccctgcccggaacgctcaaggcaaagctcaacgcgcgcggctgcgcggagcttcccgagatcgcgagacggctcgacgtcccgtataagaacaacacctcactcgtcgccgctttcggtgaggaggatgagaaaacgctgcacgagctgctcgaacgcggtctcgcgaacggcgttcccggactcgagataataggaaaggatcgtcttcacgagcttgagccgaatatctcccctgacgcgacagcggcgctgctcgctcccacggcgggcatcgtgtgtccgtatgagctgaacatggcgtgcgccgagaacgcggctgtcaacggcgcggatttcttcttcgatttcaaagtcgatcatataacgagcggcgaggacggcataacagtcagcgccggagaccgctccgtgaccgcgaagttcgccgtgaactgtgccggggtccactccgacgagatcgctaaaatggtcgagccggactacccgataagcatagtcccgcgccgcggcgagtacatgatcctcgacaaggcggagggaaagacctgttccgcgacaatcttcaccgtcccgagcaaggagggcaagggcatcctcgtcaccccgacggtcgacggcaacctgctcgtcggtccgaacgctcacgaggtcgagcgcgatgacacctcgacgacagctcccggactcgcggagatacagtccgcggcgagacgcatcgttccgggaataaatctgcgcgccgtgataacctccttcgccggagtgcgtccgacgccgtccgacggggatttccacatcgagccgtccgccgctctgccgaactttctcaatatggtcggcatcgagtcgcccggactcgcgtcttctcccgccgtcgcgtcatacgcgatcgacatgctcacgaagatgggacttgagcttaccgcgcgcgacgactacaatcctttccgcaccgcgaacggccatatgcgccgcccgttcagggagctctccgacgatgagaagctctcgctcgcgaaggagattcccgagtacggcagaataatctgccgctgcgagacaatcaccgagggcgacatcctcgcggcgatacaccgtccgctcggcgcgcgcaccatagatatggtcaagctgcgcacgagagccggaatggggcgctgtcagggcggattctgctcgccgagggtcgcggagatcctgtcgcgcgagctgaacatcccgctcgacgagataacgaagcgcggcggaaacagcctgcttctctgcggaaaaaccaaatgactgacggattgaggagaaaataaaatggaattcaatatggaaaagaaactcgccgtcataggcggaggccccgcgggtctcgccgcggcgatagaagcgtgccggaacggcgtcgcgccggacgacatactgataatcgagcgcgaccgtgagctcggcggcatactcaaccagtgcatccacgccggattcggacttcatatgttcggcgaggagctgagcggacccgaatactccggccgcttcatcgaggaagtcaaggagatgggtataggatacgtcaccgacagcatggtgctttcggtctccgacgaccgcgtcgtcacgttcgtgtccccgtcgctcggcttcatccgcatgaaggcaggtgcggtggtactctgcaccggctgccgtgagagaacccgcggtgcgctcaacatccccggaacacgtccggcgggcgtatataccgcgggaaccgcgcagagattcgtcaacatcgagggctatatgcccggaaagagggtcgtcatcctcggctccggagacatcggactgataatggcgcgccgcatgacgctcgagggcgcgaaggtccttagagtctgcgagctgatgccctattccggcggactcgcgagaaacatcgcgcagtgtctgaacgacttcgacataccgctctatctctcgcacacggtcacggagatccgcggaaaagagcgcgtcgagggcgtgacgataagcgaggtcgacgagaaccgccgcccgatccccggcaccgaggaatacatcgagtgcgacacgctcctcctgtcggtcggtctgatcccggagaacgagctcgcgaaatccgccgggataaagctcgaccgcgtgaccggcggcgctgaggtcgacgagaacaacgagacgacgatcccgggcgtcttcgcctgcggaaacgcgctccacgtccatgacctcgtcgatttcgtcacccgcgaagcgtacaacgccggtaaatccgccgcgaagtacctcgagaacggcgccgtaaccccgaccggcttcataacctgccgcgccgtcgacggcgtcagatacaccgtccctcagagagtcggccgctatgagagcatcccgcaggagctcaagttctttttccgcgtcgacaacaactacaagaacgtgaagattcagctcgtctgcggcgacacagtcgtgaagtcagtatccaagcgctcagtcgcgcccggagagatggagtccctgactctgaacgcgaccgagtgcgagaagctcttcaccgccggaagcgacgagctgcgcgtaagactcgagaagccggaaacgaaatgaggtgcccgaaatgaatgaagcaacaaaaaaaactctgacctgcattgtctgcccgatgggctgccagatagaggtgaccctcgaccacgacggaaaggtgaccggaatcaccggaaacacctgcaagcgcggatacgactacgcgcagaacgagttcacgaacccgacccgcaccctcacctcgacggtcaggataaagtccgaaaccgacaagttgctcccggtccgtaccgcgaaaccgataccgaagccgaaactcttcgaggcgatgaaggtcataaacgagatcgacgtcacggcgcctgtaaagatcggcgacgttataagatccgatttcatggaacccggcgtcgacctcatcgcagcgaaaactattgaaaaataaattctgataaaaacggagctgacgaaaattcagctccgtttttctgttctgcacaaaatccatgcctgagctttgtcggaatcgccggttcaaacccgattttccgacacggtcaatagaaatacttgatgttcgagtgtgacttctcccagaaatatccgagcgacgccatctccgactcggtgagacagaaatatttgtaggaaatcttgcccttcttgtccgggacgggatcgtcgtgcgtcgtgtcgacgaaatatatctgaccgttgacgagcaccatattccacgagtgccgcacgttgctgttcggcgcgtacccgccgatcgcgaccgagcgcagacccgcgcgttcggctaaaaggttgaacgccgcggaatacccctggcagaccgccttcttgtcgataagaactccgtaagcgagcctcgtctcatacggaagtgtgtccgcgagatagttcgcgtagtcgtactcacagttcaggattatataatcgtgtatagccttgaccttctcgagcccggtcatcgtcggtgtgattatcgacgaaatgaccttgtccgccttctcctcagccttcctgtggagcttcttcagctcgcttatgtcgcggtcgtactgaagggttatcgtgtacgcgtcgagcgccttcgaatacttcacggatattccggtgctgtagaaatactcaagatttatcgtgttggagtggacgtaataatccgaccataccgacagaggtatcgtcgtcctgaacgtgaattccgacatgaactcgcggttcaggatatagaacaggtcgatgagctcaaactcactgccaaggacattattcgatgcgttctcaagcacggcgtcacgtctgaacgcgtaaggatccttagcgtattcgatgagccgcaccgtcatcgacgccgcctcgctccggctcgcgtttccggcgccgtcataaacacgtccgccgttcccgtccggatagccgcgaaggagatactcattgtacgcggtgctcgcgtacatatccgatatgtcggtgaacgggtcgtctatgcgcgccggctcgattccgagggcgagaacgatcatcttcgtcatcgccgaacgggttatgggcttatccgggctgaacccgcctgttagatcctcatccgtgattatcccgcgctcgtacgccgccgtgatgtatccggacgcccagctctccgggaacattgcccttgccccttcggctccgccgaccgcggcgacgatcatctttataaactcggcgttcgtgacatcaagctccggacggaagcttccgtccgggtatccgttgagtattccgtccgagacgagcgtcatgacgtcgtcatagaaccagtcgtccgacgcgacatccggaaaaacaatcttcctcgccggaggcgcgtaggatatccccggcgccggagcttctgtcgcctctccggacccgtcggcgctcaccgtcgctccgagcgcctgaacaagtatgagcgccgacaggagcgccgccgccgctgatatgatattatgtttcattttagcaaaattcatttcgttctgatttgcctcaaacatttacgttcccgccctgcgggtccatctgttgtttttttcattaaagccctctgttccgggtttttgcttaattctattgtatcacatatcatccgtcttgtcaaccgtttctccatgtgtcgaaataaattaacatttgccctccgcgagggcgcttttttaatatttcgtgaccgacttgtgctattatgttaacgcgataaatttgtgacttatgtataatttttttcacaaaaaaccagcaatgcgacgaatcaacattttttgccgtaaaagcttgaaatccggcgtgatttgtgatattatgtatatataacttttattttcatgaaaggcggcgcgccgcgtacggcccgtcgtaaatggtattaccatggataagatcagaatcggtataataggaacaggcggaatcgcccacgcgcacgcgcgcgcttacaagaacttcgcggacgtcgaggttgtcgccggagcggacataatccccggcaaggcgagaaaatttctcgacgagttcggctggaccgacgccgcggcttacgagacctgtgagaagctctgcgcgagagacgacatcgacgccgtctctgtctgcacctacaactcgcagcacgcagcctgcgcagtccccgcgctcatgtccggcaagcacgtcctgctcgaaaagccgatggctataacccttgaacagggtctcgaaatcatggcggcggagaaggcgtccggaaagatcgtctcgataggcttccagccaagatacggcgctaacttccagaaggtcaagaacataatcgcgtccggcgcgctcggagacgtctactacgtccagaccggaggcggacgccgccgcggtatccccggcagcaccttcatcgagaaggacaaggcgggcgtcggcgctctggcggacatcggatgctacgcgctcgatttcgctcttaactcgataggctatccgaagccgctcaccgtttccgccgtcgcttacgactatttcggaaagaacccgaagtactatccggaggctgaccgcttctcggttgacgatttctcgtccgcattcatccgtcttgagggcggcataactcttgatttccgtatgtcgtgggctatgcatatggacacgaccggcgacttcatcttcctcggcaaggacgccggactcaaggtgcgtcagcctaactaccagctgtggggcggcgcgtgggacggcaccgtcggtgatatcacgctgtatcatgatttcatgggctcgccgacaagcactccggtgccgatcgagacccaggaaaagggcaacctcttcgaggcgaaggtccgcgcgttcgtcgacgccgtgaagaccggcggtaaggctcctattccaacgagccagatcatatataaccaggcgatcatcgacggcataatccgctccgcagcctgcggccacgaagttgaggtaaatctgtgatacatccggaatactacgcgctgctcgggaaatacgagg

SEQ ID NO: 3256 - DNA, 3111 bp, Unknown
  16S sequences of unknown bacteria
cccgccgctgcagacgatggcggacacacagtctgcgcaggatgaccggtcgcttccggtgcgctcgtatctcgtctatgcggccgtgctgctcatctgggcagccttgttctggcagctggtctggaaacatcgtttccgccgctgacaaatgcgttgcagttcatgcccgtcaatgatatgataaggactagaatagatggagatcatcatggaggtatcataatcagatgaaacaatacgatgtgatcattgtcggggctggcccggcgggtatgagcgctgccgtttacgcggccagagcggagctggacacgctgatgctggatgcgaaagatccgggaggacagatcctcaacaccaacgaggtccagaattatatcggcatcggcgcagtgagcggatctgcgctcggttatcggatgtttgagcatacgcagcagctgaacgtcccgtttgcgcggcgcgaggtcgtccgcatcgagccgggagagccgatgcaccgcatctgggtaaagggagaggaagcgccttacgagaccaggagcatcatcctcgcggtcggcacgacccccaaggtgctgcatgtggaaaacgaagagaaattttaccgcaacggcatcagctggtgcgtgatctgcgatggggcgcaatatgtgggcaaagatgtcgtcgtgatcggcggaggcaattcaggcgtcaaggaatcgctgttcatggccaatatcgcttcgtcgctgacgatgctgacgaaatacgacctgaccgcggatgaagcggcgatccggcagctgaagaagaagcccaatgtcaccatcatgacttatcaggatatcctcggcttcgtcggggatgatcggctgagcggcgtgcgcagcctggatgtaaagagcggcaaggagcagatcatcccgtgcgcaggagtgttcgaatacatcggactggatccgcatacggccttcctgaaggatctgggcatccttgaggaacatggctatgtcgtggtcaatgccagcatggagaccgccatccccggcatttacggcgcgggggactgcaatgtcaaagatctgcgtcaggtggtcacggcctgcagcgacggcgccatcgccgcgcagaatgcagcgcactatctgcgcaaaaaaggcatatcgtgaacgaagcgtccgcaagggcgctttttcgcgcgccgttcccgcatttttcgctttacttctcatgccgaaaatggtataatcctgaaacgagcaggactgtctgctccttgcttctgagcgattcggaagccattagaccaagaggaggtgtacagaatgaagaaatacgagatcatgtacatcgtgaacgcatccctggatgatgccgcacgtcagaacgtcatggaaagactgcacgggatcatcaccagccacgaaggcagcatcgacaagatcgatgagtggggagtgaaagagttcgcgtatgagatcgaccacatgaaaaaagggtactatgttgtcatcaatgtcactgcaaacaacgagggaatccaggaattccagcgtctggcgcgcatcaacaacaacatcgtgcgtttcatggtagtgaagacacagggtgaagaataaacgaacgaaggaggcggaacgatgatcaacagagtcgtactggtgggtcgcctgacccgcgatccggaactgcgcaagaccaattccggcgcatcggtcgtttctttcacggttgcctgcgaccgcagattcaagacgcagggacagccggatgctgatttcatcagctgcgtcgcctggaacaaggtggcggatctgatggcgcagtatctgcacaagggctcgctggtgggggtcgaaggccggatccagacgagaaattacgacgatgccaacgggcgtcgcgtttatgtgacggaggtcgtggcggagagcgtgcagttcttggaacccaagagcgcatcggcgaaccgcgatccgcagccttatggacagccttcctatcagtctgcgccgggatatgcttccggagcgcagaattacggaagtcctgccggaggctatcaggcggatgtcaacacgaattccttcgccaatgattttgattccaatgactcgctcgacatcgcgagcgatgatctaccgttttaagaaaggagagcattatggcattcaagaaacagcgcatgggccgcaagaaggtctgctacttcacgaagaataaaattgaatacatcgactataaggatgttgaactgctgaagcgtttcatcagcgccaatggaaagatcattcctagacgtgtgaccggaacgcgcgcaaagtatcagagaatgctggcgactgcgatcaagcgcgcacgtcagatggctctgctgccttacgtagccgaataattcatcagtctccttgccgggagacttttcttttaggtgaaaggaggggtgtggatggcttctcggacacgcatgctctgtgaaggcgccatgatgtgcgcgctcacggcgctgctgctgctcatcaaccgcgtggcgggcggaatgatcgagacggcctttccctggctgctcgtctttccgctgctcgtgtactgcgcgcgctatggcgtccgcaccgcgctcatctgctgtgtgagcatcctgctgctttcgctgatgctctgcacctttaccacgctgttctatgtgttttccgcttcgctttgtgcgctggcttatggcagcggggtgcgaaggggcgccgcaaaccgcagcctgctgctgcgcaccgggctcatcagctttctttccaacctgctgagcatggtggtgctcgcctcgctgtttggctatgatcccgcagaggaggcgaagctgctcatcgagctgctgcatgcggatccgtcgatggtcatgcgctcagcgctcgtgctggcggtgttcaccgtcgtcgtctgctcactgttgcagacgctgtgcatccatttcggcgcactgctgctgcttgggcggatcgggatacctacacatccggtgaaggctgcgcatgagatcagcggaccgcgctggctcggggtgacgatcctgatgatttgggttctatattcctggggaattgtgataaaattagatacaggatcgcggct

SEQ ID NO: 3257 - DNA, 3935 bp, Unknown
  16S sequences of unknown bacteria
ttagggtactacggtagcgttgctaacgccgttgagggactgcgaaaaacattatgcagggaattaaccgccgagaagaatatggagctgtacgaggctgtcagagcatttaaagggatagcggaagaattggagaaagcaacggagggattaagatgagcagactaagcgatatattaggagttaaagagggacaggagtttaggtttaatggcgatagtcgatatagaataataggagatagaaaagaagtatatataaatgataagtggtataggtcatgtagtgaagaaaatttatgtagaatgatagcccacccggaactcattagaataatacccgaaaaaataactcttaccgaacagcagataaccgccataaagggaaagattgcggaaggaacgccgtgggctacaaaggacaaagataataataaacaaacttggttctttgaaactaaacctgaacattctgatagcggtattttcgaaccaaacgaagttgggcatattgttagtgtcatcaatactcacctttataatttcatcacctttgaaaacagtcctatatatctacctgatttgataaaggagtgagggaaatgacaccagaggaagcaataacaatacttaaaatagcaaaaacggaagttgaatggaactacccgttagattatgcgattgcaatagatacggctatagaagcactggaaaagcagataccgaagacgccgatattaaaaagtggagtatccataactcatacaaacaagggagataagccccacgaatggcgaaatgtgcaatggcaagactgggtatgccccgagtgtggatggtttgttgggcagcggtataatgctacacaatgtaaaccacacgaccagagaaaatgtaattgttgtaacgagtgcggacaggctatagattggagtgaagaagaatgactttcaatgactttatagaaatcttaatatatgctatagcccttgaggtgattataacaaacgtgcactctctgattaaggattacaagcttagactggacgagagagcgatattaaatcactacggcataacggaacaggtcgcaaagctgaaagaagagtgccgagaactgatagaagcctcggacgggtacataaacggaacggacagcaaggcgcattttctggaagagatagcggatgtactggttatgattgaacagatgataatgcacttcaacgcacaggacaaggttgacgagataaagaggtttaaggtcaaaaggcagctggggagaatggagagggaagaagataatgtatagaattttgtgggttttatattggttatgcgtataaacacacaaaaaactatagaggggtgatgtagttggaaaagaaaacgccaaaggagtatttaaggcagttgaggactgccgaaataaagatagaacagaaagaagaagaactggaaaggctgaaatcttcactggaaagcatatcgacaggtacggacagcgagagggtgcagacaacgccgaaggacaggctatcggaggaaataacgagaatagttgatttggaaaaagaaataaattcggatttgggcgcgctgttaatgcttaggaataagattataaacgagatacagagcatggataatcctgtatacataaatatactgtataagagatatgtgcagtataagagtcttgaagagatagcggtggagatgaattattcgtatacacgattgagacacctacacggcagagcgttacagggatttaaaaagaaatatatcgacaataaataagccccgattaaggggcttttatctttcccaattgcgtttttcaatgtccttgattgctttagctccgggatattctttttttaatgcttcaaatctttttattgctttgtgccgttctgtacctggataggtttcttgtattatgtcttggttgcctatctccgggaagattttggaaagagtaatataatagaataccttgccataataatctttatggcgtattaatgacagctctaaagagtattggctggaagatagcttttgtatatgctcaaacatcttttttctatgatcctcaacttgcttaatggcagcttgcagcctatctaaatccttgactaaataatcgtcatacttttttaattgttgtgggttcgtttcatttttatacggccacagataaatatttaacggtatatattcttctctcattttgtttacctcttttctgccttcgtaacctccgtggcgggtattttttaagctataaataaatctgatgtactgtatgtttctgaaccgtatttgcttcttatatattccattgatttagcgcctttgcttcttacggcgtctttctcgcttctccagtaccacatttttttcttgcttgcccaacggcatttgatagcttttaattcttctttatgctcttttgtttctccgcttatccatatccatgaaccgcaaagctcaacatttaatccctttaatctgacaaggtgtgatattatttctatgaactcgttaggacattcatttataggtcttgtatttccgctttcgtctgctgctgctttttcgttatgtgctttttttaattcattaaatcgctcggcatattcattattgatttttgccattgtttcaacgtttccgccgttgtcagggtggttcttctggcaaagtttacgatataattttttaagttcttcgattgaattaatatttttaaagtatgtcatttttattcgctccttttgttaatcgttgtcacctgttatctatgtacccattatataatatatgtacccattatacaataggcgaaacatacaaatatgtacccattatattgttgaatatgcactatgtacccattataaaaagtgtgatataataattacgaaagtaggtgattgtatgccggtatctgaagcacagcaaaaagcagtcaataaatatttacggaatacttttgatgatattaaaactagagtaccaaaaggaaaaagggaagaatataaaactaaggcaaaggaattagggtataatagttttaacaattttgttataatggcaatagaagaaaaaatagaaagagaggtgttaaaaagtgagcaataaagaaaaaataatagaacttctggaaagtgtaccggattataaaatgggatatgtcttagcttatgttcagggtataacagcagatgaggaagcagatgatattttttgcgaaagaatggtagaaaattatgaaaacgcaccggacgaggacaaggaagacataccgcttgaagattgcttgaaagaatgggggcttgtttgatgtataagattatcatcaaaaagaaagccaagaaatttattgataagctaccgaaaaatgagcggttgagagttgcaatagcaatagaacagctcccgaatggcgaggatataaaaaagttaaaaggggagaaaaacaaaggtttattacgtttgcgtgttggagattatagaattatatacagtgttgacaacggaaaattgattgtatatgtaattgatgccggaaaccgtggcgaaatttataataaatattgagcggtaattatttgcggaggcttgccactccgcttttttatttacagagtaaagagttgatatattgtataaaatgtgataatataataatatgggtatctataaataaaaaatatatctattataagataaaataacccctatataatccttataaacaggaaaaataataaaagttagcacacaatagcacatttatctgtggtataatagtagagtaaaaagttatgaaaaatactcttctcctaaacatgactgaataagcagtatgtaaaaagaaaaggtcggttaataccgaccttaatctttcacctcttcatcagg

SEQ ID NO: 3258 - DNA, 32759 bp, Unknown
  16S sequences of unknown bacteria
ccgccgttgccgccgcaagaggcggcgcgcgcgtcctgcttaccgaaaaaacggtaaacctgggcggacttgccacgacgggacttataaaccttttcgttccgctttgcaacggcaggggcaagcagataatcaccggcatggcggaggaatttttgcggctttctgtaaaatacggctttgacactttgcccaaggagtggaaatcgggtccgcccgacaaacccacgcttgaaagatacgtcacgcgtttttccgcccccgtgttttcgcttgcgcttagcgagcttatggtaaaagaagacgtggacgtattgttcgacacggtggtttcccagcccgtcgttaccaaaaaaggaattatcgacggcgtcataaccgagtcgaagtcgggacgcgaatattactcggcaaagacggtgatagacgtgacgggcgacgcggacttattgttccgcgcgggcgtacccacggtgcagggcagaaattactttacatactcctgttttgcgcaaagtctggactcgatgcggcgcgcaatcgacgcggacgacgtatctaaagtcacggaatgggtctgtggcggcaacgccacgctttacggcgaacatcagcgcgagggagaaaggctttacgaaggaacttccaacaccgacgttacagaatatatgcttaaaaaccagctgctcgcgcttgaaaaaatcaaaaccaaagacagaaaacgctttgacgtcgttacccttccctatatgccgcaattccgcaccacgcgcagaatagacggcgattacacgcttaaggaaagcgacaagtaccgccactttgacgactcggtgggtgcgatatgcgactttgaccgcagggactttttgtacgaagtgcctttccgcacgcttgtcaacggtaaatggaaaaacgtaatcaccgcgggaagatgcgccgcgggcgaaggctacgcctgggacgtattgcgcgtgattccgcccgcaatcctcacgggtcaggcggcgggaacggctgcggcattaagcgtaaaacacaatgtgcccgtgacggaaaccgacatcgcgcttttacagaaaacgctggaaaaagagggcgtaaccattcacttcgacgacgcgcttgtgcccgaaaatcagaagggcggcgaaaaggcggacatagggcacttttaaaataagacgggcggcggttaaataaaaacggtacgctaaatttgcgaaaaataaaagtacgcgattcttcagctattgggcaggcagtttttttcgcaaagtattttacctgtgctgaaggattatcggaaatttcacgttgcgccttattctttttttgacagtctgctttaaccttacgcgcaatattgacgtttaacgtttaatcagccttactcgcggacagacaacgcccgcgcaaaaaaaggctgcactcccccctttaaattcagaacagccaccgtaaaacaaactataaaaaaagctgtattttgttcccgattgaggaaaaggcgacatgaacatagaaaaaatagacaaaaattttttacagaacaatcgttccgccgaaagcgaaatgaccgaatatgaaattccgcaatcgccctttaagctttacggaatcttttacgacgacaacgaaaaacgttttatgcgcataccgaaaaccgttgctgaaaacacgagcgaaggctgcgtatttctcatgcggcacacctccggaggaagacttaagttttccaccgactcggacacgataagcataaaagctacttacgactatattttcgaaatgtcgcatatgccgaaaacgggccgtgcgggtttttcgcttatcgacgaaaccgacggctgcgagctggtctatactttccgacccgagtcggcaaacggcaacggcttttgcgcctccgctgcggcgataaaaaaaggcgtcagaaattacatactgtactttccgctttacaacgacgtcggaagccttacaatagtgctgaaaaaaggcagtttcctgggcgaaggcaaaccctacgaaaacgttaaacccgtgctttactacggctcttccattactcagggcggctgcgcgtcccgtcccgacaactgctatcccgcgcttgtttccaagtggacgaacaccgacttcataaatatgggtcttagcggaaacgccaaagccgaacccgcgttcagcgaatatctgtcctctataccgtgcagcgttttcgtatgtgactacgaccacaacgcgccggacaaagcccaccttgaaaaaactcatcttcctctttaccttacgttccgcgcggcaaatccctccgttcccgtactttttttgacgaagcccgacccggagcgcgacaaagaggctttacaaagaaaacgcgtaatccgcgacacctacctttacgcacgcgaacacggcgacgaaaacgtctttttcattgacggatattcgcttttcggcaaagccgaccgcgagaactgcaccgtggacggcacccaccccaacgacctgggattttacagaatggctaaagcggtaatgaagataatcgcacctttactgaaaagttgaatttccgtgttttatgccgcgtttatctaaaaccgcgccgaagccgaccttgatgaattttactttaatcatacagcggtttaaggaaaaacaattctgatttaatacaaaaggcacggaggtttaatccttttaagaattgcacgttgctcagactttctttataaactcatttgccgcttgccctgcacctatacattcttttatacaacaaaagccgctcctgttaagacgggaacggcttttacgttgttttttgcaattatgacgaattttcgtcacacaggttttaataattccaaagtataaactcttaaatcaagcgggcgaattaacagatattacttcagatatttgcaggctgccatggcggcaacggctccgtcggctgcggcggtggtaagctggcgcacggattttgtgcggcagtcgcccgcgacgaacactccttccgtgtcagtcaagcagtcctcgcccgcgacgacgtatccgtccttatcgagcgtcacaagatttttaaacgcttcgttatcgggctgctgaccgatggcgacgaaacacgcttttacgggaagcacgagtttttcgcccgtttcgcggttgtcgaacacgcaggcggaaagctcttctcctccctcgaaagcggtgagattgacgttttttatccaggtgacgttttctttttccaaaagcgcgtcggaaagcgccttatcgccgaaaaacctgtccatccaggtgcagacgtacacttttttgcaatagttgcttaaaagcagcgagtactgaagcgcggtgttggcgtcgcccacaagcgcgacctcctcgcccgaatagaaagccccgtcacacactgcgcagtagcttacgccgttgccggtaaactcctcttctcccttaactcccacttttttgtgctttgcgcccgtggctatgataaccgcgcgcgcctcgtataagccgtactcggctttgacgcggaaaattccgtcggcggttttttcaacgttttgtactttatcaagctcgaaatctgcgccaagcgcggtgatctgctcgaacagattgtccgccagttcgctgcccgaaatcgcctttacggacggaaaattttccactctcggagagttggcgatttgtccgcccacgcagtcgccttccagcaccaatacggatttaccgtttcttaaagcgtaaagcgcggcggtcatacccgccgtgcctgcgcctatcactataatatcagtcatatcagccctttacgttttcgatgtaacccttgattttgcttgcgttgtcgtagcggtcaaagccgttgccgttgggcaccagcatggtgggcgccttcttaacgccgtacttaagcgtttcttccttgttgtcctcggcgtcgacgacgaggtaatcgatacccgctttgtccagcatcatcttgctcatcttgcagttggggcaggttttggtggtgaaaagaatgggtttttgcacattctcctccccgcagccgcaaatatccgcactcacttcgccgtaagtctttttctcgtgtttaagcttgctggttgcaacgtcgtaaaccttgcggtccttgaactcctgactcttgccgtcgttccagttctgaacgggacggtagtagcccgttattctgctgtaaacctcggcgggcttgccgcagacggggcaggtaaactgctcgcccgtaagataaccgtggtcgcggcagatagagtacgtgggcgacaacgtgtaataaggaagcgtatagttttccgcaatctttttgacaagctgagcggcggctttccacgacggcagtttttcgcccaggaaagcgtggaaaacggtacccgaagtataaagcgtctgcagtccgtcctgaatgtccagcgcgtcgaagatgtccgacgtgtaacccacgggaagatgcgagctgttggtgtagtaaggagtgtcgccctcttttgcggcggtcttgatgtcgggataacgctttacgtcgtgctttgcaagacggtaggaagtggactcggcgggagtggcctcgaggttatagaggtcgccgtactgctcctgataatcgctgaggcggtcgcgcatatgggtaagcacgcgctttgtgaactcctgcgtttcgggagaagtcatgtccttgcctatccacttggcgttgaggcccgcctcgttcatgcccacaaggccgatagtggagaaatggttttcaagcgtaccgaggtaacgcttggtgtacggataaagtccctcgtccatgagcttggtgatgatggtgcgttttaccttaagcgagcgcgcggagatatccatcatcttgtcaagacgcttcatgaaatcctcttcgttttccgaaaggtacgcgatacggggcatattgatggtgactacgcccaccgaacccgtgctttcgccactgccgaagaagccgcccgatttctttctgagctctcttaaatcaagtcttaatctgcagcacatactgcggatgtcgctgggctccatgtcggagttgatgtagttggaaaagtaaggcgtgccgtacttactggtcatttcaaacagaagcctgttgttttcggtgtccgaccagtcgaaatcgcgcgtaatcgaatacgtgggaatgggatattggaagccgcggccggtggcgtcgccctcaatcataatctcgataaacgccttgttgaccatgtccatttcctttttgcagtcgccgtaggtaaagtccatctccttgccgcccactatcgcgggaagattggcaaggtcgttgggtaccgtccagtcaagcgttatgttggagaaaggcgcctgagtgccccagcgcgaaggagtgtttacgccgtagataaaggactcgatgcactttttgacgtcgcggtaggaaagattgtcaacctttacgaaaggcgcaaggtacgtatcgaaggaagaaaacgcctgcgcgcccgcccattcgttctgcattatgcccaaaaagttgaccatctggttgcaaagggtcgcaaggtgacttgcgggcgaagacgtaatcttaccggggattccgcccaggccctcttttataagctgcttaaggctccagcccgcgcagtagcccgtaagcatggaaaggtcatggatatgaatatccgcgtttctgtgcgcgttggctatttcctcgtcgtaaatctcgctaagccagtaattcgccgtaatcgcgcccgagttggacagaataagtccgcccacggaataagtgacggtggaattttcctttacgcgccagtcggtaaccttgacgtagctgtccacaagctccttatagtcgagaatcgtggacttcatgttgcggattttttcgcggttcttgcggtaaagaatgtacgctttggcaacgtcgccgtaacccgcttttataagcacgttttccacgctgtcctgaatgtcttccaccgcaatctgcgaatctttaatcttcggctcgaaatccgcggtaaccttaagcgcaagcaaatcgataatgtcgggattgtattgcttgttttgcgcttcaaacgcttttgttatggcggcgcttatcttggaaatatcgaaatccgtaattttgccgtctcttttgaccactttgtacatatttcttccctccgtcgagtttttttttgaaagagtgttcttattatagcaccttatattgtgcttgtcaacaaaaagcaacaagatattgtggttatttttaaaattaagcacaatatcttgtattcataattattataaaataacttttactgcaaaaaaagcggaaaaaaacgcgattttcgcgccgtcgtaacgtcccgaaacggcaaaatgcgacaattttcgcgtaaatctttttttaagaaaagctgtttacagaaagaattttttcgcagtcttttacatatggtatttttgccctaagcttaaaaaaaagcgagaaaaaaacgcgattttcgcgccgtcgtaacgtcccgaaacggcaaaatgcgacaattttcgcgtaaatctttttttaagaaaagctgtttacagaaagaattttttcgcagtcttttatatatggtatttttgccctaagcttaaaaaaaagcgagaaaataaacctttcctcgctttgcgcccgcgtaaagtactgacttttaaacgcttaaagcaaactttatttactctttattgcaaatctatgaatttaacgtttattttcttaacgcgtttatggctttcccactcggtgggtatagggtcaggtttactcccttctactcggtaggtatgggtcaggtttactccctccatctcggtaggtatagggtcaagcttacactcttccacttggtaggtatagtggcaggtttatactctaccactcggtgggtataggtttaggtgtactctcttctactcggtaagtatagggtcaagcttacactcttccacttggtaggtatagtggcaggtttatactctaccactcggtaggtatgggtcaggtttactccctccatctcggtgggtataggtttaagtttacaccctccctctcgatgggtataggttcaggtttactctcttctactcggtaagtataggggcaggtttatactctaccactcggtggtatagggtcaagtttactctttactacttggtgatatagggtcaagtttacaccctgcctctcggtggtatagggtcaagtttatactctaccactcggtgagtatagggtcaagtttacaccctgcctctcggtgggtatagggtcaagtttacaccctgcctctcggtgggtatagggtcaagtttactctctaccactcggtaagtatagggtcaagtttacaccctgcctctcggtgggtatagggtcaagtttactctctaccactcggtgaaattaaagaataagaagtttattattccctaagcttatctgacctgagcggatggaatgtatttttttatttcgtcaagaaattcctgcatatccgcgtccgaatatgcggaaacgtcggcgccgcccacaaggtcacccgaatccttgaatttctgcaggtaatatttttgcgcgcctttaagccagacgcctatttccgtaaagcaggacttgtcgaaaaatggttttactacggtggtgcggaattcgtaaggcacttcgcctttcattagaacagccgcgcttttttccaccgcttttacatcggggttttttactccagtagtcaaagcataaagccgcggacagttttttatgtccatggcgacgtaatccactcttttttggcggataagcgcctcgagtctgtcggggaaagttccgttagtgtccagtttgacgcagtagcccatatccttgattttgtcgataaattcctctatcccctgctgtaaaagcggttctccgcctgtgataaccacgccgtcaagaatgcccttgcgctttttaagcagtgaaaaaacctgcgcttcctccgcaagcggatattcgtcagtgcgagtgacgagcgaagcgttatggcaataaggacatcttaaattacagccgttggtaaacacgatacaagccgttttgtcgggataatcgagtagcgtaagattttgcagcccgccgattttcatttttttgtttctccccaaaaactttataatccgaaagcgtaaatcgcgtcggctttcgatacattatacagccgacggcgcggtaagtcaaacgaaaaaaataaaccttaaaatttctccgctcgccgactttgcttaaaatcgccgcaatgattttttttcttttaatttacctaacccttacggaaaaaacacttcgctttttgcatagatgattttttgtgaattcacatcaaaagtgctgcacttttttgttttgaggatttaaaaaaaagtgctgcacttttttaaacttataaaaaacaacgatgctgtaaattcagaaaaaacctgattttacttaaagcgccgcgaaaaattttttgattcaagcttgcatcaaacggcattccctataatttaaaaccacaaacaaaaaccttaattaaaacagcgtttatttaaatgcgttttaggtttaaattcgggcaaaaaccctatgcctcgttcttagaaaaaagcatttaatatttcatcgccagcaaaagaaaaactccccttctgtaaagaggagttttattaagcccgttgatttgacttacgatattactcgtaaagtctggaaagaggaagttcggcaaaaatgctttcgatagcgcgggcaaaaagcggcgccacggtgatttcctcgattttggaaattttcttttccttaggaagttctatcgtattaagcatatacacttttttgatgacggactgttcgagtctttcgattgcgggaccgcttaacacggcgtgagtgcagcagacgtaaacttctttggctccgcccacctcgataagcgctttcgcaccctgagtaatggtgccggcggtatcaatcatgtcgtcgacaagcaggcaggttttgtcttcgacgtcgccgacaatgttcatgacttccatgacgttggctttgggacggcgcttgtccacaatcgcaagcgggcagtcaagcttgtttgccattgcgcgcgcacgggcgaccgagcccacgtcgggcgaaacgacgataaggtcgtcgcgcttgacgaacgccttgttttttatgtagttgcaaagaaccgagcttcccagaaggttgtcgacgggagtgtcgaaaaatccctgaatctggggtgcgtgcaggtccatggtaagcacgcggtcggcgcctgcgctggtgatgaggtcggcgacgagcttggcggtaatcgggtctcttgcccttgccttgcggtcctgacgtgcgtaaccgaaatagggaattactgcggtaatacgtccggcgcttgcgcggcgcatcgcgtcgatcatgaccagaagttcgaccagattgtcgttgacgggcatggaagtggactgaattacgaatacgtcgcaacctcttacggtctcgtcgatctgaacgctggtttcgccgtcggaaaatttgccgactttaatcgcgcccagcggcatattaagctccttggctatttccgccgcaagcgcgggtgaaccgttgcccgcaaagagcttaatcttgttaccgtgtgctatcatgttgataatgcctccaaaaatatattgtgtttttaaagcttgtccgttttatcggacaaatttcttccttaagtgaaatcgcggcggtttactttttgccggcggtatacttgttgcccgtccagtcgggttttaccgtctgacgtgcgcgcgcaatcgcaagcgcccctgcaggaacaaaggcgttaatcaccgaccctgccgcaataaacgcgccgtcctctattttaacgggggcgattatcgtcgaggaagagcctataaacgcgttgtcgcccacgaccgtggtatgtttgtctttgccgtcgtagtttgcaaataccacgcccgcacccacgttgcagcctttgcctatgaccgcgttgcccgcgtaagtaagatgcgacagtttgctgccgtcgcctatcgtgcagctcttaagctccacaaagtcgcctattttgcacttttcgcctattacgttgtccgccctcaggtttgcgtaaggcccgaccgaggtgcctttgccgatatagcttctcaccgcgtgagaggactcgataaccgcgccctcgtccacgacgcagtcctctatgacgttgccgttgccgatgcgcgcgcccttctttatgcgggttttgcctttgattatgttgttgtgacctatcgtcacgccctcctcgattgcgacgtcgcaaccgatgaccgtgcccgtaaggtcctcgaaatgaacgccctggtccatgtgataatcgagtattcggtttttaagtatgtccgagataaggcccacctgcttgaaactgaaagcggtgataaaatcttcctcgtcgaagtaaaaagtattttcggtataaatcttttcggtgttaagcacgtatgcgcaattaaaaacgtatccgcgcgtcattttaagcacggtttttccgctgttgtacgcctcgtccacggcggcggctacggttttggcggtgataagcggagtgtccgaaaacagcaccactatatagtcgcaaccctgtttgacgtgcggacgcacaagcgcgggaagctccttatcgcgctcaaagtccgcaatgtccgtttccgcgtccgtaagggcaagcgaaacccattccagcatggatttgccgaaaacttcgatttttgacgtatcgcccattttgtcgtaatacgtctttaatataagaccgcagtattttttactcataccttacctattatatatccaaaatttaaaatttgtcaatcgctttcccgccataaccccggggcaatgtacaggaaaaaaattatttcttctttttttgcctcagctctttgaaaaatccgctgagtaaagccgcgcactcctcttccattactccgcctttgaccgccgcgcggtgattgaacctttcgtcgcacgcaaggttcatgacgctgccgcagcagccgaaacgacggtcgtacgcgccgaacaccaccctgtccacgcgcgaattcactatcgcgcccgcgcacatgacgcaaggctcaagcgtcacgtacagcgtacagcccgaaaggttgcgccgcttcagctttttgcccgccgccgccagcgcgcgtatctcggcatgagccgtagggtcgaagtcgcgctctctcacgttaaaggctttggatacgactttatttccgcaaaccacaatgcatcccacgggaacgtccccttttttcgccgctttttcgctaagcacgagacatttttccatgaaaaacaggtcaagcgcggcttcttcgctgttttcggcgttatcggggcgcggactttttcccgtattattcttttgcccgactttcttcccgtccttaaacgagccgacaccgtcctctctttttaaggcgcagtccgaattttgaccgccgccacaatgaaaaaagccatgctcagttagtttttcgtttaattcttccatttaatcgtcctttatgtttcgtttgttctttgaattttgtccgtgactttatcgcgcggcgtttttaatatcccgtcaaataaaacacaacctttgttttttaaagattcagggtgtttttgcgatttaaagctttcccgctttatgcgcttatttatgcgtccgcgcaagatactcgtttacgcgtagcggcaaatccttgtttctttcccactcgtcgtcgtcaagcgcgtcgtcggaaagaggatgagtcttttcgtcggaaacgatttccacggtaaaggcgggaattttcagtttttcgacgcaccagtccttgtatccgcccgcgcttaaggtaaagtcgcctttaatctcgtataacagcttttcgttgagaaaacgcgccatgttttcgtcgcgggttttgcgccggccgttttggtggaaataccagtaaagctccctgcccttggcgtgatagcttaccgtgcagtcgggcatgatttcaagcgtaaaatcccttaacgccgccgtttcccgcgcgcagaagggaaaaccgcccacataattttcgggcgcgggagtaaatacgtttttgcttccgcttgaccagcgcgcgtcgaagttgacgtttaaatccacggcgttaaggtttgccttccaaagcgaaaaattttcgctgccgccgtttgtttttttcaaaaacgcgcttcgttcttttccgaaaaaatccgagccgtgctcgatgagcagcgctccgtcgggattaagcatgggcacaaaatagaccgaaccgttttttactcctttacttaaggcgtaagccgcctggcgcatcacaagcgcaccggtcacgttttcgcgcgcgtgtatgccgcccgtgacaatagtctttattccgttacggcagcctatcctgacgtaagggataatcctgccgctttcgctgtaaccgatgctgcccgcctccgcgccgcatcttaacaaaaacgaaatatcgtcgttaaggcgtgaatatgtgtacaaatccgcttcctccttaaacgctttatatgcatacagaaggaaaaccgtgcgcgaaaaaccgtagctttcggggcttaaaaatcccgtaacgataaccgccgcaaaataaagtttataaagacaaacagttgcgccgattaaataacccgatgaagaaggtcgcaagcgccgaaaaaaagccgaatatttacttatggtaaggcgtctttgccagaatgttgaaagcgcggtaaatctgctcggttaaaataaggcgcatcagcatatgcggataagtcaccttcccgaagcttactttaaggtctgctttctcgcgaacgcgctcgtccactccctcgcttccgcctattatgaaagttatttcgggcacggtaagatacgccttgtccatgacggacgccagctgcgggctggaaagctcctttcctccgatatcggtaagcacgcaaaagccgttcattttctttaaaagcgcgtccgactcgcgcctgacggcgtccgcgccgcactcgtcggatatctcctccaccctgaactcgcagaaccgcgtcagtcttttggcgtattcggctattccgtcagaaataaatttctccttgattttacccacgcacaaaacggtaacttttttcatcacagaccccagaaaaacgtacagaaagtcgtgatgaaagtaatcaccagcgcaccgatgtagaaagcccagtcgcgcgcgacgggtttataaagaagcgtgtcttcaagcggcaaagcttcgccctcgagagactcgccctcggcttcgacgattttaacgccgttatcgttgtcccgattttttgcggcgtttttgttgcttaaacgcattatgaggataaaaatacccacgcctattcctattaccgccatccacaatatgacggcgacgataaaataatttgccagaaggtaattgaccgaatcgaaaaaatttcccagcggcagcgaataaacggacgcgaaatccagataaacgcttatggaattgttgagaaaatgcacgagtatcgcggggaaaatcgattttgtctttattaccagcgccgccatcagcataccgaacaaaaacgtgtaaaacacctgcgtcacgttctggtggaaaagcccgaacgccagcccgcagataactatcgtctgagcctcgttaaacgagccgcgcatggtggtaagaaagccgccgcggttggcaaactcctcgcacacgcccgggaaaacgccggtcagcactatgttaagaagcagcagccacaccgaaaaggttgcgggataggacgagccgcctgccggataattgaaccccagcatttccagaattaccgcccaaacggtggacacgcccatggtggcgataagacagcacactcccagcggcacgcaaagcagcatgacgcgaaagtcgggcttgcggacggaagaaagccgcatgacgcccgtaaaactctttttaagcgaaaacttgtaaatcagaaagggtattatcagcaaaaaaaccgcttgagtcgtcagcgtgaaaattacgtccgaaagcgtgggcgacagcttatccgaaataagcgaggagattattctcgcaatcgataggcccgccgcgacggagaacatcaccgcacctgccgcgcggaactgaatttgtcttttacgtaaaagttcttccattgccacatgtttccttttattgtttttcccgttaagggataagcttatccgtattatatttccgttaccctgccactcggccgaaacttaaagtcacataagccccgaaagattggcggcaaacacaaacagccacataaaaacgcatacgcccagcccaagacacagcagaatgacgtgagtttttttgccgagtatcgcgttgcggcgccgtccctccctgacgtcgttttcgtccagccgtccttcgagcaggaatttgcccgtatagacgttttcgcggcgttttttcttatttgtggaagtttcgcaagcagggccgcctgaatccaagccgctttcggttaaggagtcggctgaaaaaccgcccgacaccgcttgctttgacacgtcggctaaagaaaaaccgtctttaatagaattcgttgcgttatttccgtcttttgcgcaagacgcgtcgtttccgcttaaatcgttgtcgggacacaaagttacgttgtccctatttaccgtcatatcgggtttaacggcgcgatggacgcggaaatcgaaaataagcccttttcctgcgcctgacctgtttttaagcataagtctgcccaaaaagtaaacgaccgccgcacccgcgacaaacagcaatacggtggttaaaacgtccgccgcgcccaaagccgcgctttcttcacctgcggacgggataaactccaacagaacggcgaccaggttattgcccgaatgaagcaacatcgagggcagtaccgaacccgagcaaatcgcaaaccaggcgcacacgcagcccaagaaaaactgataaacggtttgttcgggattcatgtgcataagcgcaaaagccgcgcccgaaataagcaccgaggctgcgactccgtattttttgacaagaccgcctaaaagcgcgccgcggaaaacaagctcttcgcacaaaggcgcaaggataacggtgacgagtatacccagcgcaaggttgacgggagtttcgaagcttacggggtcggaaaacgaatagcccgctttttccagcagaagatagaaccattgcgcgggaagcgcgaaacacagtatgcacactacgcttgacaaaaacgccgaaagggcgataaaccattttacgggacgcacgggataagcaagagcgagtttctttttccttaccgaggaataaacggcgaggaaaaacaccgcctggataagcgccataagcacgaaattcagcgtcatgtaagcgttttcgcccaccgttgcggcagtggttactatcgtaagcactatcgagccgaaaagctgcaccagaaggttgaaaacaatcgccttgaagtagacggcggtgccgtcagccgctgtaagagtcctcaagataaagcgcgcctccttaaatgatttcgaaaagactgctcatccggtccgcgaacgcaatctccagctttacgtcccttccctcacagatgccttgagaagaaagaaaattcttacacgtttcgaaagcgagttcgggataattgttttcgcggcttaagtgcgcaagcacgacctgttttacgccgtgggcggcaagataagccacgcaacgggagcagtccgcattggacagatggcctttgtcggaaagaatacgttttttaagaaagggcgagtagtccgcattgtttttcaaaagcgtttcgtcgtgattgctttccagcaccacgaggtcgctgtcggacatgacgtccattaccttttgcgaaaccttgcccgtatcggttgcgacggtaatttttttgccgccgcacagaaagccgtaccctacgcaaggcacgtcgtgactgactttaaacgggcttacggtgacgtcgccgataaaaaagtcgccgtcgacggaaataagcctgttgcggaccttgcccgttttttgccataccgacccaagacagtccgcatggcagtaaacctccgcgtcggggtgacgcgcgcagaacgcgtccaatccgctgacgtggtcgtggtgtgcgtgcgtaataagcaccttgacgttatccgcagtttcgtttaaggcgcgcaaggatttttccaccctgcttgccgtaagccccaaatccaccagaattttgaccgaaccgcttgaaacaaatatacaattacccgtgctgccgctgccgaacacgcaaactttaagactcataatcaacgagtattatactatacgcgcgcaaaattggcaaactatttcgcggcggttgcgataattgcttttttatggtagaataatcgcgaagtaccatcaactttacttaaggtgaaaaaaacatgaaatcttacggttacgatacgatagcggaagcacttggcggacttatacgcgaaaagctttgcgtggtcgaagaggaagcgcttgcttttacccgagccgcgcttaaaaaggaaacgtgccctgccgccgcatgggcgcttgaaaccattgtcgaaaacgccgatatcgcgcgcgaaaaacgctttttcgcctgccaggactgcggagtggcggtagtttttgcttacgtcggaagagacgcacggcttgattgcgaccttaccgaggcgattaacgagggcgtaaggcgcggttaccgcgacgccagaaagtcggtggcgcatccccttacgcgccttaacacgggcgacaacactcccgccgtgatttacaccgaaatcgttaatggcgacggactggtcattgaatggatggctaagggcgcgggcagcgaaaatatgtccgccgtgtatatgcttaccccctccaaaggcgaggacggaatagtggcaagcgccgtggactgcgtaaaaaaagcgggcgcaaacccctgtccgcccgtaattctgggcataggcgtgggcggaacgatggacaaagcggcggttttatccaaaaaggctttgatgcgaaagacgggaaccccttcccccgacccgcaagtcgcaaagcttgaaaagcggattctggacgcggtcaacgcgcttaagacaggcgcgcaaggcttgtcgggcgacaccaccgcgcttgccgtgcacatcgaaactttccccactcatatcggaatgctgcccgttgcgataacccttcagtgccacagcgtaaggcacggcaaaatcatcctttgataaacttttattgcgctttaagcgtatttatttatcgtcggtcatccgtcttttcggataatcagccgcgacagcctttttaaatagtgtttactttcgtcaattttttgtttttgaatgcggtaaaaccgccctgccatacgggtaaaaccgcggcttgaaacgcggattttttccgccgattaatcaaaggatatcccttttaaaagcggcaaattttaatctgtttacataaatttaacatacaaaaagagaggctttaaaaaatgtcggattcggttaaaaaaattactctgcccctttcggaagacgcgctagactcgctgacagccggggacagaattcttctttcgggcgaaatttacacgctgcgcgacgcgggacacaaacggcttaccttaagcataaaggcaggcaagccggattgggacacaagcggaaaagccatatattactgcggacccacccccgccgccgagggcgaaattataggctcgtgcgggcccaccacttccgcgcgcatggatgactacgcgccctttctgattgaaaagggacttaaagtgatgataggcaaaggaaagcgtaacgaaaaagtcgtcgaagccatgaaaacttacggcgccgtgtacctcatagccgtgggcggagccggcgcgctttacaaagcctgcgtcacgaaaaacgaacccgttttgtacgaggacctcgggtgcgaagccatgagaaaactcaccgtaaaggatatgccgcttatggtgggaatagaccgcaaaggaaattcggttttgaactgattttacgttgtccgtttgactttgtgaaatacataaacgcgattgatttttgcgcttaagcgacagtcttttgcggatttataaaaattgattcttttcgtcttccccgcgcaaataaaaaaaatcgttaccgaccgataatcaaattgcgttttacgggataaaaacaatactttttctgtttaaaataaaagcttgtccgcgacagaaacaatataggaccgcttgcgttttaaaactgttttcccgcggtttttacttgtcgcttattccctttcgctcagctttccccccgacacatatcacaataccgttgcgcgcgaaaatactatcacttcaaagaacgccgaatcggcttgattaaactccttaaagatactcttaccgcggttttttacttgaaatttgactgtattttccctgaaaaatttttcttaaaagcgcataagaaaatgccgccgccttacaaaagggcaacggcatttttatttttcgtttgatttactctgctactttacttgaaagacgtttaacttatgttttaaaccgttacacaagtctgaaagaaacgctgtccgcacactcgctgtcgccgccgataaacactttaaagtcgcctttttcggctttctttacaaggtcgggaccgtaaaacgccagcatatcctcggttatttcaaagttgacttctttttcttcgcccggattaagcgcgacttttttaaagcccttaagctcctttacggggcgcacggcagaaccgtacaaatcgcggatatacagctggacggtttcctcgcccgcgaccgcgccttcgtttttgaccttgacggaagcggttaaactgccgccgctttcaagcacgtctgcgcttaacttaaggcaggagtagccgaaagaggtgtaacttaagccgtagccgaacggataaagcggtttattgggtccgtcgatgtagcttgaagtgtacgcgacgcgcacgtcgtcgtttctgcgcggacggccggtgttgtaatggttgtaataaatcgggcactgtcccgtttttgcggggaaactcatggtaagtttacccgacggcacggcttttccgaacagcaggtttgccgccgccgaaccgccttcggtgccgggctgccatacctcgagtatagcgggcgccgtttcgctgagtcttttaatcgcaagcgggcggcccgagaacagcagtaccgcggtgtttttgttgactttaagcacttcgtccagcagtttgtactgcacggcaggaagctcaaggtcgagtttgctgttgccttcaccgctgtcgccctggggctctccgagagtaaggattaccgcgtccgcgccttttgccgcctttaccgccgcggctattccgctttcgtcggtggcggtaagctctccgttcacgccctcagcgtattcgacttcggcattctccagcaggtttttaacgccctcgaaaacggtaacggtctgctcgtgcttgccgtagcagcgccagtttccgagtatcgcgcccgtatttgcaaacggtccgattaccgcaacttttttaacagaggtattaaaaggcaaaactccgtcgtttttgagaagaaccgcacatttttccgccgctttacgcgcaaggtcgcggtgttccttgcagcagtccagtttgtccgcaagcgtcttgtccgcgtcctgatacgggtcggagaacattccctttttctttttgagtttaagcacgcgctccacggctttgtcgatttgctttaagcttactttaccctctttgataagcgactccatattgccaatgtaagtcgcgctcatcatctcgatatcgttgccggcgttaatggcaaggcaggcggcgtcatgctcgttttccgccacgccgtgagtaatcatctcgcggaaagagttgtagtcgcttatgaccacgccgccgaacttccattcctttctgagtattccgtccacaagttttttgttggatgccgcgggtactccgtccaaaatgttgaacgacgtcatcaccatttcgacgcctgcgtccacagccgccttatacgcgggaagataatactcgcgcagcgttctttcgctcatgtccacggtgttgtaatccctgcccgcttccgccgcgccgtaagccgcgtaatgcttgacgcacgccgcaactttgccttttttaaggtcgccctggaatccttcaaccgccgcgcgcgaatacagacagttaaggtaagggtcctcgcccgtagactccatgactctgccccagcgtgcgtcgcgcgcaaggtccgccatgggcgcaaacgtgacgtttattccctcggcggcggcttcctttgccgccatggcgcagcagtctttgacaagctgcgggtcgaaagacgccgacaagcccaaaggcacggggtaaatggtgcggcagccgtgaacaacgtccatcatgaacatcatgggtattttattggggtcgtcgtcaaggtgctgcttctgaagcgctttgacgctgtcggggccctgaaaattaagcacggaacccgtccccttaaggttgtccgtatttagtcccaattcgcctaaaggtcccgttgcctcggtccccgcgtttttatcgaaaaagcccgcgtttaactgcgtaagctgctccagcttttctttaagcgtcattttttcgattaatttttttatgttcataaaccattgccctccgcgtaatatcaaaagcgattcccgcttgtttttacgcattaaattatataacattatgccttttgttgcaaactaaaaaaacgcttttttgcacgctttttcgggtagatatatttttgaaaaaattttatatacttttaagacaaaaaactttttatcgcaagaaaatcatcagccgtcaaaacgcggctcccgtttttttaacctcttaatagcgaagtttctgttcctgtcttccgttttttttcttatctgtacttttacgcgtttacataggacttacgcaaaagctgtctaaaaaagtacggggccgattatatcaacgcgcaaaaatcatattaatttacaataagcggcattaaatttatccgccgggcaggacaaattattcttccgcaacgaactcagcttcttttaattcatttaacttttttaaatcttaagcggtgatttatgccattaacttctgcttttcttgtgttatcggttctttatataatttaagcgcacgtttcatgcctgtaagtccgttttacaatgatgagtttaatttgagtcttagcttgcgttttacaaaaatctaaggctcaataaaatcaaacgtggttctgtttccgatatggtttttaagataaatatccgtaaaaatcagccccagagttcgatttgacccgttgatgccgccaccgcgcctgcctttatccctttttccgcctgttctttacgggaaataaggccgccgatgattacggccctgttttcgcgcaggaatttttcaataagctcgggtacaagaccgggcataagctccaccgcgtcgggcgaaagcttatcggcgtttgcgattgccgagttaagcccctgagtgtctatcagaaacacgcggaacacggtgtaaaggcctttggattttgcgcatttgactatgttgggacgggtggtgattatgccgtcgggacggattttttccgcgatgaacttaacggctgcctcgtctttgccgatgccctccataaggtcgacgtgaagaagaatctttttaccgctcgcgtgggcgcgccttaccgtttcctccgcgcttaaaaggtcgcttttcaaaagaaaaatcacgcccgcattgcttgaaagcgcaacggaaaaggactcctcgtccttgaccgccgcgattattccgctttttttcatttctgccgtaatgctcaattttatctcccgtaatacgcaggtcgcagcctgacgcaacttatatttcgctttacgaaagccacaaaaacaacagcgccgccaccaaagcgaaggacagtaaaattaccgccagtcgcggcagcataaccgccatgtaagcgcgtatcattgcgcggcgctcctttttggtgacgctgattttatcggggtctttttgcgcttcccgtcggtttttcctgtcggaaaacatgattttgcgatacgagggaagctcgtccccgttcatgggcgcaatcgtccgtccgtcgtcccaatcgtttttgttttccgtcttcttagccataaggatattataccgcattttatctttccgcgcaagaatttttttgtacgaaaacgcgcggcatggcgacgcgaacagtgttttaagataagatttcgcttgtttttgttgtgattttgtcaaaaaagcgacgcagtccgcgctttttatacgattttttgccgaacaaccgaatttaccgtatttttatgccgtaaaaaaatgcttattgtgcggcttataaaacggcaatttcctaaaacgcaacggcactgatttacggcgtaaaatcggataaaaaattaaacggaacataaggtcaaaaaaaagcgcggtgtattgcgtccgcgccttaatttatatgataccgaagagattaatcaagcaaaagcggtaaaatcaaccgataaaacatgcaaagccttaaatcaagcaactttcagaagcaatcgtatttttttaaagcgattaatcgggaaaaacgaaaaaaaccaatcagaagtttatgaaaacaatttttgcgttttcgccgcgatttaatccgtatagaactttttggtcctgtcaagtacttttatttcggtttctttatcgaaaagataaattccctcggggtcgacggcgatttccactttgtcgccgcgtctgacgtttgtgcttttgtcggtaaccaccgtagcggaacagctttcgtccgcgtcaaacgtcgcgtaaactattttttcgtacccaagctcctcaacgaggtccacgacggcagaataacagtacttgtcgccctctcttttaagccgcaaaccgtattcgggtctgaagcctgcgtaaacgcgctctttgggtcttaccagcctgcgaatctgcagcggcgaaagcggcaatttctgtcctaaaagagtgactgccccgtccgcaaaagtcgcttcgtaaacgttcatgggcggcgtgcctatgaactgggcgacaaacaggtttgcgggattttcatacagataagtgggttcgcctgcctgctgcatcacaccgtcgcgcattaccgccaccaccgtacccatggtcatcgcctccacctggtcgtgagtgacgtatataaaggttttgcctattctcttgtgaagcgcatgaatttcggtacgcatggaaacgcgcagtttagcgtcaaggttggaaagaggctcgtcaaacaaaaagactttgggctttcttaccatgctgcgccccagcgccaccctttggcgttgtccgcccgaaagcgcgcgcggctttctttccagaagctcgtcaagatccagcacctgcgccgcctccagcacgcgctcctctatcatcatggcgggcatacgcttaagctttaacccgaaagccatgttgtcgtaaaccgtcttgtgcggataaagcgcatagttttggaaaaccatggcgatgtcgcggtctttagggtgaattttattcatcagcttgttgccgaaatacaactcgcccgcggtaatatcctcaagtcccgcgaccatacgcaaaagcgtgcttttgccgcaacccgaaggcccgaccagcaccagaaagtcgctgtcggacacctgaagattgaagtttgacacggctttgacgccgccgtcgtaaatttttgtgatgtctttgaacaagatgccttccatcgggcaactcctttgctttattattcaagcagtgtttttttttgcggcttttttacgcaaaatacaattttttcttaatgaaaactgaccgctagtcgttgtaacgtttgatttccaactcgtctatcgcacgcgcaattctttcgtcgttgaagactttccagacaaagccgtccttaaggtttgccgcctgcaccagagtaatacccttatcgatgcagattacgttttcggcataccagtcgatttcggtgctgaacgcgtcgcaaagtccgtatttaccggtagctttttgcaaagaacaataataatccagcgctttaagcgcgtcatcgggacagaacggcagactgcccagcgcccccgcgggaggcaccacccccagacttaaagcggctttgccgtcgccgccgcaagggggattgccttgattgcccacgtatccgcgcggagtgtcgcacgccgtaagtccccagcaattttcgttgtaagtgggatgatttaccgcgtcgtctatgcaaaacgcctttgccgcgcgggtggcattgacggcatttataaaccagtcggtgccgtttttatccctgcgccccttaaagtcgataaacgcctgcgaatactgatgcgtgaacaaagacccgttgtaagtgtaaatatattctatgtccttatatttgccgtaagtgcgggtgaaagcgtagtacgcctcctttcccacgtgatacgattgcgaagccgccgccagaacgtacatcataagctgttcggcgtattcgtcccactttgcgaaaaatccgcgtttttcgtcgtaagccatgtggaaaatattgtcgggacgcaggaactcgctccactcgacggattgttcgagtttatcggcggatttacggatttcccctccgaaataattgcctgccgtatgcacgcccagcaataaaatcgcggtatcgatggtggaaacctcgcacctgaagggctcgcccgtattcatgttgtaaaaatgtctgtaaaaccctttgaatctgtccagtttttccagcgttttaaaagtgcgtcttaccctttcttccgctgcggaaaaggaaacgtatccgtactccgcgccgatgcagtaagccgcaagtccgaaccctactcccgcaatggacgccatgtcggggtgacccggccacctgtcgcgtataagaccgtagccgttttcgcttaaagaacattcgttgtaaaaaaagtcgaaacaagcgcgcatttcgcgttcgagattagtcatgtaaaaaagcctccgttaaacctctgtaaagcccagtctgtccattgccttccggatgtttttgttttgcatgaaatatttccaaacgatgccgtcgtttatataatttcccgccataagcacggttatgcccttgtctatgccgataacgtcctccgcgtaccagttgcggtttgcaaggttaaacgcgtcgcgcagtccgtatcttgagcgcaaatcgtcaaattcgtagtaatggcgcagcgcggcgatgctgtattcgggagtgaaaactatactgcctaaagccccagcgggagcaatggtgccctcgctctgacgcgactcgtttttgtaacccgaaggctgaccgccgagatatccgttgtatcccgaaggactgtcgcacgcggtaagtccccagctgttttcgccgtaggtagcgtatttgtccgcgttgtcgatgcagtactgacgtgcggcaatgctggcgtttatggaattttcaaaccagtttacgccgttttcgtccactttatcgcggaaatccacaaacgcgtgagagaactgataagtgaaaatcgacccgaagtaagaataaatgaaaggctcgccgtcgccgtaagtgcctttgttgcgcgcaaaatcatacatcatacgcgggtcaatcctgtactcggatttgggtgcgcccgcgcccagaacgtacattataagctgctccgcgtaatagtcccatgcccccgaaaacgtgtccgtcgtggcgttgtagcccatgtagaactgtttgcttccgttggcgttggtctttgtaaagaaattccagtccacgcgctcgtaaagctcgttggcaaggcttttgacattgccgccgaaaaactcgcccgcggtaatcgcgccgcccaagaaaagcgcggtgtcgattacgctgacttcactgcccgacgagggggtcgcggtgctcatgctgtaaaagtgatagtaaaagcccgaataattctttaagtttttaaatgtcttaagggtgccttcggcgcggcttctggccacatcctcctccacccacgcgtttttcaccgcaatgggcaaagccgcaagcgcaaaccctacgcttgccacgctgctttggtcgggagaaccgggatacctgtcgcgcacaaggccgtatccgtcgcccgaggactgaacctgctcccataagaatctgaagctcttttccgcctcgtaggtgacaaggtcgcggtcgctcatggcggaaggtccttccgcaggcatggaaggattattgggcactatttcctctttgggcgtgcatcccagcacgaacgccaaagaaaagataacggcaaaaaccagacatactattctttttttcataaaatactcctgtaaataatatttcttccgccttaaaaatttttttctgaccccgtcgtattgcttaggcagtgccgtttttaaggaaatttttataagcaaattcgtttttttgtatgacgcgacttctcgcttcagcgtaaatccgtttttacggacttttgccctgaacgtaacggtcgccaaggcggaacaagctaaaaatcaagacccgacggcttattcgcccgtgatacccgctttatccacgctttccacaaactgcttctgagcgatgaaatagataataagcaggggcagaatacttaaaaaagtgcccgccatgtaaatcgcttcgttgatggtcttgcccgactcgccggagcttgcggcgccgctgttcatgtcgttgaacgactgcaggaaagactcgagcgcaagcggcagagtctggaacttggagcccagaaacagcgccgtaagcgtagtttcgttgaagtaccagacgaaagagaacaaaaacgtcagaaggtaaccgctgaaagccaaaggtacggcgatgaacacgaaaattcttatgattcccgcgccgtctatttttgccgcctcctccaaagacgcgggcaaagagcggaagaactggaagaaaatcaggatgaaaatcgcgcttttaagtccctgtccgaacaaagcgggcaccaaaaacgccagaatgttatccatacccacgttggtgtacatcagcatctgcggtatcatggtcgcctgcggcggaattatgaaagtagccagcaccaaagcgagaatgactccctttccgggaacgcggaagcgcgccagtccgtagcctataagcgacgtggaaacgcactgcaggatagcgggcagcaccgcgataagcagacttcttcccagtgctttcatgtaattaagcacctgataagcaagcgtaaagtttcccatgtaaaaccactgcgtgggcaggtaatgcacaaagggattgactacgtcctcgggcgtcatgaaagcgtaactcaccatgtaaataagcggataaaggaatacgaagccgaatatcaccaaaaggacgtaaagcattattttgaaaagaatgcccattttccagcttgtgccaagaagcacggcctttccgcgaataatcaaggcgtcttttttctcgagaaactctgttttattcatcggcgagcctcctgttctttttctcatggcgtttaaacagcagtacgaacacgcccagcaccagaattatgaccacggtataaatccatgccagcgcggacgcgtaaccgtaacctgtttccacgttgttcatctccgcttttatcttgacgactatggggttaagcgagaacagcgactgagtgaccacggtgtagacgatgtttatgattataatggggttaagagcaggcagagtaagcttccagaaagtttcccatttgcctgcgccgtcgatgcgcgccgcctcgtacattgccttatccagttttttgagtcccgcaagataaatgagaatctgcacgcccgaaaaccagagtatcatgataaacgagtctatcagaaaggaaacggcgtccgcgaaaaccgaggggacgtactcgtaaagcacgcttgtgtcgaaaaactcggatacggtaagcgacgccacgccctggtcgacgaaattctgtatgacgggaccggaggtgatgataacgggcaggaagaaaatcgtcctgaaaattcccgttccctttatcttgttgttaagcataagcgcgattataagcgcgaccacgatgattatgggtacgtatataatcatttccgaaaagtattcgctcagcgcctccgccacaaagttgtcaagaacgaatgcgcggcggtaattttcccagccgagatactctgtaagaataccctcgcccgcggtgacgcgcacgttgttgaagctgaggtaaaaggtatagataagcggataaagcgtaaagacgcagaatcccacaatccacagcgaaacgaacgcaagtcccgtaagcatgcttctccgcttaagcgtcagtttgaattttttgtctgtagagttcataattcactctccgtaacaacgaaaccctgcggtttgaccgtctgtcccgcaaattcggcttcggcgtcgccgtgattgacggcaatgctgacgccgttgtcgtaaacgcaaactttcagcccgttatccgttgtgtaataatcgacgaacaatgcgcccttcacgcggcttaacgccgagtccacgcttttataggttgccaccgcctcgtcctttatgaggtcgaactgagaggaataaacccagcccgaaagcgtcctgttaagctcgtaagcgcttttctcggtaaagacgtacgcgggataaacgttgtattcgataagcgaaatcacatcgtcggacgacttgttgagattgacgtagccgctgtaaaacaccgtgtaacccgaaagcgccatctggataaacggcacgttgttaagcgctatcatgtactgagagccgctcatgggtgcattgacgaagtaatccgcgtatttatacagatattcgcttggtctttctatcgcaagcgggaaacttgccgattccgccatatcgcggtaatactgtatggtttgcgacctgcttacggtaagattgcccgtgctggagcttagcatatatcccagcgaatccagctgaataccgccgaagcctatatccgaaatctccttgaggtcgtccttgaaatattccgccgaagccttggggtgaagcaaaagaaaatcgtcgtcgttttccgtctgctgcttatagttgcgcacggacagaatctttttacccaggctcatggcaaggtctttctgcgaataagacgcgcccgctttggtgtaatcgccgttgtacgccttgagatagtcggttacggacatcagcagcacgttgttttccgcggcgtactttgaaagattttcgtaatccgctttactgccgctgcttcccacggggaaatgtttgggctgcgcgcccgtgactccgtttttgctgtaaccgataagtccgcttaccacggaggaaactcccgcgtcggcaagctctttaaacgcgctttgcacaaaggcggtatcggtggcgcagacggtctttattccgaagctgtcgtcatagttgtccgccatcagaaaatccgctttcatgggagcgcttccgccgcttgttctttcaggtaacattccgcgctcgataagactgtcgcggtatgccgccgccatgctgcccaaagtcgcctcttttagtatgtcgtatcggatttcggcgtcgaaagagttgcgctcctcctgaagcgcggtaacggtggtacctttgttgtccacgggcatataaaagctttcgcggtagataaacccgggataaacgaagttgtaatcggtggttataccgcttgcatacgcgcttatacggctgtattccgcgcccgaagtgattattcccgtaaagcccttgccttcgtcggcaagtccgaacacgggatagcccgcggtgacgggaggcgtgtcgccgtactgcgccattgtgaccacgcccgaagtgccgtaatcgtcgccgtagacgcgcgccgaatagggatttcttgccagggttttccgggtaaggtcgataaccgcgccgctgccgtcgggcaccagaataaagccgtcctgtcttattccgcgcgtggcgttcatgaaaggataaacgttgatgctgacaagcggatatttggcgactttgttttcggtaacggagtcgccggggattgaaacggtaagcccgtcgtcgtcaagcgatactttaagcgtaaatatcaaaccgatttcggtaacctttactcttgcggaaaaaccgtcggacgtggaacttaagtttatttccacgccggaaaagtctacaagcggcttgtaaattttttcgttggtgtaataaatcgtgacggcgctgtaagcggtcttttcccaggtggtattgagtccgttgtcgtattcctcggtgtcgggagcgatgttgtcgctttgaagcacggtttcgcccgtggctttatcggtgacgcgcacggcaagcgtttcctcgttgacggacaggtcatacagagtgctggcgctgcccgcctccgtaaacttggcgtccgacagataatcggcggttgctttctcgttaaaaggaagcggattaaacgccgcgacaagaataaacaccgcggcaagcacgataaccgctatcacggaaaatgtttttcttttactcattgaaacacctcccagatgacggactcccagaagccgaactgctgcatgacaagaaggtaaatgatgaccgcgaacagtaccaccatggcaaagcagaacgcggtaagcagcacgtttttgaccactccgccgaatttgtagtaatgcacctgatatatggatatcagaagcagcaacacgcaatagaaaacgataaagaagtttatgaactgcaggataaccagctcgttaagcgtgagtacgttggaaagaatgatgaaaaccggatagaacagaatgtagggcgtaaaggaatatatcgccgcgatgaacacgtgcgagaatttgcccgcgccctcggtgacggacgccacgaaatagttgcacacaactccgagaataagcggcagaagcatggttattatcgagccgaatacgtttacgttgtacaccactcccgtccagatgaagccttgacagaacactcccactattcccacaatgacgtaaagcgcataaagcaccagcgcggaagaaacggtaatgcggtttttgtatctcatctgctctatcgcgctgatggggtgacggataaagtaggtggagtaaagcacctggtcgacgattctgatattacggaatcttttaagcgcgcccgtaacgggttgaagcacggtcgtacgttttgctatctgcttcagcgcgacgacaaccacgataagggcgaatacggccacgaaaaaccacagaatgttttcctgcagccagacgtttcttatctgccagtacgcctcgctgtaacccgccctgtcttccgctatttcgaactgctgaagcgcgacggtgtaattttcgtgctttaagctggcgcgcgcaaggctgttgtatcccagaatgaagttggcgttgtccttaagcacttcgttccagatgggctccgcctcgaggtagtagccctcctggtaaagccccagtgccttatggactttaagatagaattccgtgggggcgtattttacgattgcgcccacggttttgtccagaacgtaaagattgtagcttgcgtccacttttatggcgaccggattgaccagccgtccgaagcggtcgagcgcgttgtcgccgccgaacgaaaacagcatctgacccgaatcggcatatatgacgatgttgccttcgctggtgacggaatacatattgtaatcgtcgtccacgtccatcgcccgcactttctggtcctcggcggtttcggtgatggacacgcccgaagtgttaagccttttaagcgcgccctgagtgtcgccgggggtgattgtgtacagcaatccgcggttgtcaattaccaaagacgagggcgacggcggagtcttggtaagaaactgctccttctgctcctctgagaaaaacaggttctgaagaatggtcttaagcgaagtgggcgtcttgtttgcgccgaggtaaccctggaattcgccgtcggaacttatgtgaatgacgccgttggggttaccctcgcccacgacgtacatgttaagcgcgtcgtccaccgctattttgacggggacgtaaggagtctgcgcgccgtacaggggcgacgtgggacgcgtgacttctcctaagagcgcgcccgcggcaaggtcgtatttgactatcgcgcttttgcccttgtccgcaacgtacagtacgtcctctttgatagctattccgtaaggcgaaacaaacgttccg

SEQ ID NO: 3259 - DNA, 27881 bp, Unknown
  16S sequences of unknown bacteria
ttctcctacattagggggctttttgtctattgtccgtttttactggtccagttcagtttctttccatggctttttctatttcccgggttttttcttttcctttttgggtgatactacccagtatgaaacatggagggaaaggagaaaaaccaatggaaaaatccctcacttcctctttggaaaaaaacatcaaactgtttcaggagatcttccagggggacagcaccatcatctgccgccggtttgtgtccgccgggaatttgcccttagagtgctgtattttttactgcgacggcatggtgaacaatcagatcatcaacgagaatatcctgcggcctgtcaccttgtgggagcgaaaccaggagagcactctggaagacaccctgaagacggtgctgcagatcaacgaagccaaacaaagccaggatgtgtcctccatggtgcgggatatgctctatggagacacccttttcctgtgtcagggaagcgatcgggccctgatcctcaacaccaaaggcttttccatgcgctccattgccgagccccaatcggaacaggtgctgcgggggcctcgggagggcttcaccgaaggcattttgatgaacatctccatgatccgccggaagatccgctccccccatctgaaattcgaattttcccaggtgggcgaagaaaccaaaaccactctttgcatctgctatgtggaaggggtggtggagccccgggttctggagcggctgcgcagccgtttgagcaaagtgaagatcgacggcgtgctggactccaactatgtgcaggaatttatccgggacagcccccgctctcccttcaaaacggtgggagggacagaaaaacccgatgtggtggccgcctgcctgctggagggccgggtggccgtgctggtggacggctccccggtggtgctgaccatgccctacatcttcatggagcagttccaatcgggagaggattactatgtgggctggcattttgccgccatctcccggctgattcgcctggccggctttctctttgccatctcggtggtgcccgcctatatcgccctgatcacctatcaccgggaaatgcttccggccccgctgctcttcagcatttccgccgcccgggaaggggtccctttccccactctactggagggaatcggccttctcatcgcctttgagatcctgcgggaggcgggggagcgcaccccggcgggcttcggccagaccctatccattgtgggaggccttgtgctgggccaggcggcagtggaagcccggttcatcagcgcccctatggtcatcgtggtggccttttccggcatcaccggcctgatgctcccccggctgaaaggtccggtgatctggtgccgcctggggctgatcttcctttcggcctggctggggctttacggcctgtttgtggggcttttgtggctgctcctccatttgtccaccctgcactcctttggggtgcctgtgctgcgggaggcagcgccaggaggccgtgggcaggaggactcctatttccgcaccccctggcaaaaaatgcgccgggccggccggttcattgcggaggaaaccaatgaagaataaagtttgtgctgtttttttgtccctggctctgctgtttgccggaggctgctgggactatcaggaactgaataccctgaccattatctcgggcatggccctggatgtaaacccccagggccagaccctgttcaccgccgagctggcccatgtggaaagcggccagaaagatgtggaaagccgtctggtggaaggagagggccccagctgcatggcagccagccaggcggcagcagggaataccgggcggcggctttatctgggccatacccagacggtggccgtcagcgccgagctggcccgcaatgggatggaacaggtgctggattatctcagccgccagcatgatatgcccttgtccctggccctggtggtctcccgggaagacacggcagccaagctgctggaaacgccccctgtcaccgaaatcctggcgggctatgaaattgccatgcgggcctcggaagagggccagcagggaccttatatgcccttttatcagttttacagcgaagtacaggaaaaaggcattgacccctatctgccggcggtggcagcgggggaggagggcacgctctcccagggagcggctcttttccaggagtcccgcctggtgggtttcctggatgaagaggagaccgacactttgctgatgctccggggcaaaaagccctcgggagccatcaccgttctccgttcccaggaggaaggggggaatgtgaccttcactttggacacctgccgcctgactctccacaccgctctgacgccccagggacaggtgcaggggacgctgtccctccgggccgaggtgatggtcagcgagctggagggggatcagcccttgctttcccaggaaggacgccgccagctggagagcttgtgcagcgcagaactgacccagcgcggacaggcgctgctgcaaaagctgcaaaaggaatttgcctgtgatcccctggggctggggctggacctgagccgcaggcagcccacagagtgggagcagatcaaagaccagtggcacacattcttctcccaggccgatctggacctttcggtacaggtgcaggtcaccggcaccggccggatgtatctgccggcggccagagcaaattaggaggcgctatggaagttttactgtcggtgctgttattctatctgtttttcgcctttctggaccggaatatctggaaaagaaaagggaaggcccccctttggtacggcctgttctggctggggaacctgggggccacgctggcagcagcctggggcgcccgtctgccttttcccgctcaacgggtggaggaattcctccgggctttgcctggactctggcggggggcaggcgcatgaaaaaagccactgtttccgggcgggggtatttctccctgctggtgctctccatgctgagtagcgtctccctcatcggcggggccagcgaaggaggaagggatacctggatcaccattttattggccgcccttctgtatctccctttgcttttctgcaccctgtccctgctccctggagagcacagtgtggaaggggtcttttcccggtgtgccggaaaggtgggtgggcggctgttctccctgttctacggcctgacggcctggtatctggccgccgtcaccaccggggtttttgtgttcttcctgtcggaaaccaccctgtgggccacgccccggcctgtgctggccctgatgatgggctgcaccctcttcttcatggcccgggccggctgcgccgctttgggacggaccggagaaatgttgctgcccattgtgatggcctttgtgctgctgtcggtgctagtcactctgccccagtgtgactttcgggctcttcttcccttgcaggaaaaaggacagaatctgtttcagggcacctttaccgccctgatcctttcttttgccgagtgctttttccccctggtggtggtgggcgtctgcctgacagaggaacggaaacggaaacggggagccatgggtgcggtgtttctcaccgccctcaccttgtgctcggtgttcatcaaaaacctggcggccctggattatcacgccgtttcttcctattactttccttcctttgccgtggccagcctggtgtctctgggttcctttttccagcggtttgagattttcgtggcggtgaattttctcttctgccagttctgcaaagcagggctttgcatcctctttgcccaaaaggccctggccccggtattttcctgccgggaaaagctgctgaccatgcccctgacgctgtcggccgtcaacctggccctgctgtttttcaccagcgaaatggagcttttcaccttcctggggctggaaaaatatatcctgaccccggctcttctcctttttccgccccttctggccctgggtcggttgtggcgcagccgccgccacgccgccttgcaaaagaagcggtgatgccctataataaaatgcaaatccggaagaaaaggggagaaaccatgacgctgcgccatttccgcatttttgccgcggtatgcaaagaaggcggggtcaccaaagcggccaaaagcctgtatctggcccagcctgcggtgagcctggcggtgcgggagctggaagaacactatggcgtgcgcctgtttgaccggatcggccgcaggctgtatctcacccaggccggcaaagagtttctccgctacaccgaccgaatcctggccctgtgcgatgaactggagaccggcgcccggcaatggggcgaccggtcccccttacatatcggcagcagcatgaccatcggcacgaagctgctgcccgctttggtgcaggacttccgccgccgctatccctcggtgaaagtgacggtggaaatccagaactccggagtcatcgaagaaaaactgctggaaaatgccatggatttcgccctgatcgaaagcgccccccgcagcggaaagctggcctgccgccgcttttccggcgaccggatggtggccgtctgttctcccaaagaccccctggccaaagagcagggagtcaccctggcccagctgatgaccaagcccctgcttttgcgggaaaagggcagcggcacccgggatctctttgacagcgtggcccgctcccacaacctgacggcagagcctatgtgggaaagcgtcaacacccaggccctcatcgaagcggtggccatggggctgggcgtttcggtgctgccctggcggctggtgcaggacagcgtggggcgggggcttttgcaggtggtgcctgtacaagacgccgtgttccgccgggatttcaacatcctctatcaccccgacaaataccagaccaagcccgcccgggattttctggccctgtgccaggaggccggagacgatctggaagaataaaaaaagaaaaaggacaggccatagcctgtcctttttgattaccgaacctggcccgaacccaggatcacatacttgtaggaagtcagctcccgcagacccatggggccccgggcatgaagcttctgggtggagatgccgatctccgcccccatgccgaactcgctgccatcggtgaagcgggtggatgcgttgatatagacagcggccgaatccacactgcgggcaaagcggcgggccgcttcttcattgcgggtgacgatgcactcgctgtgaccggtggaataacggcggatgtgggcgatggcctcatccagaccgtcgatcactttgcaggagagaatatagtcgttatattctgcggcgtaatcctccaaagtggccggggcaatgccggggagaatggctacagtgcgggggcttccccgccactctaccttgcattcatccagcttctgtttggcccggggcaaaaactcctctgccacatcctggtgcaccagcagactttcggcggcattgcacaccgaaggccgggaacacttggcgttgtagaggatctccaccgccatatccagatcggcgtccttgtccacataaatatggcagttgccggtaccggtttcgatcaccggcactttggcattttccaccaccgagcggatcagtcctgcgccgccccgggggatgagcacatcgatatacccccgcaggcccatcatctgctgggcggtctcccgggaggtgtcgtccaacaaaatgacacagtcggagcacagaccctcctgctccagggcgctgcgcatcactttggtcagctgggtattggagaagaaggcttccttgccgccccggagaaaagcggcgctgccggccttgaagcagagcacggcggagtccactgtcacattgggccgggcttcatagatgatgccgatgacccccatgggcaccgacaccttttcaatgaccatgccattggggcgatggatggtctccagcacattgccggtggggtcgggcagctgagccacctgacgggccccttccgccatgctgcgcacccggccctcgtccagccgcagccggtcgatcatagtgggacgcacgccgttttcctgggccgattccacatcccggacattggccgccaggatggcggggatattgtcttccagggcctgggcaatggccagcaaggcccggttcttttgttcggtatcataaagagccagctgccgggcggcttctttggcctgcttggccagctggtgcagatgatcggtcatacttgcaaaacctcctgagagatggattatttggcgggaaggaacagcgagcccaccggaatgccatccagcagatcataaagcaggttggggtcgctgccgttgatgatggccatggggatgccgtgggaggtggcgatcttggcggcctggatcttggtgctcatgccgccggtgcccagtcccgaaccggaaccgccggcaatgctctcaatgtggctgtcgatctgatgaatcaccgggatcaggggagccttgggatttttccggggatcttcggcatacaggccgtcgatatcggacaaaatgatcagcccatcggcgccggtgagcacggccaccatggccgacagggtatcgttgtcaccaaactccagctcttcggtggagacggtgtcgttttcattgacgatggggatggcccccatggaaaagagccgctcgaaggtgttgcgggcgttctgggcccggttctccacctccaccacatcccgggtcagcagcacctgggccactttgtggcttttttccagaaagagcttgtcataaagatacatcagctcgcactggcccacagcggcggcggcctgcttggagggggtgtctttgggacggcaggggagccccagcttggccactcccacgcccaccgctccggaggagaccagtaccacctcccggccggagttcttgatatcggaaagcaccttgcacagcccttcgaaccggcggatgttgatccgtccggtttcataagtcaatgtgctggtgccgatttttataacaatgcgtttggccctggacagcgtgttcaaaaaaagacctcccggcgcctttggcgcgatgattttatttcatcttactataccaaagaattgctgcttcgtcaaaggaaaatggcatcaaaaaggacggcccaaagccgcccttttttgtgcgtaaattcctgctatatcctgcgttttttcgccatatggatggccatgccttccagatcctccacagcctcggtgaccgcttccacataagtggggtgaggacggatgacggcggccagctgcttctgggaaaggccgttgacgatggcggtggccaactcgcccaccatatcggtggcccgggcgcacatcagctgcgctcccaccaaacggtctccttcctcgtcatagaccagcttgataaagccccgatcctgcaaggagatcatggatttgccgttggccagcatggaggccttgctggtcttgaccttcatcccctgctccttggcctgggcttctgtcaggcccaccgaagcaatctccgggttggtatagatgcagtcggggatcacatccaggcggatggagggttctttgcccagcatattctccacggccacaatgccctgggccgatgccacatgggccagctgcacaccggggatcacatcgccgatggcataaacattttcccggttggtgcggaaatgctcatccaccagaatggcgcccttttcgtcctgctccaccgaaaatcccgggccgaacaggtctttggtgttggggctgcgtccggcggccagcagcacgccgtcgccttccacgctcttatattcttccccgtccagataccagcattgcagcttgccttcggggctttgggtgatcttcttcagccgggccttgtggacaaattccacgccccgctttttcagcaccatggtcaggttctgggccagctccttgtccaccttgggcagaatccggtcccgggatgccatcagggttactttcttgccataggcgttatagagggaagcaaactccatgccgatgaccccggccccggccacaatcaggtggtcatacagggtatccatgctcagcagttcatcgctggtgatgactcccggcagatccatcccttccaccggcgggctggaaggcacgctgcctgtggcgatgaggatgcgctctgtgtgaagggtttccttttcgctcccatccaggggagaaaaggaaacggtgtgctcatccaggatggtgccggtgccccggagatgggcaatgccattgctcctaaacagctgttccacgccgccccgcagcttacccaccacttcttccttccgggcctggatcttggccgggtccagcgtcacatgctcggcatgcagacccagggtttcaaagttatgtaccgcttcgtggtagagctcggcggcatggagcatggatttggtggggatacagccccgattgaggcaggtgcctcccacatcccggttttcaatgacggcggtcttgagccccagctgagccgcccggatggcggccacatagcctcccggcccggcgccgatgaccaccagctgatattgttgatccatctggctttcctcccgttctcacaaagataaaagagggcgggggcctgtctgacctccgcccctgtgatgattttaaaagtcctccccttccagaagggagcaaagatcccggcccatctggccgtccatctcatagcccagttctcccgctttttgcggcaaaagaggccgtatggcctgcaaaagagccgcagaggagtaagggagcccgatgagggcctgctccagctgagggaaacattccgagtccatggcatcggagaaaatgcgggctttctccacccgtccgccgttgatcccaaggcagatcttcactccaccccaggggaaccggccggcgatctccttgtcaaaggggatctttttccccagccgccactggaaggaagcatatttttcctccagggcctccagggccttttggtccagatcctcttcccgcagcttttccacagggccgccgtagaccttctcaaaagccccttccagccgctgcttcatggtttccaccgtgatgtcccgggaaaactcccccaggtttgccacacggctgcgcaccgaacgcactcccttggactggagcttgtccggctgcacattgagatagcgacccatggcgctcatgtccacattgatgaggatggttccatggtggtaggcgttctgcccttttttataaaaggcgttgccggaaaacttccgtccctccaccagtatgtcattgcggcccgaccgttccacagtcagaccaaagctggcagccgcttcctctatcacctgggtctgccgggccacatcgtaatcggcccggggaacaaggaaggtgaagttcaggtttcccagatcgtggaacacggcacccccgccggagagacggcgggccagatgcccgccgtcttcttccaactctttcacccggcattcctgccaggcgttctgattttgtccgatgaccaccgtctgccggttctgccacagatacagagtgcagcattccggcggattgctttccatcaaaagctcttccagcgccaggttatgataggggtttacagaagcggtggtaatgagccgggtacgctggatcatttgtcaaaatgatagcagatcaccggcgtacgggcggccttcacctcgtcgggacggcgaatgacggttttcaccggcagctcgtgcatatgctccggattttcttccgccatggcatggatccgcttgagggcggccaccacttcgtccagagtggttttgctctcggtttcggtgggttccaccatcagatcttccggcacgatgagggggaagtacatggtggggggatggatgccctcgtccagcatggccttggcgatgtcggtggcggtgacgcccttttccttgtgcatcttatccagggtgatgataaactcatgcatgcaatggcccttggtggcgatgtcataggtgtccgacagctggtgcatcatatagttggcgttgagcaccgcattgcgggaggcctcggggatgcccttctggcccagagtgagcacataggtaagggcccggaccaccaccaggaagttgccataaaaggccttcatccggccgatggactgaggcagatcgtagtccatggtgtacccattctccccggccaccgcatgaggcttgggcaggtagggggccagcagcttcttgcagcctacggcgccgctgcccggtccgccgcctccatggggggtggagaaggttttgtgcaggttgagatgcaccacatcaaagcccatatcgccggggcgtacctgacccatgatggcgttgaggttggcgccgtcataatagcaaaggccgccggcgtccttgatgatcttggtgatctccagaatgtttttatcgaaaatacccagggtgttggggttggtcagcatcaggccggcggtgtcttcgcccaccacttcccgcagcttatccaggtcgatgccgccttctgcattggacggcacattgacacaggtgaaaccagccataaccgccgtggccgggttggtgccgtgggcggagtcgggaacgatgatcttggtgcgctttgtgtctccccgcattttgtggtactgcttgatgagcagcacgccggtgagttcgccatgagcacctgcagccggctggaaggtcatttcatccataccggtgatctgacacagatactcttccgccagggccatcacttccaggcagccctgaacggtgtgctccggctggaggggatggacgccggtgaaaccgggcagagaagccatttcctcattgatccggggattgtatttcatggtgcaggagcccaggggatagaagccattgttcaccccataggtccgctcggccagtttggtatagtggcggctgatatcggtctcgctcatctccgggagatggggggcctgctgccgggtcagggaggcgggcagctgatattccggcacatcgcaagcgggcatctcaacgcatttgcgcccggccacgctgctttcaaaaatcagattcacttcccagccacctccttgagggtttctgccaaggtgtcgatctcttccttggtgttcatttcggtgacgcaccagaggatctggcccttcttgtcaccggtgaggggcagtccgcccaggatgcccttttcctccagcgtctgcatgaccttctgggggcacaccgggcaggaggtgacaaattcatggaagaactcgccctgataaaccatttcaaagccaggaatggccgagatctgctgggcggcatagtgggccttggacaggcacaggtttgccacatcccgcaggccgttcggtcccatggccgccagatacaccgaggcggtgagggcgcacagagcctggttggagcagatgttgctggaggctttctcccggcggatatgctgctctctggcctggagggtgaggacgaaggcccggttgccctcggcgtcggtggtttcgcccacgatacggccggggatcttgcgcatcatcttctccgagcaggtcataatgcccaggtagggtccgccataagccaaaggcatacccagaggctggccttcggcggtggccacatcggcgccgcactggcccggggtggccatcaccccaagggcgatgggattgcagcccatgatatacttagcgcccttctcatggacgatctggcccagctcctcacagtcctcaaacagaccgtaatagttgggctgctgcacataaaagcaggccgtggtgtcgtccagcagttctttcagggcttctttgtcggttttgccgtccttttccggcacgatgaccagttcggtgttggccgcctggcaataggtctccatcacctggacggtgtcgggctgggcggtggcggacaccagtgtcttggtgcgcttccgctcccggcacatggcggccccttcggcggcggctgtggcgccgtcatacaccgaagcattggacaccggcatatccatcagctggcacatatcggtctggtattcgaatatggcctggagcaccccctggctgatctctgcctggtagggggtgtaggaggtgacaaactcctccttggtggggatatatttcacaatggaggggatatagtggcggtaggcaccggccccgcggaacaccgtggggaacaccttgtttttcccggccagcttctccatcttgctccgcacttccatctccgacagcccttccgggatctggagaggaccctggagcttcaccgaagagggaatggcatcatagagctcgtccaccgacgaaagccccatagcctgcagcatggcctgccgctcctccatggtggaaggaacataagagcccatgttatgcctcctcttccagcagcttctcgtattcttccggtgtgagcagttctctcttggcggtcacattgctgatctcagccagccatacgccatagggatcgccgttgacatcccccggggaatccagagcggcatcgttgacagcggaaacttcgccggtggcagggctgatgatatcggaaacggccttcaccgactccacatcgccgaaggagccttcggcctccacctgatcgcccacttcgggcaggttgatgaacaccaggtcgcccagctgctcagaagcatgctcggtcaggccgatcttcattttatcgccgtcgatctccacccattcatgggaagcagtatacatcagattcttgggaacactcatggttaaactctcctttttaaataattggaatataaagtgaatttgtctttttgaaaggttatgctctgttataaatgggggtagccactacaacggcctccacccggcggccgcgcacatccacttccaccttggtatccacggcgttatagggcagatccacaatggcggtggcataggcgcccttcagataaggacaatgggtgccggagcaggtgaagcccacctttttatctcccacatacacatcctggtgctcccgggcaatgccccggccggtgactttcagcgtgcacatcttccgggtgacttcgccccgttcttccagggcttttttgccgataaagtcaggctttttcatcttgacgcagaagcccaggccggcttcgatgggggtgatggtgtcgtccatctcatggccgtacagcggcatgcctgcttcgaagcgcagggtatcccggcagcccaggccgcaggggagcagaccaaattccttgccggcctccagcagcgcgttccagatatgggcggcgtctgccggtgcacagtagatctcatagccgaactcaccggtgtagccggtacgggaaaccagacattccttcccagccacagtgcacttgggcacaaaggtatagtacttggtgggcagggtgctctcgtcggtcagcttgcggatgatgtccagagatttggggccctggagggctacctgagccacatcgtcggaaatgtctttgaattccacatcgccgaagagatggtcacggatccactccacatcctttgcatggttggccgcgttgaccaccaacaggatatgctcttcatccaccttataaaccagcaggtcatccacagtggtgccgttttcatagcacatggtggtatattttacctgaccatccaccatgctgccgcactggttggtcaccagcatctgcacattggccatggcgtccttgccgcacagggtcatttccgccatgtgggacacatcgaacagaccggccttctcacgcacggccatatgctcggcgatgacgccggcctcatactgtaccggcagcaaaaagccggcaaagggaacgatcttgcctttggccgccagatggcagtcatacaagggggttttttgttccatagagatctccttctttctttttgacagaagtggcgtatgctctttgatgatcgccggagaaacactccgaactacctttattatatcaaatgcgcaataataatcaacagccttcccatcagcaagattcactatctttcgcaggagattgttgtgattttaacgaaaaatcgtggaaaagtttaaaaaataacgattgtttttgagatgctttctcaaatatgcataaaaatttcggagtttttttggaatgtgctaaaatatttaaacggcaaaagtgaaagaaaaataaagatcttttctaaatatagattttttctataacagaatcttgctatggaagggtttatttcccaaagttttttatccaaaaaggcgaagaaaaaagattgaaaaaagacatttttagtcactttcacaagaaacaccaaggcctattcgtaagaatatccagcaatttaggcacacttccattcctgcgcccattttccccagccagaagggcgcaaaaaagccccggtgctttgaaagcaccggggcaaaatgcaatccgtatcaggtacagggtacagccttagatcaggccttcggccatcatggcctcagcgaccttcttgaagccggcgatgttggcgccagccaccaggtcataacccatgccgcattcctcagcggccttggcggattcgtcatggatgttcttcatgatgccatgcagcttggcgtccacttcagcgggctcccagctgtagcgcatggagttctgagccatttccagagcggaagtagccacgccgccggcgttgacagccttggaaggagcgacgatcttcacattcttctggagatattccagagcttcgttggtggtgggcatgttggccacttcgatgtagtactgcacgccgttgtccaccagctgctgagcttccttcatgccgatttcgttctgataggcgcagggcatagcgatgtcaaccttctcgccccagaccttggcaccgggaacgaacttgacgccgaacttgtcagcatagtcctgagcacggtcacggccggaagcgcgcatctccagcagataagcgatcttctcgggagtcacgatgccgtcgggatcatagcaatagccgtcggggccggagatggtaacgaccttgccgcccagctgagcgaccttttcgcaaacgccccaggccacattgccgaagccggaaaccgcaacggtcttgcccttgatgtcgtcgccgaagtgcttcagcacttccaccagatagtacacagcgccgtagccagtggcttcgggacggaagtagctgccgccgtaggacatgcccttaccggtgagcacgccgttctcccagcagcccttgatgcgcttgtactggccaaagaggtagccgatctcacggccggccacgccgatatcaccggcgggaacatccacatcggggccgatgtgacgatacagctcggtcatgaacgcctggcagaaacgcatgatctcagcgtcgctgcggccacgggggtcgaagtcgctgccgcccttgccgccgccgatgggcaggccggtcaggctgtttttgaaggtctgctcaaagcccaggaacttcatggtgtccagcttgacggaaggatggaagcgcaggccgcctttgtaggggccgatggcgccgttgaactggacgcgatagccgcggttcacatgagtctcgcccttgtcgtcagcccaggtgacccggaactcgatggtgcgatcgggctcgcacattctctccagcaggccggccttctcatactcgggatgctgctccacgatgggctcgatgctcttgaaaacttcttccacagtctgcaggaagagttcttcgccctcgttgcgggccttgacctcatccaggactttctgcatataagcgttcattttaactgcctcctcataggtttaaaaaatctttggagcctagtattctaccgtaattatattaaagcgcccgggataaaaagtcaagaacaggcttattaaatatcattaagaatttatgggtgagtaaattaaatttgtgcaaaatatataaattcctatctttccgaaaagaggattttttgccgggtcggtgcagaagggatgcaaaccaaaaaaatttcggaaaaacaaagaaaaagcaaatctccccaggctgtcccccggttcatttgaataaaaatggcggaaaatgacctgccgggccccatttcctgttcctgcaatagaaaggggccaagcccttggtgaaaatccataaaaagggaagtgggaaacaagcgctttgcacaagatgaatcaaccgatgcggccgccgattgcgaagggggaaggggtttgttataataaaggaaaattccaaagggaaagaggaagatgcgattatgacacgcgcttatgaaaaactgttggaatatgtgaagtttgacacggcctctgatgcgggttcccccaccgtgcccagcaccatgaagcagaaggacctgggcgaatacctggtgaaagagatgcaggccatgggcatcaaggacgccgaaatggacgagaacggctatgtctacggctccatccccgccacccccggctacgaaaaggcccccaagatcggctttttggcccatatggacaccgtggccgatgtgccggcctgtgagaatccccggatcgtggaaaaatacgacggcagcgatgtagtgctcaacgaagagcacaatgtggtgatgcgcatggccgatttccccagcctgaagcagctcatcggcgacgatatcattgtcaccaacggcctgaccctgctgggcgccgacgacaaagccggcattgccgagatcctcaccgccgcagagcatctgctgaacgatccctccatcccccacggtgaagtgaagatcgcctttactcccgatgaagagatcggccggggccccgaccattttgacatcaagcgctttggcgccgacttcgcctacaccatcgacggcgctttgctgggcggtgtggaatatgaaaacttcaacgccgccagctcggaagtgacggtcaacggccagagcgtccaccccggctctgccaaaaaccagatgaaaaatgccaactacatcgccatggagtataactccctgctgccccaggagcagaagccggaatacaccgaaggctatgagggcttctacttcctgcatggcatggaaggctcggtggaaaaggccaccctccactatatgctgcgtgatcacgacgccaagaagttcgaagagaagaaggccatgatggacaaggccgctgctttcatcaacgagaaatacggcgccggcaccgtcacagtggagaccaccgatatgtaccggaatatgcgggagaagatcgagccccagatccatctggttcatgctgttatggacgccatgcggcagctgggcgtggagcctgtggtttcccccatccgcggcggcaccgacggcagcaagatcacctatatgggcactccttgccccaacttctgcaccggcggcaccaacttccacggccgttttgaaacggtgtccatccaggccatggacaagatcgtggagctgatcgaaaagatcctgacaaactacgccgaacagagcaagaaataaacgataaacgccaaaaaagcggggcttcggcaccgcttcagactgtcaaaaagcttatctaactagagggaactacttgccctacttctcatcaatccgcaaaaagccgcgacctgtgcgtggctttttgcacttctcaagggcggggcgccccgctggtccggtggccggacggccatactttctttgcctttctgcatcggacctgcccagcgcgggagcgcagtatgggagcggaggcactccgccagccccttgcaaaaactcgaaaaagtggccaaacccactttttcgacacgctcaagcagggcttcggccccgctttttgtttgcttcaacggcggccttcgccccgccctgcctctgcttgcggggaaaccaggggctatgatacaatgaagttatctggaaacaacagtgggaggaggagagcatatggaaaagaaagaatacaccggcacccgctccagaagcagcggcggcttcatctgggaaatgatggagggcagctggaaatacttctggggctgcgttgccgccatgaccggcggagtggccttttcctttttgtcccccgctttggtgggattcatcatcgactcggtgatcggcaccgaacccatcgatttgcccgggcccctcactgcttatgtggaaaacctgggcgggcggcagtggctttttgaccacatgacccttctggccgggctgtttcttgtgatcgtggccctttccggcctgttcaacatgctgcgccagtatctggccgcaaagctcagcgaaagcctggccttttccctgcgccagcggctctttgaccacatccagcatctgccttatgcctggcatatgagtgtgcagaccggagacatcatgcagcggtgctcctccgatgtggacatggtgcgcaattttgtggccggacagctggccgatctgctgcgtatcctcaccatgctggtgggcgcttttgtcctgatgttttccatcaatgtgcctctagccgcggccgccgcagtgagcgtgcccatcgtcatgggctattccggcgtcttttaccggtatatcagccgccgcttcctgaaagccgacgaagccgaaggagagctcaccgccatgacccaggaaaacctcaccggcgtgcgggtggtgcgggcctttggccgggagcggtacagtctggaccgcttccaggagcagaaccaggaattttcccgccggtggatcaaggtgggaaaccttctggccatctattggagcctgggcgatctgatcgccgtgtgccagggcgctctggtggtgatcttcggcgcctggctggccgtccatggccatatgaccagcggcgccttggtgacctttattatgtacaacggccagctggcctggcccacccgtcgcctgggacggatcatcggggaaatgagcaaagcgggcgtatccatcggccgtctgcgggaaatccttctggcccggccggaagaagattccccaaacgatcagattttccccatccagggagccatcgctttttcccatgtgaatttctcctacggcagccatccggtgctgacagatgtgtctttctcggttgctccgggggagacgctggccattctgggagccaccggcagcggcaaaagtaccctgatgtatctgcttacccggctgtatgaactgccggaaaaaggcggcagcatcacggtggacggagtggatgtccggcagatccagcgggatcatctgcggaaaaacatcggtctggtgctccaggagcccttcctgttttcccgcaccattctggagaatctgcgcctggccgctcctaacaaaagtcaggaagaactgcaaaaggctgcagagactgcggcggtgcaccagtccattctgggctttgcccaggggtatgacaccatgctgggagaacggggcgtcaccctttccggcggccagcaacagcgtctggccatcgcccgcaccctggccggcgctccgccggtgctggtttttgacgattccctctccgctgtggacaccgaaaccgacgagcgcatccgaaaggctctcaaggcccgggaaaagaaggccaccaccattctgatctcccaccgggtgaccacattgatggaggccgaccgcattctggtgctggaaaaggggagagtgaaacaaatcggcacccaccagcagctgatccaggaagaaggcccctatcagcggatcttccagctccagagcctggcggccgaagaggcggaaaacgaaagcgaggtggtgggcaaatgaaacagaaagaagaatatggctaccccacatcctttgattttgcccagtggaaaaagctgttccggtatatccggttcctcaagaccccctttgtcctgcttttgttcgcagccatggccaccgctctttttgatgccatctttccctatttcagccggtacgccatcgaccatttcatcgccctgcaaaccaccgaaggcctgggagttttcgctctgctttacgctctggccgccggtttgcagaccggcgccaatgtaatttactgccagcaatgcatcgtcatcgaaatgaaggtgggccaggccctgcgggatgcctgctttgaacacctgcagcggctgcctctatcctttttcaatgtaacccctgtgggatacctggtggcccgggtgatgagcgatacaaaccagctgggctccatcttttcctggcggctggcggagtttgtgtggaacggctgctatctgattttcgtggtcatctccatgttcctgctgtcctggcgcctggcgctgctggtgctcatcgtggtgccgcccatcgctctggtgtgctcctttttccagcggcggctgctgcgggccaaccggcgggtgagacgggccaactccactttgaccgcttccttcaacgaaaacatttccggggccaaaaccatcaagacgctggccgtggaggacacggtgtgccgtgaattccgggaaatcaacctggatatgcgccgcaaggccatgcacgccaaaacccttcacgccctgttccagcctctggtgatgtttctggggtctgtgtccctggccctggtaatggccgcaggcggcgtgatggtgggtccctggggcatccctctgggcaccctggcggtgtttatttcctacaccatgaacattgtggagcccatccagatggtggtcagcgtcctggccgacgccattgccgtgcaggccaatgtggaacgggtcaaccgtctgctggaaaccgtccccgccatccaggacacgcctgccattgaggaaaagtacggggacatcttccatcccaaaaaagaaaactgggaaagcatccagggagacatcaccttccaggatgtaaccttccgctatcccgacggggaggtcaatgtgctggagcatttcaacctgcacatcccggctggttccaccgtggccattgtaggggagaccggcgcgggaaaatccaccctggtgaacctggcctgccggttctatgagcccacagaagggaaaattctcatcgacggggtggattacagggagcgaagcgtgggctggctgcacagcaacatcggctatgtgctccagtctcctcacctcttcaccggcaccattgaggaaaacatccgctatggcaagctggatgccacccgggaagagatcgagcaggctgccaaaatggcctgtgcccatgacttcatcatggctatgccgggaggttaccaggcccaggtgggcgaaggcggcagccagctgtccaccggccagaagcagctgatctccattgcccgggccattgtggcaaatccccggatcttcgtgctggacgaagccacatcttcggtggacaccgaaaccgaggcactgatccagcagatcatcggcaaggtgctggaaaaccgcacctctttcctcattgcccaccgactgtccacggtgaaaaacgcccatgtgatcctggtggtgcgggatgggaagatcatcgagcggggcacccacggagaacttctccgaaagcacggctattactattccctctacacccgtcagttccaggaggaacggttccaaaaggcattttgaacacgcgcttgaaagcagcaaaaaatcccccgatcccgggggatttgagcgtgtcgaaaaagtggcttaggccactttttcgagtttttgcaaggggctgtatgcacgcctttggcgcacacttgccccttgagaagtgcaaaaagccacgcacaggtcgcggctttttgcggatttataggggtagggcggacgaccctttttgttatataggtttttcgacagtctgaaatcccccgaccccgggggattttttcgtgttcagactttgtttacataccacagataggtcatctgctgcaaaagccacagaccgcccaccaccaaggcccaggtaggctgtatcagctggaagcaggaaagcaggcacatacccaccatcaccagaagaaaccctttgctggtggcctggaaagcccggtaactgcactggcccatctgctgccgttccgcttcgtcacagctttggtaccagtccttctgaaagcggctgctgaggggatctccctgtttttccgggaagataaacttggtgcgctgcaccgcttttacctccagagcaatgagcaatgtgagatagacgatagccaatcccatggaccacagtatgttttgcgtctctgccgaataaaagctgatggtgatggcgatgaaaaacaggggagtggccccgccggaacagagcatacaccgccccagaagccggttgcaccgctggaaaacctcgtcatcctccccggcctgagcgaccagcttctttgtctttccatacagcatccatcccaaaaacagcaaaaggaatccgggaaggaaccaccacattcccagctgctgcaccagcattttcccctggttcagcacactttccaaggcatcgccgttggccgccgcacagtaacccactacgccgcccaacaaagcacacagcaatgtggtgcccagaaattttgccacagattttccactttgcttctcccgtttcattttgattcctcctctgtgagataaaatacctgctccaccggcaccccaaacacctgggaaatgcgcagggccagggtgatggaggggttataatccccccgctcgatcaggctgatggtctgccgggaggctcccacccggatgcccaactcctgctggttgagcccatgcttggcccgcaattctttgagccgattctgaagtcccatgaacgccctcccttatgacttattttattgtcataatgacaactattcttgtcatacttagcataccattgacaactatctttgtcaagcacaaaaaaatcccggaggaaagtttcctccgggatagggttttgtttcgcttaccaaccggtgcccaccaactggccctgccagccgtcaggcgtgcgggtgatatagccgcagcgggtatattcataagctccctggggcacatcgctgtcctggccctggtattcctgtgtgttgcccgccatggaaaaatccaaggcccgctgattttccggcacaaacaccgtggtcagatagaagggaagggtgttttccggcagatcgtcaaactgggctccccctttcaaagccgattccacctggcagcggacaaaggtataggctttggaactgccggaagaagccttcagatgaatgctttcaaaccgggtgcaaaattcctctgctgcctgaagggcatcctggccccgatcggggatgcggacggcatcctgctgttggtagccgccgcccaaggcaaaaaactcttcctcatccagccaaaggcgcaaaattccatagggtgtttccaatcccctggaccacagccaccgcttttcctccccttcttctgccaaaagcagaggggagtcctgaaaggcggtaagggtcacatcgccgcttttcagaataaccgaatcccctgccggggtttcgtccggctcttttgctgccccgaagggcatctggagaaggctgttatagcaatattccccattgacctcccagccgccggtataagttcccgccgctttcccttgctggaacaaggtcagctgaatgtcctcttttccgatttccaccaggctgccgagcatttcgcctctttccagcaggtcaatggagcgggcatactcttctccctcaccgccggtgagaagggcatccagagtcaactgggtgcggttttccagggagagggtataggtcttgcccgcctcccacgcttctccctccagctcgtggatgctcatggacatatccccatcttccagccgcccggcgatgtggatgttccatcgttctgccggataatcttccggcaaggtaaagaacacctggtcaccttcccaggcaaggctcttttccagatcgtccagggctttttcctccgaaacgctgcctgcactggggttgagggtgcaggcggccagggccaggcagaccagcagcccggcaggcacggcggaccatcggcccctgggacggaagcgcaggatatttttgatcctgcgccgggcatcgccttccccaaaatgaatgggggaggggagtgggaaatggtgatgggatgcaaaggacaaaagcaatgtgccataaactttggcacttccgccttttcccagcacatattcatcacagctcatttccatgtcccggctcatcagatagaaagccagccagcacagagggttgaaccaatgaagggccagcagacaaaaggccagcagctggaaaaaggggtcatgacggcgaatgtggtgtttttcatgctggagcacatattgcagttctgtgccttccagccaataaggcacatagatccggggacggaatactcccagaacaaagggggataccaccttttcgctgcgccacacattgccctccaaccgtgtagcggtaaaaagacgccgccgcaggcggatatagcggataagtgcgatggacagaagcagtactgtacccacgatccacagggccgctcccgccgtctcccaggagaaggcggactcatggatgcctatctctgaagcggcctggggcactaccggtacctgctccatggcagaaaccgtcccagacgaggaagcggcggaataggagatatattccagaccgctgacgccggaggccatggccccctcagccggacgcagcggctgcaaggcgaatacgctgaacaccgaggacaggctcaccgggcacaaaagccggaaagccacagccagccacagcaaataggagtactttttcggggcccgccgcaacagcagccggaaaatcaatacaaccgcaatgactacgctggcggcggcgctcatgttgagcactttcacaaagatctgttccatactaaccctccttgtgctgatcgatgagctgcttcagttcctccgcttcttcccgggacagggttttcccctttaaaaaggacaccagaaagctgggcaaggagccggaaaaggtctgctccacaaacttttcgctctcctgggtctgcacctgctgccggggcaccagggaggtgaccaggctgtcctggttctgggccaggcccttctggcacatctttttcagcatggtgtaagtggtggatttcttccaccccaatctttgctggcaaagggtgaccagctgggacgaagagaggggttccctgtcccagatcacttccataaaccgaaagtcgctttcacaaaggcgcttgtgttccatctgttcacctcctaggtctataatcataaacctcttttcttgtacttagtttataacaatagaccactcttgtcaagaaaaaactctgcccgtttgagcagagttttatgtgctcaaaaaagaggcaggaaaacccttcctctttttgcttacagtcctacttcttccatagcgtcgatgcgcagaccctcttccgttttcacaaactggatctggctgcggcgaagggactgataattcatataatccaccgtgacggtgatccggtttccctcgcctttcacgatatccagggtatccggggcccactccttatccaaggccccgcccacaccgatatcgatacacagttttccatcctcttcccggtatcgggggtaactcccctcaaaggctgtttgataaaactgctgctgggcatattccggagtgaaaacctcttctgtcagatcccgcagcgcctgaagggtgttgatctcctcatcggtcaccggcacaaaacactgtccattttcatcgggctcatagggggcgttgggttcggtggccagaccggcgcccatgaaaatatcttcaatccgccgttctttttccaaaatagccccgatgttttcatggacttctttcaccatctcttcatcagagggcattttctcttcttgttcctcctgttttatgccttgctgtggtttttcttcggccgtctcctgtctctggcatcctgtccacaaaacaagggccagcagcatcagcattgcgatccagatctttttcatgaccgttcacccctttgtattccagatatgcccatttctttttcttagtatatcacaaaattatcaaaaggcaaccatcctagtttctctggaggaaggcttcggccgcgttatccaggtcctctatcagctcctgcaaaaggggagaccaccgggctcgccggggacagaagagacacaaatccccctgggtgtttgctccctggatgggcacataaaccagctggccactgctgacgccctcgtatcgattcaatgccggataataagagagagcataggaatccgagtgatggcggatggtatggatcacagcatccactgactccacctggatgacccgccggggcgaagttccccgaagcagctgctccagaacaggggaggatgcattgctttttgcctcttccggccccaactccggacagatgaaatagaaatctgccagctctcccaaaccaatgctggtcttttgggccagagggctgttcccgttgatcaagcagccgtactttccctgaaacaaggtgaaatatgcacagtcataccgatcggcccactcccgggcttcctcctggccgcagatgaacagaaccagcaggggagaagagagatccttcagatgctcttccggcttcagcacagcatggtgattgacaataacttccggatgccgtttcttaaaatccaaaagcacatcgggcagcagaaaattggaaagggagatgtgggaatacaccgtaatcgccccggcctgggccgcttttcccaaagccagccagcctttgtaatactgtaccacttgccgggcttccggcaggatcttttccccggtctgggtcagggtgataccggttttttcccggtgaaacagctgaactcccagttccttttccagatgctgcagcgccttggtcaggctgggctgggcgatatacagtctccgggccgcttcattgatggagcgggattccgccaaagcaataaaatattccagcgcctgcaatttcaatggacccgccccttttccaatagcttttttcataaccccggaaattttatatattatacaaaatgccatgtctatgataccctggttttcagaagtatgtcaatttgcttttcccatatcagccaacagaaaagggtatttttatgaccaaacgggaacgatttcaaaacttcctggaaaacaagccggtagaccgggtgcctgtggcttttttccatcatttctgccgctttgaggacttcggtaaaggggtggatgacgatgccatcctggagcagaacatcgaagggcaccgccgggccctggcggcctttgacccggatgtggccaaaatcatgaatgactccttgatgctcatgccggtggatgcctcttttgtggaaactccggccgatctatacaaaattaagccgctgtccatggattccaaatttgtccagcgcaccctggaactgacccgtcgggtcaaggagatctattcctccaccggtgcacctttgtacgccaccggtttttctccctctctggtgcttcgcaacagcctggccgccggaggccttcccggcgccggcggcaatgaaagcaagctgacccatcttctggctcaagacccggaagcagtggcggccgccgtcaaaaccct

SEQ ID NO: 3260 - DNA, 32759 bp, Unknown
  16S sequences of unknown bacteria
ttctcataatagcgattatcccaatagtattttgcgtctacgattgcttcaatcatcatggagtatgtatcgttcattaaaaataattttcacattttttaaaaaaggtacttgagtatttagcactttttctctaataagtgaagggcttgtttcttcgagggaagtaacaaattcatcaaaaaagggagcaggttaacgtgtaggcgcaaagtgccgcacttcgtgcttctgcgcctacacaaagcctgacggaatcgggatacccgacttcgtttttagaaacactgatttatgtttaagggggattactgattgaaagaattgtttgaaaaatatccggacgtggtaacaccagaacaggttgcagagatgttacaaatcggacttattctcacttatcgcttgcttcgcaacgggatgttaccatccaaacgtgtcggcaaaaagtatattattgccaaacagactgtaatcgaatttgtacttacggagcgcgtttcatgaaagggcggctcgtcgtaaaaaacggaaaatattatgtcgtcatctcctatcaggacgacggcggtaaaagcaaacaaaaatgggttgctacggggttggatgagaagaacaacaagcgcgccgcaatggatatgctgcggactgtcgaagcaaaatttgcaaacggaacgctcggcataaactcgctgcaatcgcaaaaaagttcggcacgagagcccgaacaacaagaagatgtttcctcgaatgatagtccgctcttttcggattacctctatgaatggttacagatcgcaaagacgaatatacaggtaactacatattcggtctataaacacagagtcgaatacattgccgcttattttgtggaaaagcgcactcggttaaaagatttgaaaccaaaagatattcaggaattttatacctatatgcagcagaacgggaaaagcgtacaagaggctcatcattgccataccgttttgcacagagctttggaagtggcatatcggagcgattatatcctgaccaaccccgccgataaagtggagcggccaaaatccccgaaattcaaagccaaattttatacggcagaacagatgctgacgctctttcagaaattgccaggcgatccttacgaatacatttataagttgaccgccatatacggcctgcggagaagtgaagtatgcggtttgcgttggagcgcgatcaattttgaaaatgatacgataacgctcgaccatgccgtagtgcaatgcgaagtggacggaaagagagttttggttacaaaggacaaaatgaaaaatcaatcgagcatgcgcactttgccgctgttacccgccgtaaaagatattctgcttaatttgaaaagagagcagcaagagcgcgccgaaaaatacgggcaatactataatcggcagtaccgagattatgtttgtgtagacgaagtgggtaaacttatccgccccgacaccctgacgatgcatttcaagtcattccttgtgcgcaacaatcttcccgtcatacgttttcacgaattgcggcacagctgtgcaagtattctgatcgcaagcggcgtcagcatgaaggcggtacaggaatggctcggacacagtacgttctccaccacggcggacatttacagccatttgaatttctcgtcaaagctcggcattgctgatacgctttcggacattctcgcgggaaatacgtctcttaaaaggcaaactgcgcccgatacgatagaaactatgcagaaaatattttcgacggcggaaatagaaaagcccgcaaacgaaaatcttttgcagacctttgaggtgttggatgaggacgacgaacccattgaggaaaatgcagcagcggaagtttcgcaagataccgcgcccgatgatgccgacgatttatctgttttcaaaaaagcgaaagaagaaatgtcgcggctcggtttgaaacgctcgacgaatactttgaatatctcgactttcaggaacgcctgcaaaaacatcgcaaaaagtcaaaggatatggagatgtaaaagttaaaattatatgttatgacctttttgtaggacggttaacccaattgttgctattagaatcaagtggatataagtcataaatgtaatctggagattctcttaaaaaatcatcaattgtaaattctttatcttttttaatagatgttttgctaccgatttgcttacgtcttttttgtggctctaaatattgaaatacatatgatgtaaataagcgttgcagttgctctgcgtgtttaacatagcgcatataatcagatctgataaataattgatatgaataaactaaaaaatcaagaatcacgtttctgtatccttgataagcaaaaggtttatttttcccaaaacagtctcctttgtttacattggggaaataaaatcgtccttgttctataagtgttgataattttgttaaattagtcgttctgttatcactatcaggctcgcttaatctcagataaattaaaacttcaacagcttcgttgtgccattgcaatatatcgttataatactgataggttaactcgtatttttttgtgttgcttaggatgctatataccaatgctccaatggcaacaataattgatataattgaaatccaatcacttaaatccatgtttatcctccgtataatattaaagccccgattaacggggctttggcggaaggcgagggattcgaacccccgggcgtttatggcgccgttcgatttcaagtcgagtgcattaaaccggactctgccagccttccgtatcgaaattgccgatttttcggcaattttttattcaattttatgtttctacaagttttgaccgcttgctttgcaatttgtagaaaagtttgtagaatttacggcgtttgcggatagtttgtagaaaactgactcgcaaatcgaccgctttgacaacagatattttaccacaaaacacagggtaaaatcaatcgcttgcggggcaaatctgccgaagttccgttttcgttgtagaaacgatggcacttttagaccgcttgatttcaagcgcatttcaagaccgcctcgttatgaccgcttcgatacgcctccgtagatatttatttaatggggcggaaaaatgcagaagaaagtgcgttgacgatttgcggttaatatgcggtttttcccgaccgtattttatggaaacgagtataacaaagctaaggcaaaaagtcaagcgttaaaaagggtgagcgacaaagtataaaccctgatattttttatagccctgaaacaagggaacgccgtcaagcgagttacaaagcggtacagaaatttcctgtgtcatatccgataagccgttttttatctgtgttttaacgtgtatttaaagtattgcgataactgatgatatttcatcgcaaatgcatttaggctttttaaaaagttgcgcaggaataaaaacggtgatataataatcatgataaacaatttaacggagggagttcgatgccctggtatcaaagattatgggaagaggtgcgcaattttttcttttccaactggaacaaaatacttgttttcgcgttggtgctgattttaggcgttatagcgattaaaatagtagtggcgatattgggaaagatatttcgcaagtcgaaactggataacgcggcgggagattttatagtttcgcttataaaggcatttttatatattgcctatataattgcgttgctgtcgcttttgggcatacccacaaccagtcttatcgcaatgctgtcggcgtttgcccttgccatatcgcttgcgttgcagaatacgatatcaagtcttgcaagcggagtggtgataattctgaccaagccgtttacggaaggcgactacgtggatataggcgataaatcgggaaacgttgaacatatatcgatattctgtacgcggcttaacactcccgacggaaaggtaatagtaattcccaacaatacagtagcggcgtccgagataataaattacaacacgctgcctacaagaagactggaaatcaagctgtcggttgcctacggcacctcggtgaataaagtcaagactaccgtgggcggagtattgacccgtcacaaagagattcttcaagaccccgcgcccatgataagactggcggagcacggagcaagttctttggactttgtgtgcagggtatgggtaaaaaacgaggattactgggacaccaactttgcgctgaaagaagaaatactcgaggcatttaacaaaaacaatatcgaaataccctttaatcagctggacgtgcatgtggtaaatactgccgagaataaacccgaaactcccgttaaaaaaactttgaaaaaagaaagcccgaagaaagaaaccggcaaaaaagttatctcaaataaagaatcttcatctaaaaaagaaacgccgaacaaaacaacaggctgaaaaaataaaacttattacgcttaaatcgctatctgagcgtaagttaagaaaagtgtttaattaaaaaagccgcaagaataaacttgcggcgtgcttgaaaaaaatttttctcagataaggcctataaggttttgataagtaccggggaagaacaagaagattacgattatggcaagacatacgtaaaaaattattcttataatcagatttcttttgcttatcgcctcaagtccaacaactgcgacaagcagtaaagagccgtaagtaagcataatgttaagtatattgagaatagtgtcgtttttgataaacagacattgagcgtttgcaagcgctattatgtaaacgattaccattactacggcaaggatttcgcccagaatatcgaacagcggttccagttttttcatttttattcctccgttaaacagggcaatataaagcccgtatataaatttttgcggcgcgttttaaaggcgatttaacttaaaagtcggcgaaatgccgattttgcttgctttccgaccgcaaatctacataaagtatattatcaaaattcgtccaggtcaataaaaaaacataaaaataacattatagtttgattaaaaaatcaaggaccttttccgcatccgaatttatcgtagcgtcgtaaattaatattattgtttcaaaaataaaccttcttgactcataatcggttttttttgtgtaaatcgaatgacaattccgaagcatatgcgctataataacatacgattggttataattattgttttgcggcaggatataggcaaaggtgcgaaaaaacgttattgtttagttaagccgtttttacataaggtcgaatcgattagtaatcctcgttttttcagcgacaaaaagcggccgaagttttacggcgggacttttagggactttttaatcgacggccggaaacaagagtttagatataaaatcatacattcaataaaggagtaggaaattttatgattgaaaagacttacagttttactcggggcggagaaaccgtagacgtctacacgctgaaaaacaagtcgggaatggagatggacgtaatgacctttggcggaagaattcttcgtcttaccgcgcccgaccgcaacggtaaacagggcgacgtaattatgggatacgcgcgtcccgaggattacttcgataagccgcacgcatactacggcgcgtttatcggaagatacggcaaccgaatcggcggggcgaaatttacgcttaacggagttgaatataaactttatcccaacaacggtaaaaatactttacacggcggtaaagagggctttgacgtaaaaaacatgaaagcaagcgtggagggcgataaacttgtactgtcttatctttcgcccgacggagaggaggggtatcccggtaacctcgacattaaagtaagttattcgctttccgacgacggggatgtaacgcttgagtattatgcggttacggataaggatacggtttgcaaccttaccaaccacgcttatttcaatatcggcgacggcgacgacattctcgatcaggtgcttgacataaagtcttcgcgcattactcccgtggacgacgagcttattccccataacgattttatggatatcgacggcacgccttattcgtttaaaggcggcgtaaagctgggtaaaaacatgttttccaaagaccacatgatagatttgtgccacggcttcgactttaactactgcatagaccgcgaaacggaaaacgaatgcgagctgtgtgctaccgtttacgacccgcaaagcggaagggttatggaatgttttaccactttgcccggcgtgcagctttatacttccaataccgtcaaggggaccaagggcaaaaaggtttacgaaaattatgccgcgctgtgtcttgaaactcagggctatcccaattcccctaattgtcccgcttatccttccaccgtcctcagaaaaggcgaggaatacaaaaccaaaacggtttacaggttttcggtaaaataaacgcacagaaaataattgtctttaattcctgaattaaaaagcaaagcgttatgacttataagccgtgacgctttgtttgtatattttcgaaataaaaatgtatacttttgggttgattaaacattgtttaatattctataataagttatatttaaataaagcaatcttatatggattgcaaatattaaaggagtgaggaaaaggatgaagaaggggtttttggcaacaattgttttattgcttgcttttgtcatggcatttgcgcttttcggatgcgggcaaaaaacggtttattcagtttcgctttcctcggagggcgcaaatcttaccgtgggtgagaaacttaatcttaccgtaaacgcggaaggatttaccgccgattcgattgtgtgggcaagttcggatatgaacgttgcagtggttgagagcggcttggtaaaagcgattggcgcgggcagcgctacgattacggcggcagtcactgctcccgacggcaaggtttacaaggcaagctgcgcactgtacgttactgcgcgggcggaagagcaggcaaattacacgatagaatattacaagcagaagaaagaccgcagcggttacgaactggattcgctgcttaccgaaagcgtttcttcttttgccggcagaaccgtttccgtaacgccttcagctttgacgggctatgttttctccgaaagcaatgctttaaacgttctttcggctgaggtgaaaaaagacggctctaccgtgttgaaagtatattacgacattcaggttataactataacgttccgttccgaagcgggtgccgatatattgagatatgtggattacggcgatacgcttaccgacattcccgcagttcccgaaaaacccggcttcagcggagtgtggaacgttacggatttttcttccgttgttgcgcctttcacggtaaccgccgtatattctgccgaatattacagcgttaacgtaaaaatcgtgcccgaacaggtcagcgttgcaggcactgcgtatgatttttatcagtttgattccgaagacttttctggtcttacggcttccgtacagaaagacggagaacagcccgttcagcttgacgtaacttcgtcgggcaacgtttttgcaaatctgactatcggcacttacacgcttaccgttactcgcgggactgaggtcaggacaaaacagattaccgtttcgggcaacgctaccgacagcattgctttccccaaggacattgacctcggcggcagcgtgggcgattacgcttctttcactacgggttgggaaaagctttccgaaaacagcgtaaaaatcagttcttacgcttatgtgtatatcggacttgacgaaaacgagcttacggacagatattatctcgaggcggacgtcgactttaaaaacgtcggtacattcctcggtattctcgcagcggcggagtacggggatatttcgggcggcgacggcggcggaaaacaaaagctggcgttctcgtattcgggcggtaataagatttataaaggcgacaataattcctggagcgagtttgaaacgggcggctacatatccaaccttaaagccgaccccgcaaactgcaaatttgcaattttgcgcgacggcgacgtttattatctgatactcaacgataaagtagtgggttcgcttacttccgacaaatacgacaaaagcggcttcggattctgcagtatgtcagcgtcgggtacggctactttctccaacatcaattacacgatagattcggatacggtcaccgcgcttaaaaattactttatgactacgccttcgcttggcggctcgttcaactatgcggacggcaccgtggtaaattcctttaacagcgaaacgtggacggtaaacggcgacggcgcaagcggcaccatcacgggaccttcttacatattcaacggcggcacggcgggcaacgtatactacgccgaagctactttcagcaaaacgccgaagtcctgggtgggtatattaatcaatactcttgacggagcgcccacaaacaacaagggctggtacggctacggcgtatatgattcaggagcgctgtttctgcatacttacgctcctaactggcaggacggagtaagcaaaggcggcgtaagcaccggcagcggaagcacattcaaactgggcgttgctcgagtaaaagactactattacgtattcgtaaacgacgcgcttgttctcagcgaaaaagttaccgcatactccacgcttgacaacgagcaggctcttcccgcggataacgtcagcggtttcggtatttttgtcggcagcaactttggtccccaaaatctgccgttcagtaactttaacttcaccatggaccgtgaagaggttgccgataaagttggcggctcaaaagtcacttacgacagcagtaaacttacggtagttcaggcaggcgatacgataagctccaaaggcgtgcttttcagcggacttcccgcagaaattaatcttaacgttccggcaaacaaagtggtcgaaaatatcgaattgctgttagacggcaaacccgtttccatcaccgcaacggacggaaaattcacctttaaccccgttgccggcggatcttattcgatagaagtcacttacgcggaagaaggagaggcttccttgaatcttaccgttaaaccttacgaaatcgacggacacaatctttatcccgaacttacggttgatcccgccgacgttaccgttacggtaatagacatgacaaacggcacggaaagcgtggaaaaccttgtgtcccttaccaaaaattatacgcttacaagcggttattacgtaataaaagtggaatacggcgacaacgtttactcttacgacgttttccttgacgacggcgaaaccaaggagctttcgggttacgtttctcccgtatacctgggcggcgcgataaccatacctgactctaagggcgtggaaaccacctattacagctataagaatatttcgacagataaaaccgaaggcaacggctggaggttaaaggacggtcagcgcgacaccgtaaatttacttacgcatacgttcgtttatcagaatgaaataagcggcaccaaatattatctcgagggcgtgttcgacaccaccgaaacctattctttcggcactcagttcggcggacttctggtttctcacggccctgacactcttaacgacagtcccagcgacgtaagacttgcggcaggcattttcggtgacagccttatagtttgctccattctcaccgaatggaatcctcaggattcgcgtattttgttcaatcttaaacaagcgggtatagaatacgatcccaccgccgtaaaactgggcgttataagggacggctgcaactattatttcttcatcgacgacgtgtacgtggcaagctactattacgataaagtgactaccgagtgcggcataggtcttatggcaagccctgccgtaattacggtaagcaagttcaattattcgcttaacacggaatttatcgacgcaatgattgaaaaggctcccgtagcagataaggagattgacgtttacttcatcgcaggtcagtccaacgcttcgggttattcgacgttcaacttcaacaccgccgtcgcggataaccccggcttcggttacggattcaacaatatctggtacgcgggcgacgccgaaagcaccggcagcggcaacatggtcattcaccgtgacctcggatggcagcttgcgcgcatcggtcagggtgcggcggcaaataaattcggtcccgaggcaggcatggcggaggcgctttccgcttactataacacgcaaagcggcaaagtcgcgggcataatcaaatacgctcacggaggcaccgcacttctcgataacatcggcggcgaaaacgcttcaaacggcaactgggtttcgccctcttacgaggctacgattaagccccaaagcccgggcaatctcaccggcggactttaccgcgatttcctcgcccaggtggagaaaaacgttgccgagctcagaaatatgggctataccacgataaacttcaaaggtcttttctggatgcagggtgaatccgataagggcaatcccaacgaatacgaaaaagcgttcaaatactttgttgccgatattcgcagcgacctcggcgaaattgcaggagtcgatctcagcgcgcttcccgtgtttgtgggcgaaatttcccgcacgtcgggcagtgcggttcagggtacggtaaacaccaacaacgcgtttatcgccatgcagcggaacctgcccaatgttatcggcaacgtttacgtcatcgcttccggtcagttcgacatcaataagcttgtaaacggcagcaacgtggcggtaggcaccgattcgtggcactggaaccaggcggacatgattgccataggcaaccttgtcggcgaatccattatagaaaacgtgcttgaagcataataaagctttataaaaaatcggcaaaaccgctcggcttgttaagtcgggcgggttttgtatggaatgaagcataaaaaaacgttatgcttttttacggagttttcggtttttaaatatggcgtaataaaagttttttttcgtttattttttcgcagtattttttatgtacaaagcgtattctgtttttgcgcatcgaaatactgttttatttgtcaagactgctgttttcccgttcttaagtgcggcttaatcataaaaatccgtcataatccgtatactgagattacggcacgcaaaacggcatttaatctcattttaaggttattttaacttctttcttcttgcattaacaaaaaatatatagtataatcaaatcaacaatttcaaaaggagaaaacaatgatttttgcttctgcaatcggaaactggtgggacggactgttcgttcttcagcaggtgacgtttatactggcgtgcgctgcgtctgtattgcttgtggtgcaactgatagcaatgctgttcggactgggcgatgacgccgactttgacgcggatacggatataagcggagccgacgacattttcaacgacaacgatatttcggacgcgggcggcttaagacttgtgtctttccgtaccgtagtggcgtttatcgcggtaggcggctggataacttataccatgaatttcttccttccgtggtatttttcgcttatcatcggcgttgtcgcgggcgctgccgccgccgtgggggttgcgtaccttctcaaggctatattaaagtttcagtcggacggcaaccgccacatggggcttgcagtgggctcggttgcggacgtgtatttaaccataccgccttcaaggacgggcagcggcaaaattcacgtcgtcgttcaggaaacgcttacagagtgtgaggcggtgaccgacagccccgaccccattcccacgggtgcaaggtgcgtagtcaaggaagtcatcaacgagcagcttgtacttgtcgagccgtttgtagcgcccggaaaagacgccgcggccgataactcagataagtaatttgctaagtctttacattaaagggaggtatttaaattatgaatttgttttcggcagccgcttgggtaggcggacttattgcggcgattgtcgtagtagtggtgcttttgttcatcatgttactggtgtttatcggcagatacaaaaagtgtccgtccgacaaagtaatggttatttacggtaagttaaagaaaaacaagggcggtacgactcaggcgtctagtaaatgtattcacggcggcgctcagtttatctggccgtttttccaatcttacagttttctcgaccttacgcccatatcgcttaacgtggaccttaaaaacgccctttcgcaccagaacatccgtgtggacgttccttcgcgttttacggtaggtatttccaccgaacccggtataatgcaaaacgccgctgaaagattgctggggcttaaaatgcaggacattcaggaccttgccagcgatattatcttaggtcagcttcgtcttgtcatcgcgcttatggacatcgaggatatcaacaccaaccgcgataaattccttgaagaggtttccagaaacgtcgaaacggagcttaaaaagataggtttgcgccttatcaacgtcaacgttaccgatatccgcgacgagtcgggttatatcgaggcgctgggtaaagaggcggcaagcaaggcgataaacgacgccaaaaaatcggttgcggagcgtgaccgcgacggcgcgataggcgaggcaaacgccattatggaccagcgtataaacgtagcaaaagccaattccgccgccgtagagggcgaaaaccttgcaaaagcaagggtagcgcaggcaaacgcggacttaagggaagcggaagccgaagcggaaagaagggctaccgccgccgagaaaatagcgcaggcaaacgctttgaaagaagcttacgaagcccagcgcgaggcggaggacgtgcgtgccaagagagagcaaagtacgcttgaagcggacgtcatcgtcaaagccgaaatcgaaaaacagaaacttgagctggaagcggaggccatggcggagcagacaagacgcaaggcccgcggcgaggcggacgctattttcgccgtcaaggaagcggaggcgcgcggtctttacgaagtgctttccaaacaggctgaaggcttcgataaattggtaaaagcggcgggccaatccgacgacgcggtaaaaatgcttatcgcagacaaactggaggagcttacccgtatccaggtggaagctatcaagaacatcaaaatcgacaaggttaccgtctgggattctgccgcgggcggcaaggagggtacttccaccgccaactttatctcgggtatgcttaaagccgtgccgcccttaaacgaagtgttcagaatgagcggtatgcagttgcccgaatacttgggtaaagtttcggatacggaaaaatccgaggccgcatcatcggcacctgttccgtcggtaaacgcgggaaaagaagataagactcaggaagtttccgcagacaaaaaaacgaaaaagaagtaattaaaaacaagttaaaaaaatctgcaataagatacacaaaaagccgtttcttttttacgaggagcggcttttttataggtgtttttatacttaacgcaacgattttaaaatttataagtctgtttatttgttttgccgatatttgttttacgcaccttagcagttttgccgagcggcttacgggcttttttgtttatgtttttttctgggctttgcgctttaaccggggaaaaagtaatgtgcatattgtttgattgcgtttaatacgtttatcatgcgcgtttagcgcggtaacaaaggttaacgccgaaaagcacggtgcaagaaaatttccgcctgagggcaaggagagcagagattatagaagacagtggaggtaatcacgggggataagttataaaacaaactaagtttaaatcacataaaaaaataaaaaaccgcgaaagaaagaaaaggtcttcatcgcggaagatgctttaaaaacaaagaaattttaaggcgcggcaaaaaaataaaaaaccgcgaaagaaaaggtctccatcaaggtaaaatgctttataaacaaagaaattttaaggcgcggtaaaaaaaataaaaaaccgcgaaagaaaattttaaattccttcgcggatttttaccgtttataatgccttaacgggcaggttaaaaggcggtcggattacgcctgaagcgaaaaatcttcttttccgactccgcacatggggcaaacccaatcttcgggcacgtcctcccatttggtgccgggtgcgattccgctgtcggggtcgcctaccgcttcgtcgtaaacgtaaccgcagatattgcatacgtatttgtccatgttcttttcctcctgaaattatttttatcgccgcgcaaggcggaaatttaactttttaccgcggctttatgcgttgccgcgaaggttttttaaaacggaacggattattaattgattaagacgcacggcagccgatattccgtatttaaaaacattaaatgatagtatcagcaaaagctttattgttttttgtaaattttatccagaacttcgggtatgttgtccagccagtcgcccacaaacagctctataagtcctgcgtcgcaagcggaggcaagcttggggtcaacgggtatacgcgcaagcaagggcatgccgtattttgccgccacttcgtcggcgtgacttttgccgaatatttcgattttatgtccgcattcggggcaggcaacgtaactcatgttttccacaaggcccagaatgggtacgttcatcatctttgccatgttaaccgctttttccacaatcatggaaaccagctcctgaggggaggcgactataattattccgtcaagcggtattgactgaaaaacggtaagcggcacgtcgcccgttcccggcggcatgtctataaacataaagtccacgtcgccccagataacgtccgtccagaactgttttaccgtgccggcaatgatgggaccgcgccaaacgacgggatcggtttcgttagcggtcaaaaggttcaaagacatgacgcttatgcctgtttttgtcaccacgggcataagtcccagttcggatgcggaagccttttgtttaagtccgaacattttgggaacggagggaccggttatatccgcgtcgagaatagcggtcctgtaaccggcacgcgcgcttgttaccgcagtcaatgcggtgacgagggacttgccgacgccgcccttgccgctgactacgcctattactttttttattttgctaagttcgtgcggtttttccagaaacgattcgggcttttttctttccgaacagttttccccgcacgtttcgcagttgtgcgtacattcgctcattatacttttctccttgattcaataagcgtttttattataactctgcgcgggttaatagtcaaacgtaacgcgcatataaataaaacataaatgtaaaaattgcttggcgcgtaaagaaacgtaccccaaaagcctaacggactttcggggtcaacgtcataaaaaaggtttgcttattaaagcgaaaaacgttcagcttcccgaatacgaaaaagtgccgttgtcgtcctcttcggccaccattttgtattcggacatgtgtttatagggcgcttcttccgcgtccgccatgtcgctttcgtgaataaccacgtttgttatggtgcgttccacgcttttatcgggctgatgggaatttgcgcttgttccgtttttaacattgtttttcataatttcatcctcctttgatgatagtatgctcctttttgcgcggtttttttcttaacaggggctttcaattttttccgctttacaatcggctttaattatacaatcggtttttttttgtaaagttaacatttattgtaagatttatttttcaatagcctttaataaacgggttttgacgcggcggggagtaaaaatattttgaagtattaatttcgggattaatattgacaaaacggatagtctatcgggttgactattaaagccgaaaccgttataattataataggtgagtttggggatttttatagttatccttttaaattcgcctttccgttactgaagagtagtaagagtaaaaagttcgggagaagaaattaatggagattttcaacagcatactgatgttgcttgcgggatgcggcgttttcatggcgggcatgaagatgatgggcgacggcttggagcgcagcgcaggcaagggaatgaaaaaactgttcagccgcataagcaataaccgctttgcgggtgtgggcgtgggcgcggcggttacggcgattatacaaagctcttccgcgacgtccgtcatggttatcggtttcgtcaatgcgggagtcatgactcttgtgcaggcggcggcgattatcatgggcgcaaatatcggtaccaccgttacgggcattatcatatctttttcggcgttcaacgtttctttgtatgcttcggtgcttgctttcgtgggcgtaatgatgatgtttttcaagtccgattcggtaaaaaaggcaggcggaatcctgtgcggcttgggacttttgtttgtgggcctggacgcaatgagcggcgctttcggtgactcggatatcaaaaacgctttcgcaaacatgtttaccgtcatcgattttccgcttttgcttatactgataggtacgctgtttaccgcgcttatacaaagctcttcggcggcgacgggccttctcataatcatggtggggcagggcgctctttcggtcgcaaacgcacttttcatagtgctaggcaccaatatcggtacttgcatcaccgccgttatagcgtctatcggcaccagcacaaacgcgaaacgcactgcgcttattcaccttacgttcaatatcgtgggtacagtgttctttacgattatactgtggtttttctcgccgtgggtcgtaaaactgctgtcttcggtttttcccaatcctcagatgcagattgcctggttccacgtcgcgttcaacgtgattaccaccattttgctgctgccgtttatcaatcagctggtgggactgtcgaagtttgtgataaaagacaaagtaaagccgcagcaggaattgcctcagcttaaatttatcgacgaccgattgctgcacacacccccgatagcggtggttcaggtccagaaagaaatactttttatgtcggagcttgccaaggaaaaccttactctttccatgaacgcgctgcttacgggcgattacgtcaatcgcgcgcgtatcggtaaaaacgaggcgacaatcaactacacttaccatgcgatagcgagataccttataaaacttgcgtcgctttcgctgtcagagtccgacgagaaacttatcggcgcgtaccatcacgtcataagcgatatcgaaagaataggcgaccatgccgaaaactttattgagcaatccgaagaaatggagaaggaaagcatcaatttttcggacgccgcggctgccgagcttaatcagatgtataacaaagtggtgaatatgttcgacttaagcgtacatgcttttgcgcaccgcgattacgtcgtgttggaacgtatttccaaaatagaggaagaagtggacgcgatgaaggagtcgttgggcgcaagccatatcgaaagacttaattccggcgattgcgccgtggaaagaggaacttatttctttgcggttatttcggctctcgagcgtattgcagaccatcttataaacatagcgttctccattaaaaacccgacgggctctcagtccaagaggaaagaacttaacgaagaaaaataattttcggacggtgttattatgatatacgttctcggaagcatcaatatggatatggtggctaacgtgccctatatgcccaaaagcggagaaactctttccgccgataagttttataccaaccccggcggcaagggcgccaatcaggcagtcgccatcgccaagctgggcggaaaagtcaaaatgatcggcaaagtgggcaacgacgctttcggagcgccgcttaaagaacatttatcggcgttcggcgtaaacgtcgatttcgtcacccgtgccgaaacgaacagcggacttgccatgataatcgtagaaaaaggcgacaaccgcattattctcgataaaggcgcaaattacgcgattacggaaaaagacgtggacgaagggctttttgacgcgaaagaaggcgacgttctggtcatgcagctggaaattccgcttgaaatcgtggagtacgccgcgcgccttgctaaaagcaaaaatatgacggtcgttcttaatcccgcgcccgccgtaaagcttaacgaaaacctgatgcaatacgtcgatatagttgctcccaacgaatccgaggcggaaattctgacgggcacttcgcctgccggcgacgtggaaatcgcgcttaccgtcaaaaaactatacgctttgggcgcaaaacgcgtaattataactttaggcgggcgcggctcggttatatccgagggacaaaccattacttatataaaaccgcgtaaggtcaaagtggtggacaccacttccgcgggtgatacgtttatcggcgctttcgtgcttaagttcgcgagcggagcttccgctgccgaggcggcaaatttcgcgtccgttgcttcttccataacaatcacgcgcgagggggcggcgaacagtattcccacgctgaaagaagtccaggaggttatagacagagaaaaatgctgaaaaccgaattacattttcacacatcgcccgtaagcgtttgctcgcgtcttacggcaggggacgctgcggaaaaatactcgaagtgcggctttcaggcacttatgcttacaaatcattacagcaggtcgtacatggaaagcaattccgtatccgaaaaagagtggagggatatcttcttaaacggttaccgcgacatggtaaaggcggcggcgccctacggcatgcgcgtgtttttcggggcggaagtgactctttttgcgccttattcgtcgtacatgcgcgagaaatattccgcggaatacctcgccgcgaattatgccgactacattatcgtcgggcttaccgaaaagacattcctcgaaacgccgttaatgtgcgaccttgacttaaaggaactgcattcgctgtgcggcgacatcggcgcgcttgttgtgcaggcccatccgttcaggaccgaacagaatcattcgcttaaagacgtggcttatcttgacggactggagataaacggtaatgtcggatttaccaccgcaaacgaagaaaaagtgcttgacgttgcgcaaaaaaacaatctgatagtcacttgcggcggcgacacccattgtaactggcacgttttaagaagcgcaacttttattcccgactcggttacggacagcgttaagcttgcagcctatctgaaaaaggtgcgagtacctgaatattctttatccgaacccgacccttttgcgcctccgcgttgttgacaagcgccgacttttttgttataatcctatttacctgatatacaattataaaggcatatacggaggaaattatttatggatattttggctgaactcaataaaatagcggaagaatatcgcggagaaggcaatcttaaagagggcgacgcttttgcagacctcggattcgattccctcgataaagtggagctggtgatggccatcgaggaaaaattcggcatcactttccccgacgacctcaaaatcgataccgtggaccagcttatcgcaaaaatcaaggaacttatggcataaatctttatgaagggatttattcgcaatcagatggacggcatggcggaagaaagctatgccgtttttcaaaaaaaacttgttttcacttctttgcccgtggaggggataagaattccgcggctgagagcgcttgtttccgccgcgggggaagacgagcgccgtgctttcatggacgggtgcgaattttcctctttcgaagaagtgttggtttacggcttctgcgcgggcaaaatccgtgaaaaagaagaattgaaaaaggaaatcgactttcttttgccgcgtttcgacaactgggcgcacgtggactgcgttaccgcgtcgctgtctgcgattaaacgcgacagagatttttttctcggcgcgtacagcggtcttgcgggcgccgagggcgagttttacaagcgctttcttgccgtaatgcttatggatttttatctcgacgaaaaatacgtttccgttgcggcagatatttacgccgggataaaacagggccagtattataccgacatggcgattgcctggggactgtccgtaatgctggttaagtttcccgaaatagcgtttccgttgttggaaagaggcgttttttccgatttcgtaaccctcaaagcaatacaaaaggcgattgagtcacgacgcatttccgaggatatgaaatcaaggcttcgcgccgtgaaaaacgggtttaaagcgttaaagtaaaaaaatttaataaaacccttgatttttgtttaattatatgctatactaacagataaggtaatatttttacaatgataaacaaggacgacaatcagggcgacgtgcccttatcgggccgatgtaggctgaataaatcgatcttaaagagggatatcctttaagcggcgttttttgcgcggcctttttttgttgtaaaaataaaattttctgccttgaaaggagtaaaactttaataaagtatggacggtacacaaataggattgttgcttgcgataatcatactcatcatgttgtcagcttatttttccgcttcggaaatggcttttacgtcggtcaataaaatccgactgatgaacatggaggcaaacggcaataagcgcgcgggggcggtgctgagggctacggaaaatttcgataagcttttgtccaccgtgcttgtaggcaacaacatcgtaaacatcacttccgcatctattgcaacgttgtttttcgattcgcttataaagtctgcaaatcttgccaccacggtttctaccgtagtcatgacggtagtcgtgctgattttcggcgagattacgcctaagctttttgccaaagaaaaacccgaagccttcgctatgcttttctatcctttgttaaaaatgcttatgatagtgcttacgcccataaaccttattttcagcggctggaaatggttgctcagaaaaatattcaagtttaaaaagacttccaccattaccgagggcgagcttcttacaatagtggaaaccgccgaaaacgaaggcgaacttcaggagcacgaatcccagcttattcgttctgccatcgagttcgaggaccttgacgtcaaggatatcatgattcccaggatcaacgtcatcgccgtggaggaaaattcggacatggaatccgtttacgacaagtttgttcagcacggattttcgcgtatgcccgtttatgccgaaaatatcgacgcagttgtgggcataattcacgaaaaggatttttacgcgctgctccacgacggcggcaaggacatcaaaagcattattcagtcttccgtctgcgtgtcctccagcatgaaaatttccactgttttgagaatgctgcaaaaagccaaagtacatatggctatcgttgtcgatgaattcggcggcacggaaggcatagttacgcttgaggatatcttagaggagcttgtcggcgaaatctacgacgaacacgatgaaatcgagatacttttcaaaaaagtggacgacaagacgtttatcgtttccggtgacgaaaacgtggaagatatgtatgaaaaactcgacctttccgcacccgacgacaccgaatccactaccgtcagcggttatattaccgagcttatggataaaataccgcaaacgggagaaaaacttacgttaaaagatatcgaaatcgaagtcacaaaggccagcgcgaaacacgtgcaggaagtcaaagtcacgcttttagaaaacgaggaagaagaaaagaacagtaaaaaccgctccgatgaggaagaggagaataaggagtaattttctcctatcgtcattgccgtcgcgctttatggcggacagtcggcgtaaaaagcttatttaatcccgggtaaacttgttttggaactgattgtgtttaagataaacaagttgtacccgcttataaggcggcaaaccgtaaaaagaccgcggaacagagtttccgcggtcttttctttgctcatttttttaacctaacaaagccgtccgggctttatgccttcttaaaaacaaataaatattcgtgcgcaagcagtaaaaagttgtgctttacgctgcttgtcttccagaatcccgtcgctttacagttgtgttgttctttaatgattatttcttttgttctgaaccctgcaagctcaaaaattcgcatagtttcaaacgcaagcggtttaaccattccttttttgcgtatgtcgcccattaaaacggcgcagaacttgtctttttttaaaacccggtaactttcttgtgcaaccttgtatatttcttttaagaaatctttcatctcaaggtgagaaagatcgttttctatgtcttcgctgtacctgattatattcgagtagggcggatgagtgcaaatcaaatctactgattcgttttcaagaaaatcaaggttacgtgcgtcgccaagacgtacatctaccatacctgcattttcatactcaaacgaacatttttctatgcagcgctgtatcgcgacgggatttacgtccacgcctattacatttcttcctaaaagctttgcctccacaagcgtagttccgccgccgacaaattggtcaagaactaggtcgttttcgtttgaatatcgcagaataatgttgcgcggaatataaggcgaccaatttcctctccattttgcatcgtgagttgcccatttgccacgctcagggaatgcccagacggtattcgtctcaagttcgaaattttcaggttcccatttgatttttttttgttttgatgccatattattttataagttgttcaattattccgttttctaaatcagcaatattataaatactgtccattgtgtcaaaagtttctttgagattgttttttgcagatttccagcctattccgtccgtaaaccagacgaaagcaaatccttttacggattttgattcttgggctagcattttataactacgagccgtttcgtttaattttgaaccagaagatgcataaaaattagtttccaaagcataaaccatatcagaggtttttattacgaaatcaaatcttttttttgcttcgcctttattagacaaagaggaaagatcaagtttccaatttttttctatttcggataaatacatttctttaaaatagtttttgtctttaacgagacctgctttctttatgtaagattccactagattttccatcaagtgtccgccgcgatttttacgaccgttactgtcaagtcctacttcgacgccggtagcataatccacaagattattgatgacgtgcttgcttattaagtcaaataagcctgttttttgcataaaaattttatattgagttgcagtataattcggtttgcgaaaattgtagataaactctccgtcactgtctatggcgtaaatttcatttattcttacggctaaaagaagagggatacattttaaaatttcgggatattttgcaaggagattatcaaagtctttttcaatgtcggttgagccgattagagaatttaaaatattaagttcaacctttattgattcaactttacggtaaactttttgaaagtcaacataatatccgtagtcggaaatactgcttttaaaattactgaaccaagtattaaaatctctcatttgtataattccttttaataattttttatcaaaagttccgtaacgtttccgcgtttatctgctttactgtttatggctcttactgcagtaatacgttgtatattaaattttgaatataattcgtcgaaaaaattgtcttcaaaatttacgttatgagggtctgaattgcttagcaacacttttacacctttgtcggataatttactgaaaaattcagcaagttttatttggtcgtcgtcgttaaactgattttccgtataagaagtaaatgcagacgtaacgtttaacggacgataaggcggatcgaaataaactaaagttttttcgtccgcaaagttttccgcatcatgataatcacaagatcgcattattacattctgtagtgactttgaaattgcttttaagttttccgtgtcgcatattaaaggatttttatattttcctgcgggaacgttaaaatttcctgatttattaactctgtaaagaccattaaaacatgttttgttcagaaatataaacaaagacgctttttcaattgacgtttcagtacttaatttcagttcattaaatttgtctcttttaacgtaataataattttgtcgttcgtttgcgtcaagtttttcgtattgtttctgaagtttgtttagctcatttatcaatgattcacaattgtcttttattactctataggtgtttataagttccttattgttatcgtttatatacacttctttaaacgaataatcgtttagaagcgcaaataaaagcgcacctccgccaacaaaaggctccgcatatttagtaatctttttacctataccgtcaggaaggtttgctttcaaaacttctagaagctgacctttaccgccagcccatttaacaaaaggatgagcgttttctttttttgcgacggcattgcgtttcattcttgcatccgccggtttttccgcattgcgaggaatgatccacatattgccaagcattgccgcgtcgcgtattctgttttcggaacaaagaaccgaaacccgtctttgagagattttccacttttcggcggcttcttttgtagacatatattgaatcatagcgaaactccgtattgatattgcagttatattatattctaaatttcgaatattatcaaacagtttaaatgtatgtgaaagaatttaaaaaacaaaatcagatattgttctgaaatccgattttgttccttaaaatattcctgcagcctattaaattgttcgcttgacgatggagtgtaaggtaaccgcatgttataaaaaaggcggtttaaagacaaatcaatgttcgaactgggagttgtaaaggtcggagtagaagccgcctttttcaagaagttcctcatgcgtacctttttcgatgacgttgcccttgttcatgactaagatgaggtcggcgtttttaattgtggaaagcctgtgcgcgacgataaaggaagttttgttttccataagtttctggaacgctttttgtatccttatttccgtgcgcgtgtcgatggaggaggttgcctcgtcaagaataagcatgggcggatgcgtaagcatcactcttgcaatacacaaaagctgtttctgcccctgcgagatgtttccgccgtcgtcgcccagcacggtgtcgtagcctttttctaagtgcatgataaaattatggatatgcgtcgcttttgccgcgtttatgatttcttcttccgttgcgtccgctttgccgtaggcgatgttgtcgcgcacggttccttttttaagccatgtgtcctgaagcaccatgccgtagctgagccttaatgattttctcgtgactttatttaccggcgtgccgtccacgcggatttcgcccgagtcggcgtcgtaaaagcgcatcaaaaggtttatcaaggtggttttgccgcaccccgtggggcctacgattgcgatgcgctgtccgcttttaaccttaagcgaaaagccttgtataagcggattggtcttgacgtaggagaaataaacgttgtcgatttccacgtttcctttgacgttttcaagctcgtcaaagcctttatccgagggctggtcgggcgcggaaagcagctcgaaaactcttgccgccgccgcagtcgcggtctgaagttcggtaactacgcccgttatttcgttaaaaggctttgtgtactggttggcgtaggtaagaaagcaggaaagcccgcccaccgtaaacgcgctcatgcccaaaacgccttcgcctttaatgaccagatacgcgccaagtatacacaccgctacgtaaaccacgttgttgacgaaacgcgtgcaggggtttacgagggcggagtagaacgcggcgttctgtccccacactttaaggtcgccgtttatgacttcaaaacgttcccgggcgcgcttttcgtaaccgaaaagtttgactacgcgctgattggaaagcatttcggtgataagtccgctcagttccccgcgttttttcgcctgcatggtaaacatattatgacagcctttcgcgatgaagtaggcgacaaacagcgacaggggagtgattaccactaccgccacggtgataagccagttgacggacagcataaaagcaagagtgcccaaaatggtgaccacgccgctgaaaagctgggaaaagccctgaataagtccgtcggaaatctggtctatgtcgtttcccacgcgcgacataaggtcgccctgggagttgttgtcgatataggaaagaggaacgtcgttaagttttttaaaagcgtattgtcttaaatcccttatagtgcggaaggacgcaaagtttatgcacagcgagcttaaatactgcgccacgaccgccgccgtaagcagaagcgcgagtattacggcgtttttgcctataacgccgaagtccacgtttcgttcgcctatgatgtaatcgatggtgcggcccactattacgggcgcgaaaagagttgcggcaatctgcagcgcggaaaagacaagcgccacggctatcacgggaagatagggttttgcgtaaacaagaagttttccgattgcccctttgtttttcggcttaattgcggagtttttcatttctcggattcctccttgttctgggaagaacagatttcgcggtaaacctcgcaggtttcaaaaagctgttcgtgtgtgcccactcccgcgatgcggccttcgtccatgacgactataaggtcgcagtgtcttaccgtggtcgcgcgttgtgaaacggtgacggtggtcagtcccgttttttcgcgcatggaggaaagcgcttttctcagttttgcgtcggtggcaaagtccagcgcgctggagctgtcgtccagaatgagaatttcgggattggatacaagcgcccttgcaacggtcagtctttgccgctgtccgcccgaaaggtttttgccgccctgaagaatctgtttatccagcttttcggggaaagcgttgacgaattccgccgactgcgataccgttaaagcgttttgtatttcttcgtcggtggcgtcggctttgccccaaagcatattgtcgcgcacggtgcctgaaaacaagacggctttttgcggagccatgctgataatcgagccgatttgcgcgccgctgtattctttgacgtttacgccgaaaacacggacttcgccttctgttacgtcgtaaagacggggtataaggcttacaagcgtggatttaccgctgcccgtgccgcccaaaacgcctatgcttgcgccctttgttacggtaagatttatgttgcttaaagagggggacggactgttggcgtaataaaaagtcacgtctttgaattcgattgcgggttcgttttcgtgcgggacggcgccttttccctccgtcatggaagattttacgtcgaatacttcgttgattcgcgcggcggaagcggacgctttggtaaagatgacgagaaggtttgcaaacaccacaagcgcgtttagtatctgcatcatgtagttgacaagcgcaatcacttcgccctgagtaagatttccgtaataaacctgcttgcctccgaagaacaaaagcgcgattatcgcgacgttcagcaccgcataggtaaggggattgagaagcgctgacagcgcacccacccgtatggaagcgcggcttaagctgtcggcggcggcgttaaaggtgcgtttttcgcgttcctccgcgccgaacgcccttaccactcttgcgcccgatagattttcgcgggtgtaaagtgtcacggtgtccagcttggactggacttctttatatttgggcatcgtggtagtaagaattataaacagaatccctcccacgacgacagctacggcaaggaagataagcgacagcttaaggtcgattatcatcgccatgactatcgagcccacaattataaagggcgcgcgcgtgaccagtcgtataaacatcgcaaccgcctgttgcgtctggtttatgtccgccgtaagcctggtaataagggaaggggtggaaaacaaatccagctccctgtaagaaaaagtattgacgtgggcataaagctcccgccttaaattggtgccgaaaccaagcgacgcgcgcgaggcgaaaaactgcgccgtaagcgaaaaagccagtccgaaaacgcctaaagcaacgattatcgcaccgcccgttattagcgccgtgtaatcgccttgttgacctttaggaatggccgtgtctattacccacgccacgacaagcggagtaatcagctcgaacaccgcttcggtcagcttgaaaaaagggcccgaaacggttttgaaccaatatccttttaaaaatcttataagtttaaacatatttctttccgtatttttagtctgaactaaattttatcacaaaaatccttttacgtaaacatattttatgcaaaattgtgttattcagtgattgaccttatcggcaaggtctgttaaaatataccaaaaggagaaaagcgttttaatgaatatcgtcaaattgctgcccgcagttaagactcccgtctggggcgggcataaaatatccgcatggggcaaaaaaggctgcagcggtaaaatcggcgaaacgtgggaactttcttttttaagcgaggggccttcgcgtatcgacggcggcgaatacgacacggaagagcttaagaaagtcgcggataaagaagacataggtaaagccgcggaaaaattcggaaaatttcccgttctcgtaaagtttatcgacgccgcggcggatttgtccgttcaggtgcatcccgacgacggttacgccttgaaagaaggtctcggttacggtaagaccgaaatgtggtacgtcatggacgcggaagccggcgccggtatttacctcggatttaaccgcaacgttacgaaagaagaagtttacgatatggccaaaaacggtactataaccgatgcgcttaactttattcccgtaaaaaaaggcgacttcttttttgtaaaagcgggtgtggttcacgccataggcgcaggcgttacggtcgcggaaattcagcaaagttccgaccttacttacagggttttcgactataaccgattgggtgccgacggaaaacccagacagcttcaccttgacgaggcgcttaaagtaatggatttttccgcctttataccggataaaccggtcatgactcaagggtcgttgcaatgcgcggattttgattttaagccgttaaagatagccgaatgtaattatttttccgtttacaagtgccgcggtaaaggcgaatttgtttcccccctcagttttgtcgccgtgatttgcactttcggaagcggagaaatatgcggtaaagaaattaaaaaaggcgaaacgtttttcgttcctgcggggcagaagttcagcatggacggcggcgcggagtatttacttgcgggcgtgggcatttaagacgtttgcacaataggacagtaaatgtttattttggcttggcaagcggtattcggcttgcgctgaattaaccgttttgataaattttaaatactataataacagatagaatacgcggcaacgccgcattatgagaggataaaaaatgacaacggaacaacttgactcgatcgcaagaaaattcgatatagaaggtgaagtgatttcttacgctccctacggcgacgggcatataaacgatacgtaccttatcaacacaacgaaacgcaagtacatattgcagcgcatcaacaattcggttttcaaagacgttgatttgttgatgggcaacatcgaaaaggtactcagtcacgcaaaaaagagcatcattgcttacggcggcgaccccgagcgcgagactatgacgctggtacttaccaaggacggcgataagtattacaggttcggagaaaaatattaccgcgtttatatctttatagataagaccgtatcgcttaatatggcgcgtaccgacgaagatttttaccaaagcggcgtgggtttcggaaaattcgcgcggcttttaagcggcttcgacgcggacgaaatccgcgacgttattcccgatttccacaatacccgcgtgcgttttgccaatttcgtgcgcacgcttgaaaaagacgtgctcggccgcgcggcggagtgcaaaaaagaaatagatttcgtgcttaagcgggaagagctttgcggcaagctggtggatatgctggctagcggcgagatgaaaagccgcgttactcataacgataccaagcttaataacgtgcttcttgacgaaaaaacgggcaaagccgttgccgtcatcgaccttgacaccgtcatgaagggaagcgcttgttacgacttcggcgactcggtaagattcgggtgcagtaccgctctcgaggacgaggaggacttgtctaaggttcatttttctctgccccttttcgaagtgtattcaaaaggattcctgggcgcgcttgaaggcgctttgaccgataccgaggttaagaatatgccgcttggttccattatgatgacgcttgaatgcggcatgagatttctgaccgactatctcgacggagacaattacttcaaaatttccaaggataagcacaatctcattcgctgccgcactcagttccgtctggtggaggaaatggagcgcgattacgataaaatgcttgctattgtcaacaagtacgcctaatgcgtgcgtgactttttgatattttcgtcggttttttctgtcattttaccgttgcgatttgctcttttcggtgctataatataaaagactttttaacttaaggggtaatgttatggtaaatctggggcaatccacggaaaatattctggtagcgggacatcgaggaatttgcgcgttgtatcccgaaaacacaatggtttcatttcgcgccgcgcttgaagcggacgttgacaacatcgagatggaccttaacgtcacgcgcgacggcagacttgtcgtcattcacgacaccacgcttgaccgcactaccgacggagagggcaaggtgcgcgattatactttcgaccagataaagtctttcgacgcgggcgcaaagttcgataaaaagtttaaaggcgaaaaaataccttctttcgaggaatttcttgagctggtcgcgccttcgcgcatttcgcttaacgtagagcttaaggattatactttcgagtgcgccgataaagcagtggctctgctgcttgaatacggatttaaggacaggtttgtcataacttctttcgacgccaacatcacgcagtacgtccatcaggtgctgggctttcccacgcagggctttcctctcgaaaaaatgcacaacgcttccaacgacacttacaagcatttgtctgccgtcggcatgggaagctggtggatagaccggtcgctttccgccgccgaattccgtaaaatgggcatcgattattggacgtggtgtcccgataccgaggaagaagtcattcgccatatcgccacgggcgcaagccttatgacctgcaacaatccttttcccgcgcttaaagtgcttaaggagaggggactgcacaagtaattctcgcgacaaaataaattttttgtccgtgaaaaattgcttttcgtttgttttaagttttcagtaaaaaacctgtgattaagcgacttgaattaaaaaaccttgatttataaagctgcgcgtaaaatctttccgtcaaccctgttgttttgacagtgcttttgcggatttatcctctttatgcgtaaaataaaaaaacttcgggttttgttctgcagctaagataaatcgattcggaaagttatttcaggggctttaaccaaaagcatcttaaggttgagtaaagaatttaaaagtatttattaataaaaaaagggcggaggagtaaaaatccttcgtcctttttgcgtaaaaagactttacatactgcggttacagtaaagccttttgtaaatgttggaagtagagggggtaagcagcatgtattcgtctttggaaaggctgttgaaatccgcgccgaagcaggaacagtattcttttatcagcggcaaaatttcgcttttgtcggcgttggtctttacgtccacctgaggaggaaggtcgcgcggcatactgcgcgtgcggatgtaaattttaccgccgtactgaccggtcgcgcaaaacgcgcctaccgggcaaacgttttcgtatccgattccaagcacaagaataatgccgcccgcctgatattcgcccagaaagtcgcccgctttgccgccgattatgattttcgggacgtgactgccgtattccttcatgtggatgcccacacggaaccccgcgtcgccctccaccataatagtgccgccgcgcatggcgtagcctatggtgtcgcccgcgtgcccgaatacggtaatagaacctgaattcatggtgtcgcccgcggcgtcctgtgcgtttccgtaaaccttgaccaaggtgttgctgag

SEQ ID NO: 3261 - DNA, 6594 bp, Unknown
  16S sequences of unknown bacteria
tcttccgatcttctcgccggtcagcgcggcctcgttcacggcgctcctgccccagggcaagaacctggccggggtgttctgccagccggagctggtgatctgcgacaccgccgccctggacaccctcaccgaccattattttgccgacggctgcgccgagggcatcaaatatggcctgctggccgacaaagaactgtttgacgcctttgcccgaggactgaaccgccgggatatggacgacatcgtctgccggtgcgtggagatcaagcgggacttcgttcagggggacgaacatgacatgggcaagcggcagatgctcaatctggggcacaccgtgggccatgccatcgaaaagctcagcggctactctatttcccacggccatgccgtggccatgggcatggtggtcatgtgccgggccgcctattctctgggctattcccaggaaaactgcaccccgcccctgctccaggccctggatgcctgccatctcccctcggcctgcccctatgacgccgcatctctggcaaaagcagccctgtcggacaaaaagcgccggggagataacctgactctgattctgcccctgcgcatgggcgagtgctgccgggagaccatccccatgaaggacctggaaggcttcattgccgccggactgggggagcggtaacatggatatctgcatcacccccgccccattgggcgggcgggagcaggcggtgccctccaaatcccacgcccaccggctgcttctctgcgccgccctatgccgggaaagcaccctgctccatatccccgctccctcggtggacattctggtcaccatggattgcctgcgggccctgggatgccagatcgattctctgccgggcggagacttccgcctgaccccgccggaagtcttttccccctctcccgcccttttctgccgggaaagcggctccaccctccgctttttgctgccggtggcggcggctttgggagtggaggcccgcttctccggggaaggacggctgccggagcggccattggatgagctgctgacccagctcatggagcacggcgcagccttttccgcaccaatccttcccttcaccctttcggggaagctgaaaggcggcgtctttaccctgccgggggatgtgagcagccaatatatcaccggcctgcttctggccgcccctctaatggaagaaggatgtgaaatcgtcctcacctccccccttcagtcagccccctatgtggaaatgaccctttcggccatggcccagtttggggtcatggtggaaaagacttcccatggctttctggttcccccggggcagcactaccaaagccccggtccggtcacagccgagggggactggtcgggcgcggccttcttcctctgcgccggagccctgggcgggccggtgaccgtctccggccttgctccccgctcttcccagggggataaggcggtggccgatatcctccgggatatgggcgctatactctcctgggatggagatgccctcaccgtctcccgaggtacgctccgggctgtcacagtggacagcgcccccattcccgacctgatcccggtgctggccctcaccgccgctttctgtgagggcgaaagccgcttcacaaacgccggacgcctgcggctgaaggaaagcgatcgtctcagcgccatctgccgcatgatcaccgatttgggcggcacggctttctgtgagggagacaccctcatcgtccggggcggcaccctgcggggcggcacggtaacaagcggcggcgatcaccgcatggccatggccgctgccgtggccgcctgcctgtgccgggagccggtgactgtccagcaagcccaggcggtggacaaatcctaccccagcttctgggaggaatacaacaagagaggaggaaaggcccatgagctccaccttcggccatagcctgcgcatcagcgtgttcggccaatcccattcccctgccatcggcgtgaccatagacggtctgcccgcagggctgaaagtggacatggaggaagtgtctgcttttctggcccgccgggctcccggccagggggcctatgccaccgcccggaaggaaagcgatgcgccggaagtgctttccggcctggtggacggctttacctgcggcgcacccctctgcgccgtgatccacaacaaggacacccgttccaaagactacgaagccatgcgccagcttccccggccctcccacgccgactatgccgcctatgtgaaatacggccagtaccacgacatccggggcggcggccatttttccggccgtctcaccgctccattgtgctttgccggggcggtggccatgcagtttctccggcaaaagggcgtttcagtgggcgcgcacattgcttccatcggggaggtggaggacacccccttttctccggtggacctcaccgaaaaagaactgctcaccccttcccgccgcagcttcccggtgctgtcggaggaagcgggagaaaaaatgctctccctcatcgcccaggtgaagagcgaaggggacagcatcggcggcaccatccagggcgctgccatcggcctgccccccggcctgggcgagcccatgttccagggggtggaaaacctgctggccggggcgctgttcgccattcccgccatgcgtggggtggagttcggggccggctttgccgcatcccgaatgcggggcagccagcacaacgaccccttttaccgggacgaagaggaccgggtgcgcacccgcaccaaccgccacggcggtgtgctggggggcatcacctcgggaatgcccctgctcttccgctgcgccatcaagcccaccccctccatcgcccttccccaggagacggtgcggctttccggcggtgaggacaccctgcgcatcgaaggccgccacgacccctgcatcctcccccgggcggtgccctgtgtggaggcggtgactgccctggtgctctgtgacctgtggctgaccacttacggcaatcaaagaacagaaaaatagatggaatgaaaggatgaaacaccatggaactgaccgacctgcgcggccggatcgatgagatcgatacacagctggctcaacttttcaaacagcggatggacattgcccggcaggtggccgagcaaaaggccaaaaccggcaaacaggtgctggacccctcccgggaacggcaggtgctctcccgggtatccgacctggtaggcgaggactacgaaagctatgcccggcttttgtggaacaccctgtttgatgtgagccgctccagccagcggcgcgccctggcccaggacaccccgctgaaagagcacatcgcaaaggccctccaggatacccccgccctcttccccaaaaaagcggtggtggcggtgcagggcgtggagggagcctattcccagcaggcctgcgacaaactgttcgccctgccctccattctctatttcaatcagtttgaaggggtgttccaggcggtggaaaagggcctgtgcccctatggcatcctgcccatcgaaaacagctcggccggctctgtcacccaggtctatgacctgatgaagcagtataacttccacatcgtccgctccatcaagctgaaggtggaccacgctctgctcgtaaatcccggcgccaccctctcggacatcaaggaagtgtgctcccacagccagggcctgaaccagtgcacccgcttcctcaaggagcacccggagatcaagatcaccgtcatggaaaacacggcggccgccgcacggtatgtggccgaaagcggccggaaggatatcgccgccatctcttctctcaactgcgcccggctctatggcctgacccccattctggaaaacttccaggacagcgaccacaactacacccgcttcatctgcatcggcaaaaatctggagatcttccccggttcggacaaaatcagcctgatgctcaccctgccccatgaacccggctccctccatgggctgatcgcccgctttgccgccctggggctcaacctgaccaagctggaaagccgccccatccccggcaaggatttccagttcatgttctatttcgatttctccggctccttccaggagcaggccgtgctggatatggtgagcactctgtgccgggatctgccttcctgcaccttcctgggcgcttacagcgaggtgttttaacatggcggattacggcctgatcggaaaccccttgggccacagcttttccccccagctccaccgggctctggggggatatgactacgccctgtggcctctggaagagccgcagttggagccttttctcacaaaaagggaattttccgccgtcaatgtgaccattccctataaaaaagccgtcattccctattgcgccgctctcactgaggaagcccagtccatcggcagcgtcaactgcctgcggaaagagccggacggcacccttctgggccacaacaccgacctgtacggcctactgtacctggccaggcgggccggggtgcagctgaaaggaaaaaaggtggccatcctgggcagcggcggcaccagcctgacggcccaggccgcagccagaaaagaaggagcccgggaagttctggtggtctcccgccggggagagctgacctatgaacggctcgtgaaagaacaccgggacatcgaggtgctcatcaacaccactccggtgggaatgttcccccacgagggggcatacgccgtagaccccagcctgttcccccacctggagggggcgctggatgcggtgtataaccctctgcgcaccgcctttatccagaaagtggaggacatgggtctcccctgctccggcggacttcccatgctggccgcccaggcctgggcggcggcacggtttttcactggggaagagatcccggaagaaaagctggaaaaggctctgagccagctggagctttccctcacaaacctcatcctctgcggcatgcccggctcgggaaaaagctccctgggggccttgtgtgcccagcagctgggacgaacctttgtggatctggatacagaaatcgaaaaggcggcaggctgctccatcccggagatcttccagaaagagggcgaagaaggcttccgcaggagagaaacagaggccctgcggcagctcagccgggaaaaggggctggtactggccaccggcggcggcacggtgctgcgggaagaaaaccagggtctgctgcggcagaacggcctgtgcgtatgggtgcgccggccgctggaaagcctgcccaccgaagggcggcccctgtcccaggggggccttgcaaagctgcaggccatgtaccaggcccgggagcctttgtaccgcaaggtgagccaggccattttggaaaacaccggcacactacaagaaggagcggaaaagctccgggaggtattttatgaaactgctcatcatcaacggccctaacatcaacctgctgggggtgcgggaaaagcacatctacggcaatgaaagctatgaagatctgctgcgctttatcgatgaagcctgccagaaggcaggagtagagcatgaatgcttccagtccaaccacgaaggggatatcgtggacaagatccagcaggccctgggtgtttttgacggcatcgtcatcaacccggccgcctacacccacaccagcgtggccattctggacgccttgaaagcggtgaatctcccggcggtggaggtgcatctgtcggacatctcccagcgggaggagttccggaaaatttcctatgcgggtatggcctgccaggccacctttgccggtctgggcttcaagggctatgaaaaggccattctctatctgaaggagcttctcaaatgatctatcctcaggtggtggagggggtctttctccgccgtcccaaccggttcatcgcccatgtggagatcgagggcaaagaagaagtgtgccatgtgaagaacaccggccggtgccgtgaacttctggttcccggctgtcgggtttatctggcaaaggcccagaacaaaaaccggcgcactgggtttgacctgatcgccgtatggaagggagaaaagctcatcaacatggacagcgccgctcccaaccaggtgttccgggagtgggcgccctcttccgggctgttcggggaaagcccccgcatccggcccgagaccacccacggggattcccggttcgatttctacatcgaagggggaacaaaacctgcctttgtggaagtgaagggatgcaccctggaaaacgaaggccgggtctatttccccgatgcccccacccagcggggtgtcaagcacctggaagggctgatccggtgcaaagaagagggatatgacgccatggcggtatttgtggtgcagatggaaaatgtgctctccttctcccccaacgatgtgacccaccccgcctttggtcaggcgctgcggaaagcccgggagcaaggcgtccggctcctggccctctcctgccatacccagccggacaagctggagatcgcagaccccgttcccatccagctgtgacatttcccctgaggaaatcataaccactagtaaactagtggtttgctcagaccccataggggtcagtac

SEQ ID NO: 3262 - DNA, 29193 bp, Unknown
  16S sequences of unknown bacteria
aagaaaaaactattgacaacagttttccccgcaggtgcgggggtgatcccggttctgacggtaaacagcacagtagaattcagttttccccgcaggtgcgggggtgatcccgacttattgaaagagcaaaagaaagaagattaagttttccccgcaggtgcgggggtgatcccgaggtcttttgatttcactgccttttgccaaagttttccccgcaggtgcgggggtgatccttaacttactataaggagcgataacatgagtcagttttccccgcaggtgcgggggtgatcctgtacagatatcaaaaaggctttatttttaatagttttccccgcaggtgcgggggtgatcctttcgcatagaagttgtttttccgcttcccgatgttttccccgcaggtgcgggggtgatcctctactgtgcagcctacgggaagtacacagcctgttttccccgcaggtgcgggggtgatcctttggtgcaaatggtcataaaagatttgcccaggttttccccgcaggtgcgggggtgatcctccgattatataccgcaatagcgaagtggacgagttttccccgcaggtgcgggggtgatcccaggggaaaacgccacagtcgggtgctacccacgttttccccgcaggtgcgggggtgatcctgggactatacttgggcagaaaatcctagtcttgttttccccgcaggtgcgggggtgatccccgtaaaatccatctataatcataattcatagtgttttccccgcaggtgcgggggtgatcctctctttaatagaatcttgcatttgttttgacagttttccccgcaggtgcgggggtgatccttgacagagttgtcatagacccatctgcggccagttttccccgcaggtgcgggggtgatcccattaacttttctcaagttttacaagaagctttgttttccccgcaggtgcgggggtgatccgccccagaggagcggcaactcctactaagggcagttttccccgcaggtgcgggggtgatcctgagcaaatcaaaaatattagaagcgttggcttgttttccccgcaggtgcgggggtgatccttatgtggaggaactaaaaaaagagtatgtcgggttttccccgcaggtgcgggggtgatcccaataacgcttgctttacatatacctttcatcggttttccccgcaggtgcgggggtgatccctttgcattcattaacataaatatattttaattgttttccccgcaggtgcgggggtgatcctcaccccgcgtttgcaggcgatacacaaaataagttttccccgcaggtgcgggggtgatcctttgaaagccaacgtgtcccccacctaaccagtgttttccccgcaggtgcgggggtgatcctattccggattgactttaaaaaaactcgcaatagttttccccgcaggtgcgggggtgatcctggaaggaattcaaatagccgaaagcgggacttgttttccccgcaggtgcgggggtgatcccttgcggtttttgctggataaagagaacaaaaagttttccccgcaggtgcgggggtgatcccgagaaccagatgtttttatgataaaaaaactcgttttccccgcaggtgcgggggtgatccctggtaacagttttatccaatccggatttgattgttttccccgcaggtgcgggggtgatccttaatcaatcaaacgctttttgctgtcggtaatggttttccccgcaggtgcgggggtgatcctagcttctggcaccgatgccattaaaaacaaatgttttccccgcaggtgcgggggtgatcctcttgataagcgttacagagaggacataacatagttttccccgcaggtgcgggggtgatccctttgtcgagcagccagcacgcatcatcaaagcgttttccccgcaggtgcgggggtgatcctgattataacgggtgttggtatatagaaatcgtgttttccccgcaggtgcgggggtgatcctcccactgacgaaatttacgtcatcgaccgtgcaagttcccggaataacaggggtgagccttgcttatggcattcccataaatcaattagatttttccagaaaatgaggcttttgttccaagatatatctgaatggtgtaattaatgctatctaggcatcaacatcataatcaggttttccgtaatgcagggataaattttatatcagggtcagaggatcggtatgatactgctttcctctcattgagggggtgttccttgtgttatggtaaaggagttgtcctgattgggtttccctgctgatgtaggggtattccttgtatagtggtaaaagatctgtctaggttgttttttctaaaaaatgtcggagtatttttcattcatgtcaagattttactcattttcagaggtatatatcaatcaaagatgattctatattctgtttatagtatgattttttgtctatttccctgcagcgtaaaaatttcttgtttttaagtgcattgtcatacagaaagaaattttttgcaggcgcagggatgttccaatgggacagatacccaatttggaaaagcttatggctttttgttggttggtgattgctcctctttcgctgcatattgacaaaagagctgtatccttgcaatggcaaggatgctcctgagggtggtgaaccgtattggagctggtaagttttccctgtatttgcaggggtcatcctatcatactctggtcccgggtggtcaggtcatcgtttctctgcaggtgcagaggtgttccttacggtggcggttatataggttatgtggcattttgattgatgagatggccgaaaaatagatagacggatatcttcatagatatccgtctatttgcttttatatcccgatatgagagttagattatacaatatcgtttaatgttccaaatgtgtacccttgctcctctaaagtagtcaagaattcatctaaaatttcagcatttgttttagaagtactgtgcagtaaaataacggctcccgggtgaaccctcggcaataatttttcgagtgcttcttctcgggttggttggttatctacgtaccaatctacataggccaggctccaaaacacagttttatatcccaattcactggcctgctttaaattgctttcactgaattttccttggggaggacgatagagtttttgcatctcttgtcccgttgtctgttgatataatgcctctaaatcctccaactctttttgaaacgaggtaatgtccgatatttttgacatatcagggtggtggtacgtatggtttcctacaatgtgtccttcctccaccatacgattaatcaaatcaggactggtttctatgtaattgcccactacaaagaaagttgcttttacattatgcttttttaaagtgtccaaaattgccggagtatatccgttttcataacctgcatcaaatgtaatatatacttctttttttgatgtatctcctacataaaaagagttgtattgttgcaaaaactcggaagatgcatttcctataggagttccgccgtcttttggaaaactaagtccccagtttgtgttggccgatgttgacgcctgtactgcttctgcagcgttattcgtataatggattgctacaggaattgcaataatggttaaaatacaggccgcaactgcaataatgattttcttttttaatacaataaacatcttctcaccacctcaatcatccgtgtgttttaaaccatatgcgtcacagcttgtcatgtattcttaaattatttacaaaatgtttgcagtaatgatacttcattctggatagatacggtatcggcaatcaattgtacagtcgataaattttgtatgaaacaaagattgctttctttctgaatgtattttataataacatcttaaagaaattgctgcatagaagacggatgtagaaaggatttacgatttatgaaggaacgtattcgtattataaatacagaaggaaaggccagaagaggtgaaattcatactccccatggagtggtgcaaacacccgcctttatgaatgtggctacttgcggtgcaattaagggtgcggtttctgctttggatttaaaagacctaaagtgtcaggttcagctgtgcaatacgtatcacctgcatttaaggccaggagatgagattgtcaaacaattgggaggattgcacaagtttacaaactggcaaggtccaattttaactgacagcggcggctttcaagtgttctctttggcaaaactgagaaatattaaagaagaaggggtaacctttgcttctcatatagacggacgaaaaatttttatgggtccggaagaaagcatgcgcattcagtctcatttgggctctaccattgcaatggcttttgatgagtgtattgaaaatccggctgcgtatgagtatgtaaagcaatcctgcgccagaacattgcgctggctatatcgctgtaaggaagaattggaacgcctcaatgccaaagcggataccattaatcgagaacaatggctgtggggcattaaccaaggaagcacctatgaagatttgagaaaacagcatatgtgtgatattcgagagctggatttggacggctatgcaatcggcggtttggcggtaggagaaacggcagaagaaatgtatcgaattatagaagcggtagaaccggaaatgccggcttgcaaaccacgttatttgatgggagtgggtacacctgccaatattttggaggcagtctctcgaggcattgatatctttgactgtgttatgccaacccgtaatgcccgtcacggacatgcatttactatggaaggctgccgtaatctgatgaatgcaaaatacgagttggacgaaaatccgattgatgaaacttgtgattgtcctgtttgcacacatcatacacgtgcgtatgtgcatcatctgttaaaaagcaaagaaatgctcgggatgcgtttggctgtcatgcataatttatatttctataattcttttatggaaaagataagaacagccttggattcaggcagttttcaggccttttacagtgaaacgatacataaagtatccagaagaatataattctacattttatgcttgcaaccgtatgaaaatattgttataataaacatcgacaacatggaggtgtaaaataaatggataatatttgggctttagaagctgccgctgaatccggcggcggtaataatagttggtggattatgattatcatttacgcagtgattattctcggtgcgtattttctattattacgtccaaactctaaaaagaagaaaaaagaggaagcaaaccgcaaaaatgcgaaaataggtgatgaaattacaaccattggtggtattgtaggccgtattgtagctgtaaaagatgaaagtgataccattattattgagacaggtactgaccgccaaagactgcgtttaaaacgttgggcaatcagttctgtagagacacctcttgatcgtgtacagcaggcagctaccgaatcttccgagaataaacctgcagagaaaaaaggtttgttcggtcgcaaaaaagaagaaaccaaaccagaaacaaaagaagaaaaataatcttttccttttttgtacatcataaaatctccttcgtatgaatacctttaggtatgaggtattggtgagggggatttttttatatgaaaaaaagcagagaaacatcggacagcacatttgccaagtgtttaaaatatttagtcatcggctgtattgcaggtttgttcctatgtgcggcgttattggccatttgtgcgtttgtgtttgttttggtgaaaacaattcctacacaggcaattcaggcagtaagtattggtatttcggcattaagcgctatgtttgcgggatttttgtctgcaaaactatgccacagtaaaggtttgattatgggattattcagcggattgattttgtttgcttgtgtattgatttccgccttttccacaggaggaaatgtatttaccgtttccactgcaatgaggtttcttctgatgatgattggcggtgcgtttggcggtgtgcttgcggtaaacaaacgtaaaaaagtaaaataacatctttcatttttcgttttattatgatataattcagtcagtgtaaaaaaggagatgtttatcaatgaaacaaatcaagactttaaaccaagcaaatttaaagcaaagcgctgtgaaaggcggctgtggcgaatgtcaagcatcttgtcaatctgcttgcaaaacatcttgcacagttgctaaccaaaaatgtgagaacgagaacaatcaataattgaatcgaaatcacttttcagggacagcgtgctgtccctgaaatttttgcaataattggagaaagaaaaatgatacataaatatacgttaaacggttttcatattgtattggataccaacagcggtgcagtacatgtatttgatgatgcgccatacgatatgttggattatttagaggatgaagtaccgcagcaggctcccaaacagatgatggatgacctgcgcaaaaaatatgatgaagcgactttaaccgaggcttacgatgaactaaaggagctgtatgaaaacggccagctctattcggaggacggctatcacaatttttccgcaatgctgaaagaagcgccggtaaaatccatgtgtttgaatgtagcgcatgactgtaatttgcgctgtgaatattgctttgccgcaaagggtgactttggctgcggcagaaaattgatgcctttggaagttggaaaaaaagcaatcgactttttaattgaacattccaaaggaagacgcaatttggaactggatttctttggtggtgaaccactgatgaatttcaaagtggtaaaacaaattgtggaatatgcaagaagtcaagaagaaaaacacaataaaaaattccgctttaccatgacaaccaacggcttactgttgacagacgatgtcattgagtatttgaataaagaaatgtataatgttgttctgtcattggacggaagaaaagaaattaatgatatgctgcgtgtacatgcagacggaagcggttgctatgatgcgattgtaccaaaatacaaaaagctgattgcaaccagaggggacaaggattattatgtaagaggtacgtttaccaagcataatttggactttgcaaaagatgcggttcatatggcggagctgggttttgaccaagtatcggtagaacctgtggtgtctgaccctaaacttccatactctttgcaggaagaagatttgccggcagcatttgccgaatatgagaatttggcaaatattttgatagaccgcaaaaagaaaggaaaagggtttaactttttccacttcatgatagatttgaaccaaggtccgtgtgccattaaacgtttgcgcggctgtggctgcggcaatgagtatgtttgtgtgacaccggaaggagacatttatccatgccaccaatttgttggggaagaaaaatggaaaatgggcaatattatggaggatacctttgatattcccatgaagcaggaatttgcgcttaccaacgtgtatagcaaagaggattgcaaagactgttgggcaaaattctactgtagcggtggttgtgcagccaacagttggcaatatgaaggcaatatcttaaaatcgcataagctttcatgtgatttagagaaaaaacgattggaatgtgccattatgatgaaagctgctatggcataaacaaatatttgatagaaaaagcagtatgacttagggcgtactgcttttttattatgaaatagcaatttatagttgtgcataaccataatagagagaaatcgtttttacctatcttcagattgttgtttgttgacaaaaggtactctctcatatcttagcagggtaccaaagcatcattgaaaagagacagaaaacaataagatgcagtgcagagcagtaaggctctgtgctgccatcccgaccccaaaaaaacattccgaaaaaagaaaaatggatatcgtaggcggaaaaagaaaagagaagaagcggagtgacccgaaaggttttttatcttcaaaaacgtggaaaatcactctccgagttgccggacagacattcaaaatccgcgtggaaatttcagattgtcggaagaaaaaggataatcgggtttgcctcggggatgatttggggtgattcccggagtcagatgcgaattttttatttgcgaaagatgcgaaaacagcatattttcgatgattttagagaaagtgccctaagtcgaagcatttcagcaggactgcggagaacagaggtcgggtacggttagggtagaaaacgtgacgacaggggaatttgctctttttggagtatggggttatcctctgacaattatcgtgaaaaatggcaatcaaaatgcagatattacagtttgatacagtcataccgaacatggtcgcttttccataatattagaaaaagtaaaaataattgtaaaaaatcattgggaataaatgatgaaacattgctttatttatttcactttgtaggaattatgcgaaaattatcggattatgtcttgcactctttttctaaaagtattatcataatagaacgacaaatgtacaaaaaagagggtaatcgtgtggaaaatacagtattaggtttcattggcgcaggaaacatggctactgccattatcaacggaattgtatctactgagacaatgcgcccatctcaaattgcagtatttgatgtcaatgaagaaaaatgtgcttattttaaacaaataggtgttcaagcggcttcttccgcttcagaattggcaagtgcttgcagcattattgtgcttgcagtgaagccgcaaaattttgaagaagttttaacagaaatcaaagaacaagtaacggaacaaaagctcatggtttctattgctgccggtatttctaccgactatattcgtaccactttgggatgtcaatgccccgttattcgtaccatgccgaatacacctttgcttttgagccaaggtgctaccgctatgtgccgctctcaaggtgtaacagatgaaatgttcgaaactgtggaagaatttttctcctcctgcggtaccgtttcagagttggaagaatcacaaatgaatgcagtaatttccgtaaacggcagcagcccggcatatttttatttgtttgcaaaagcaatgctggataacgctgaaaagcaaggaattgaaaaggaagttgcattgccgatgattgcgcaaacgttaatcggcagcgcaggcatgcttgtatattccggtaaaactccggatgaattaattgaaatggtatcctctccgggaggaactacattggaagcgttaaatgtgttctatcagcatgatttggaaaaaattgtagacgaggcaatgcttgcttgtacaaaaagagcggaggaattaggaaaataattcataattgtcctaaggtatacataattatgaaccagacaacttgtttgggggattataaatactatgagacggacaaacttattttttgtaaaagtacccaaagaacatagaggcacaagaacggtaggcagtcggtcaggaggattttcttccggttatcgcggtggaattctgcaaattttccgtcagcagttcttgttggtgtttttgggattgtttttaattgcaggcctcattttaggagtcatattcattcgcaatgcggattattctttattaaaaacattggattttgtatttttcagcaatgtgaaagcaagaagcgcattgcctgtgttatctatctttgtagcatcgttggcatcatcttttttgtttttattattttgttttttatgtggactgtccatatggggggcctattgtgttccgttggctccgttattccgtggatttggcatgggaattacagccggatatctgtatgctgcctatggattccaaggatttttatttcatttggctgttattttaccgggagcatttatttgtctgattgccattttaatcgcttccagagaaagcatgctgttttccaaaaagatacatcttggcaggaagacggaagagcaggaagcgcagccgaaaaacaatgtgcggcatttttttattcgtttttctattttaactggaatattaatcataggcgctttggtagatgtactgaccacagtctgcttttccggcttatttgtattttgattgagaggtgacgttaaaaatgagagaatatgtttcgcagtttcgggaatatctgaccgagaaaaaagcagtatctgaaaatacattgcagtcctatatgcgggatattcaacattttttaacgtttatgaaagaacatcaatttacagatttgctcaaagcggatgataccatgatgcatttatatgtggaggaactgacccgtcagaatctttcaaatgcgactattacacggcgtttggcctccatacgttgtttttatcaatttctgatgcagaattatcatataacggtgaatccggcaaaacatattaagttagaaaaatctcccaaaaaattacctcattttttaaacggtgcggaaattgatttgttgttggcacagccgaacattgctgaaccgaagggctgccgcgacaaagcaattttagaattgctctatgcaacaggaattcgcgcaacagagctggttgaactgaatttgggagacattaatctaaaatcaggtttgcttcgctgtaagggaaaggcagaccgtattattcccgtatatcctacggcagtcaaagcggttgcgacttatattacgcgtgtcagaagcgtatcattatgtgatgacgatacagaacaacctttatttgtaaatttaaacggcaatcgtctgacgcggcagggcttttggaaaattgtaaaaggttatgccgaacaagcaaatattaccaaggaaattacacctcatacgctgcgccattcttttgccttgcatttgctggaaaatggtgcggatttaaaagatattcaaacgatgatgggacatgcggatatctcttctacacaagtgtacgttcagcttttggattctcacttcaaagaggtgtatcataattgccatccgcgtgcgaaagtataactgacaaaacataaatgaatgtttttaaaaataggactaaaattttaaaaatacaaagaaatgccccgatgttacttttccgtagcatgggggcttttggataagagcaaagagtacatttacaatcatgcaatatggtgcagctgaaagtacaaaataacgaaaaaacggtatcggaacagagagttttgttatctttgctgattgacatgtttggattcaatcaaataaaaaataagatgccaagcaaacaggaactgtccctttatggtaaatggtgtggaacagcatcaattctgtatgaatctacttttcttgtgcgtgaaaatatttcccttgcaggttgaatgggaaaaatgatattgaaatatcaaattcaatatgatactataaaaacactttaaaggagtggttcaaaatgaacgagaaagaattattggaagaattgattaagtctgttaatagaatgcaagaagacatttcagaaatcaaagatagaacccttaaaattgaggagagaacttcaaagattgaagatagaacccttaaaattgagattactttggaaaatgaaaccaataaaaatattcagttgttaatggaagcgcaaagtttaaatgctgaaaaaatgaaaaatgttgacatggttttagatgacattgaatccagcgtagttgcaactgaggcaattgtaagacaaaacattcgagatattaatgtattgaaaagaaaggcgcaataaaagctgcttgcttatttaataggcaggtggcttttttatttgaaaataaaggatatatcccataaatatgcgttttaagattgtatttcgtttggaattctgctttttagactgtatgaatatttattatgcttttatcttttcacgctgtttcttttgaaattgagaaacgcttagaatttcttgtttgggcgttgttttaatcataaaaatgaagcagaaatattgaacggcaagtatggctgcaataaaaatgcgaacataaaggttcttgaccaagtagatggaaagtcccatggagcaggtggagaacatcaaaatgtacactttggtgcgcagcttcattgttttgtgttgtacaaaagattccaaatgtttatggtacagttttgttcccaaaaaccaatggtggaatcggtcagaacctttggcaaagaaaaacgaagctgctaaaagcaaaggtgtggtgggcaatccggggattacaatgcctacagaaccgcatatcaaacaaaggaaagccaaagtcaaatagatatatttcatcatcaagactccttttgcagtatcttatgaagcatattctaaaaggggttgtatctattccaaaagaaaagcaagcgatatattgatataccgcttgcctttactgtgttttatgcttttttgatttcacatttgacagaggattggatttcgaggcttttttcatttgctcatctgagatgtgtgtataaatttcggtagttcctaaattttcatgccctaaaatatctttcaaaacgcggatatccacttctccgtactgatacattaacgttgcagcagtatgacgcagcttatgtacagaatagcccgggccgccaagcccgattttctccagatatttattgaccatggcctgtaccgttttggggctgattcgttttctctcacggctgatgaacaatgcttcacggtcaatgagaccgtctgcaggccggtcctttaaatatgttttaattgcatccatgcaggcgtcgtttaaataaaccaaacgctctttgtttccttttcccgtaatgcgcatcacatgttccttatgattgatatcatttaaattgatattgaccaattcggacaaacgcatgccgcagtttaaaaacagtgtaatgatgcagtaatcacggctttgatatggaccttccactgcatttaacaaatccatgctttgctccagtgtcaaatatttgggaagtgatttttttgttttcggcgtctccagctctgtaatgggattgtgctccagtttatttaccttattggtcaaatactgaaaataagtacgcaggctggatacttttctggaacgggtagtcgccttattttttcgttgggtgcttacaaaattcatgtattcgtatacatcggttaatgtaatggttttgataaattccaaatcaatatcatcaatggaaatctcgtcaaacggcatatcctgcggtacctgattgcggtgctgtttcatataacgaaagaaggtacgcaaatccataaagtattcttccaccgttaaaggagatttcccttttacagtacccatatatcccaaaaactctttgatgataggcggtgccaatgagaaacaatcctgcttcaatccatatgcctcctttgatttgttgtattttgcaaagaaaaactcaaataatgatttctattgcgacgcttgtggtaaagaagctcgcgccaaaataatctctattgcgattattttagcatatttttgtctcaactacaattattgtggattttctattgcttcattcctgcttttttgataatataatacataatgttacatatagtttgggggaagttatatggcagtaaatccgaattttgaccacgatgcatatgcaaaaaagtatttgattaaagcacattttacagatacgctgggtgctttgttgggagcaaccaaagttgccaatttgcaagagcttgcggccaattatgatgtgaaaaatcgcagcaaactcaaaaaagcagagttagttgcggaattggagcaaatcattgcaaatcctgaagaaatgaaacgcgtcatgaactatgcaacggaacaggagtttcaattgatgctgcgcattgctgcggatgaagacttatccaactgcaccatagaacatgatttgtatcaatattttgcaaaaaacggttacttttatttggtggaagaaaagaaacaggttgcttatgcaatgccgttgattatcaaagagatatttcataaaatcaatactgcgaaatatcgtaaagaacgtgatgaattccaaaaaatttggagatactgtattgcgtgttccaatttgtacggcgcaatcacacctgagaaagtatctgaattatataaagagcattacagcgagattgttaccgcaaaacaaattgttgaggttatgaataccttcgcttgccgtagtgatgcagcagcaattaaaaacggacatattgtaaacggatttatgtttgaacatggcaatgtagacgcgcttttaaaagaacaaagagaaaaaacgtattatatgccggaaaaagaagagctgctccgctatgaagacccgcatttttacgaaatgacgcctcagttggaaaagttggcagattatgtacgcaaaacgtataccaaaaatgaagagaaaatcaaagaatttttggatgacaccatgtttgcggtacagctaaacggcagttttcaagaccacattcatatttttgagggatttggatttgcaattaaaacacaaaagcaattacgccaaatttcagagctgctgatgaaagtaaccaattacacacgtatgtgggtaaaccgtggatatactccgttggaatatacagcgcaattggaagcagaggcacatttggaacatcctacgctgaaagtgggaagaaatgacccttgtccatgtggcagcggcaaaaaatataaaaaatgctgcggtgcttaacaaaatcaatgtgcatttgattgcacatgtgctatgtgatatgcagtatgttccatatgcagcgcctgctgtttgattggttgtatcaggaaaaagacacattaccgtataatcacccgtgaaaatgttggaaaaccatataccgcagctaaaaaagcggaaaatgtattgcaatcgttttctgtgggtattataataaaataacacaattttataggaggaagtcaaaatggctacagttacaaaagacaccttaatcggtgatattctagatatggacagagataccgcaccttactttttggaaatgggaatgcattgtttgggatgcccatccgctcgcggtgaatctttggaagaagcctgcatggtgcatggcgtggatgtgaatgaattgattgaaaaaatcaacaaacatctagcagataaataagtcatttcatgacagcgtcaataaccgcccgtcaaggttttgtcgggcggttatttgaatctatgaaaaataatgacaaaggacggtgcgttgtgttatttttaaataaaaagaaattatttcagctggaccgccgtttgcagacatgtgcttctatggtgcgtgaaaatcatgtgcttgcggatattggaaccgaccacgcgtatttgcctatttggctggtgaaaaaagaggtcatcaaaaaggcaattgcttccgatatcaatatgggacctttacaaaaagcggcatttaacatcagacgctacaatgtgggaaaacaggtggacgccaggctatccgacgggctggaattgatttttccaaacgaagcggacgatattgtcattgcgggtatgggcggtgagttgattgcggacatcatcgaaaaagcgccttggctgaaagatgcagaaaaacatttgattttacaacccatgacttccgcaccggaactgcgcacctatttgtctgagcacggttttgccgtcaaacaagagcaggcggtgcaggacggagaccatatctatacggttatgcaggcggaatatgaccctgagcatgtacaaacaggtcaggtgtttccatacataggtattttaaaagcagattcggacgaaaataaagcttacattcagcagcaatgcagccgtttgcaaaaacgcgtcaacggattaagacagagtggaaagcaggaagcattggcaaaccaaacagaacaaatcttggagcaaatacaacaagtgctgtcacaggcagagtaaggaggagcacatggttacggtaggagatatttacaattatattgacacatttgcaccgtttcacactgctatgggatttgacaatgtaggacttttggtagggggaaaacattgtcccgtaacctctgtcatggtttcactggatattacccccgaggttatttcagaggcagtgtcacaaaaagcagaattgattatcagccatcatcctgtgatttttcagccgttaaaacgactgtctccaacagatgtgccgtatttattggttcaaaacggcttatgtgccattgcggcgcataccaattatgatttggcctgcggcggagtcaatgcctgtttggcagaacgattgcagttgaaacaaatttccatgttggaggaatacgagcattcgggcttagcggcttctttgattggtcagctggagacagagatgaaatcgtctgaatttgctgcatacgtaaaaacacagctggagtgtaaagggttgaaatttaccgtaggaaaaacaaaggtgaaaaaagtggccgttgcctgtggtgcgggttcttcttctatttttgcagcaggagctgcaggggcagatgcttttgtcagcggagacagcaaacaccacgagttgcttgcggcaagcagtatggggattaccatggtggacgcaggacattttgcaacggaagatattgcaatccagcctttatgcaaccgcttgtccaaagaatttccgcaagtacgctttatcaaatcacaacaaaaagaccctgtgcagtatttggtttaattcaatctctttgaaagggggagaaacatggctttagacggcgtatttttgcgtcatacagcaaaggaaatagagcaggcagctttgggcgcaagagtagataaaatttatcagcccaatcgggaagaaattattgtttctctccgttccagagaaggcgcggtacgtttgctgctgtctgctcgtgcaaacagtgcgcgtattcatatcacggaacatgtgcctgaaaatcccaaacaacctcccatgctgtgtatgctgctgcgtaaaaaactgggcggtgcaaaactgacaggggtgcatcaaacagaattggagcgtgcagttgctcttcaatttgaagcttacaacgaattgggcgatttggttccctgcacgctggtaacggaaatcatggggagacacagcaacgtcattttggttgaccgggaaggaaaaatcattgacgcgctcaagcgtgtggacgaagacatgagttcccaacgtttggtactgcccggtttgctttaccgcagtcctccgccccaagacaaattatgtatgctcaattgtacggtaaaagaggttttgcaggcaatgcaatccattgtaaaggaccagccattgagcgatgcaatattgaaaacgctgcaaggtgtttctcccattgtatgcagagagttggcttacagggcatgtaagggaattgatttatccgtctctcagctggaaccgtgccattggagtacattggaacaactgcttgacatcttattcgatacggtaaaaatgagtacgggaaaaccgtatatggcggcgaacctgaacggaaagccaatggatttttcctttatgcccatagaacaatatgacagtgcagtacatatttcgcagtttgattcgttttccaaactgctggactttttctatcaggagcgtgaccaaattgagcgtatgcgggtgcgctcgcaggatttatccaaactgctctccaatgcagcagaacgtctgagcaggaaaatcaatctgcaaatggcggaattggctcaatgtgaagaacgggaaacattaaaaatgtatggtgatttcatcaatgccaatgtttaccgtctgaaaaaaggggacagctatgcagaagtggaaaacttttatgaagagggcagtcctgttgtgagaattcccatagatccgctgctgacaccttcacaaaatgcccagaagtattacaaggattacagaaaggcacgcactgcgcaggaaaaattgacggaacaaattcatcaatcggagcaagaacttgcttacattgactcggtcagcgaagcattgggcagagcagaaaacgaacgggatttatcggaaatacggcaagagcttgccgagcagggatatttgcatcagcacaagacaaagggaaaacaaaaaaatacagcgcctgccgcgccgatgaaatttatcacaagcgacggttttaccgtactggtgggacgcaataaccgccagaatgataaattaacgttaaaagatgccaacaaccatgacatgtggctgcatgtaaaaaatatcccgggttcgcataccattattgtatcggaccgcagggaaattaccgaacaagccattttggaagctgcgcagattgcagcttactacagcagggcaaaagattcatcacaggttcctgttgactacacatttgtaaaacacgtttcaaaaccgcaaggtgcaaaaccgggtatggtaatatacgtaaaaaataaaaccgtatatgtaactccggctttgcctgagtccaatatcacatcgattacgggaggtaattatgagtagagcgttttcttatattgcaatgatatgtgggtttatttcctccatattatttgctattttggcagcattgtatcgagcaggaaatacccatttgtatttgtgtattgcggtgacttgcatggcgtttatttttgttcgattcaatttggtagcattgcgaaatgacaaaacagaccgtttatttgttgtaaacaacggcgctgtactggtcttatttgtttcggttgcctactttatccgtgtattcatgggaggattcccaacctggctggatattaccattggtgcggttgcgggcgtatatgccatagtaattattattttctacgtactcaatgccagaaaagggaatttaagacgtttataataggggaggtaccgtatgtcgcagtcacttggttgtatgcagctgaatgaaaaaaatcatgttccgttccttacatttcctcgcttggatgtattgccgtatatcacacatgccttttccaccagaaaaggcggcgttagccaacaggaattttcttctatgaatttaaatttcaatcgcggtgacagtgataccaatgtcctgaaaaattatcatttattctgcgatgctgtaggatttgattttcataaactggtcgcttccgcgcaagaccatcatacggtggtacgccgtgttacttccaaagaggcgggaatcggcatttggcgtcctaaagacatgcagagcgtagacggcctaattaccaacgaaccgagtgttgtgttggttacttattatgccgattgcgtaccgttatactttgtggatactgctaaaaaagccattggtttggcacatgcgggctggcgcggtacagtagcggaaatgggcgcacgtatggtggaagcgatgcagacggaatttggcagcaatccaaatgatattctggctgccattgggccgtctatcggacaatgttgttatgaggtggatgcacctgtgtatgaaaaagtaatggcgctgaccgagattgcacctgatgaatgtttacagcccaaaggtgaaggcaagtatatgctggatttgtgggaagtgaaccgcagagttatcatgcatgcgggagtacctgatgaaaatataatggtgggtcgtgtttgtacctgctgccacagcaatttgctgttttctcaccgtgtaatgggagcaaaacggggcggaatggcagcaatgatggcactgaatccataaaaataaaaagcagtcttttcaatcaatacaacaaggcggttgattgaaaaggctgcttttttgcatattgtttgaaattgagttcataatagcagtaatgtattggctatgtaaaatgaatgtcaaagaagtctaaacagtttatgaacttttctatttttcattgactttgcaccttcatcatattaagatgaagatacatagtttttaaaactatatcacaaagtataaaatataacagaaaagagtgatggcatggaaggaatcaaacaattggcaacagccaaacgccgtgcggtattaaatcttccgttctattcccttggtgaggagatatggaatgctgtcagccatggtataggcgcaggattatccattgcggctttggttctgcttatggtgtttactcccaaaactcctatacacatcttcagtttattggtatacagcatttctatgattttgctctatgtgatttccaccttatatcatgcgctgcctgtgacaaaaggaaaaaagatctttcaaatcttggaccactgtaccattttctttatgatagcaggtacgtatacgccaatgctgctgttatgcgtaaaaggaatcacaggctgggtcatgctgggtgtggtatgggccgcgtccgtcattggtatcttattaaacgcagtggacatgaagcgttataaaaagttttctatggcttgttatatttgcatcggttggtcatgtgtgtttatcataaagccgttggtacaaaatttaactatacttcagctttgtttgctggtcggcggaggcgttctttacaccataggcgctgtcatttatgctaaaggaaaaaaacttgcctatatgcataccatattccacgtgtttgtggtcgctgccagtgttatgcagttttttgtagtctttaccgttgcggtttgaatatgatattttttggagagtctgtatcaaaacagactcttttttacatctaaaatggaaaattttatctgtcccattcgtttttttggaaataattgtagactttttttagcagctctgttataatattgaaaaaatagaaaaccgcttattatcgcgaattgaattgtattatctcaatccatttcccttgctaaaaaaagtctgctttacgtaacagtatagaagaaaacggtaggtatatgagcggataacattgtttatgagcataagaaagcataccctaaattcccttttggctttcttatatcaaatagcggtctgacaaagacagcaaaaaagacagttgtaatttattacaactgtctttttgtttataagattttgtttcttgtataagcaaatcttttctaatagaaacagtgtgaaacggttttaaagtcataagaaacggcttcgtacgaactgtaaaacttcatacggagccgtttcatctttgaaagagtttgattgggtgttcattttttatgattttgtatcgtcttcagaagaaatggggaatgctgaaacgatttttacagcaaaatgaatactctttttgttttttgggaagcagtatatgatgcaaatgattaaagtgggaaaatattcattcttttgatttttccgttttctcccacagaagagataatggcggtaacgggaatgaatttttgttgatacataataaagtaagagacggtatttggttcctggtactgtacatctaaaatctggaacggtccgccgttaaagccgaatctgtgatgaaacatcatgtcaacagccatttttccttccagatgaatggtatcttgtcctactttatttacggaagaatcgtgcagtactcctttttcctcaaataattcggatagtgcaacgttgttaccttttttcatacaatcaatatattgttccaataaagtcataagtcataagctcctttcactactagaaacgttcagaacgcaacagtgcgtcgattccgccgtccacaaataaaatggttccgtttacgccgctggccataggggaagatagaaatacaattccattggcgatttcttccgcatccaagaactcttttttgccatatcgtgtgggaatgggaatcagaagagctgcttctttttgttccggagtcatattttgcgtcataggagtggtggtgttgccgggagctactgcattgattcgtgtgccttctactgcccaagacggcgatacacggcgcatccagcgggtcaaagcatgttttgaggtactgtagcaagccggtcctgcttggggcggaataccctgcgcaatttgtgtaaagctgtcttcgtcatgaatattggtcagcatatccacccaatcttgacggacatacggaaaggtgatggagttggaagctgtcataacacaattgccgcgtttctttttcaataaaggctgtaatccttccgcaagttcggtggcagcaaagtaatttaatgaaaacaaagttgcggccggtacggtaggaccaacgcctgcattgctgataaaacagtcgattccgtccggataacgctgatatactgcttcgatggctccttttcgtccttcttttgtggataagtcggcagtataatcgccgcctttgtagtcaatattgaagacttcatgcccttgttcttgcaatttttctcgtgtggctgcaccaattccggttgtgccgcccgtaattacataaatactcataagtaaatcccttccatctattttatttttgctttaataatactgtagcatatgccgttttgaatgtcaatttaatctattttttaacaatctaggttcaaattatgtgaattatgcaaaaagtgatagaaaatgaatcattttatttgtttgtctattttctttgtattctttttcctatatttcagctgtatcgtttaaaatgcaagtttttgtaatgtttcttgcaaaaatatacaaatcggcaatataccggaccaggtatataaaatacagcatttgaatatgttttgggaaggaagtctatcaaataaggagagatgtacgtatgttttattcttttaaatttacaaaaaaagtgtttgttgtaatgtgcacttgctttttaatcggtttggctgcgggaggattcggcatccacaaagccgtaaccgcagtacaagccgacaaggagttggaacagggaatacaactgcctattattatgtatcatggtattttaaaagatacaaaacgacagggaaaatacgtcatttctcccgaattgttggaaagcgatatgaaatatctcaaagaaaacggatatacccctgtatttatgcaggatgtgattgactatgtaaaaaatgggacaccgctgcccgaaaagccgattattctttcctttgacgacggttattataacaattacgcatacgcatttcctttggcacagcaatatgatatgaagcttgtcattgctcccattattgcaaagacagaagaatacagcagggctaatgaagaaaacgccaactacggacacattacctgggataacatgaaagaaatggtggattcggggtatgtggagattcagaaccatacctacaatttacatgcaagcaatcagcagcaagttggtatcaagaaaagaaaaggagaatccgaaagcgattatcaggcgcgtattacgcaagatatacaaacagcacaaaatagtatcacggagaatatgggaacagctccgaccacatttgtatatccgttcggcgctttttccgatacaacggaatcctatattcgcagtatggggtttcaggccacctttgtatgtgaaagtcgtaccaacatattaacgcagaatcccgaatgtttgtatggattggggcgttatctgcgtaccaacgaaacggacagcgcagccttttttcaaaacatcttgaaacagtaattttttgttccctatcagaaaatgcggcatatactgtatcaaaggaggagacgttatgccgagaatttttttaagtccgtccctgcaaccgtacaatgagtactatggctcaggaaatgagcaggaatacatgaacaaacttgccgatgctatgattccttacttgcgtaccaacggcattcaatataccagaaataagattggtaccaatgtagggcaatccattcgggattccaacgcaggctattatgacctgcatttggcccttcattccaacgcagcgccggagtccatggccggaaaattgcagggaacagatgtgtattattatgccaacagcccgtttggcagaaatgcagctgagattatcgccgacaactttaaagagatttaccccaatcccgatttggtaaaagcggtgcctaccacttccttggcggaagtaaccaaaaccaacgcgcccgctgtattaatcgaaaccgcttaccatgacaatccacaggatgcagagtggattcgtactcatattcaggagatggcggctaatttggtaaaatcattaacggatatttttggaataccgtttatttccactcctgttccggaacgtacgggtactgtgacaacgcaaagcactccgctgaatatccgcagcagaccgaatttaaatgcacctattatcggtcaaataccaaaaggcgcctcggtgaaggtattgggtcagtgggaaaattggtatgttgtggattatcagggtactgtaggatattccagcagcgattacattacggtttgaacatgaacagaataaacatttgaattctcattgtcaccaagttttatcttatcaccgccttacaacaaaactaacattgatttgattgttgataagaacgttttagcgtttatctgttaaaaattgcgaagcaattttttctatgttataataaaagcaacaatcataaagtgtggtgacaatatgaaaccctattgcagtgcaattattcctgcggcaggaaattctaccagaatggccatggggcaatccaaacaatttttacccttgcttggcaagcctgccattgtatatacattacaggcatttgaacaggcgaaatccgttgatgaaatcattcttgtatgcagagatgaagacaaagaacagctgaatacttgcgtgcatatggccggtattacaaaacctgttatatttacgctgggaggtaccagcagacaacagtctgttttcagtggtgtccgtgcttgtgcctctcaaacggaatatatcatcatacacgacggtgcaagaccgctgattacttgggatttgattgaaaaagtaacggcggatgcttttacctatggtgccgctgcactgggggttcctgtaaaagacaccataaaagtcacaaatgcacaagggtttgccactgccacacctgacagaagtacattgtgggcagtacagacccctcaagtgtttgaaaagacaagctatttatctgctgtaaaacaagcgatacaacaggaggcagactatacggatgattgccagttaatggaacagcttggcaatcaggtacatttgtgcatgggcagttacgagaatatcaagctcaccacaaaagaggatctcatcgttgcgcagacaattttgaatcaacgcaatacagaaaggagtaaatcatgagaattggacacggatacgacgtacacaagctggtaacaggacgtaaattgattttgggcggcgttaccataccttatgaaacgggactgcttggccattcagatgcggatgtattggctcatgcggtttcggacgcattgttgggggctgcggcgctgggtgacattggtggatttttccctgacaatgaccccaaatatcaagatgcggacagcatagaactgctcaggcaggtttgtgttgaattatatgaccgaggatatgccattgaaaacattgacgctactgtcattgcgcaagcgccaaaattaaaaccgtatatcgaacagatgcgcaaaaatttggcacaagcctgtgaaatcaatgtcaatcaaatcagcgtaaaggccacaacggaagaacatcttggttttacgggaagaaaagaaggcattgccgtacatgcagtttgcttgataatataatcaaaacctctttgtttggcatactctgtaataaaaacaaagaggtgattttatatgggcaaaccccttatcatggtaagctcaatcacatatgcaatgaaaagcaaagagatactgagcagaagaggctttaaagtttatgtggagcgggtacctcacacaagtgaagctgtgggttgcggatatggtgtatatgtgccccaaagaaccgaggaggcacagcaaattttacaaagaagcggaattcgaattttaggaagaatggaacgggctgatttgcgatgatttatttggacaattcagccacaacctttccaaaacccccacaagtgtctatggcaatgagcagggctatgacaaaattcggcgccaatcccggcagaagcggtcatgcaatgtctattgcggcggcagaagaaatttttaaatgcagggaagctgcagcttcatttttccatgcggatggtcccgaatgcgtggtatttacattaaactgtacccaggccatcaatatggtgttaaagggctatgtcaaaccgggagaccacattgtaacctcttgtttggagcacaatgcggtttctcgtcctttgcagaccatggcagaccgaatgcatgtaacctttactgaggtaactgttaccccgggtgacaacgatgctaccgtaaatgcatttcgtcaggcgttaaaaccaaatacgtctttgattgtgtgcacacacgcctccaacgtatggggcattcgtcttcctgtggagcgaattgcatctttgggacgggaatacggcattcccatattggtagacgcagcccaaagcgcaggcgtacttcccattgatttgcaggattcgggaatcgattttttatgtacagccggtcataaaggtttgtacggtcctatggggacaggtattttgattgccaaaaatggagagcagctgcaaaccatcatcgagggaggaacgggaacggaatctgctttttaccagcagcccacagccatgccggaacatttggaaagcggtacgcctaatcttgccggcattgcgggcctcagggccggtattcaatttgtacagaccaaaactgtcaaaagaatttatttgcatgaaatgaaattgattcagacgttgtatcatggtttaaagcagatgaacggtgtaaaactatatacacaggagcctgacatgatgcattatgcacctgtgctttcttttaatttggaaggcaaacaaagtgaatgggtcggtcaaaaattaaacagtatgggaattgccgtcagagcaggacttcactgtgcgcctgcagctcatagaaccatggatactttagaaggaggcgctgtacgggtatcgccttctgtttttaccaaagaatatgaaatcaaacgatttttacaatctgtttctcatatgacaaaaaatcttgaaatatagtaggaatcgcgtttgatttgtgttaaaataaaaataagacattttttaagacattttttcaaacgaacacttttttcgtatcaaaaacgctcaaaaaggatgtttgatatagacgtaggatcatcgttaggaaggacgaaaacatatggactttttaacaaatgcctgggatacgtttttgggattaatcaaatcgttccaggtgacggacgctttggatattattttggtttcttttatcctttacaatgccattaaattggttcgtgaaactcgtgccgaacagttgattaaaggattgttgattctttgtgtggtctgggctgctgcattttatttgcagctgtacatggtcagcaatatattaagctatatttttcaatttggtgttattgcaatcattgtattgttccagcctgaaattcggcgggcgttggaacagctgggacgcaaaggaatcggaacaaaatattggtctttgggcaatttttcaaaaagcagcgaagaaaccgaaaagcggtgccgtacttgcattcaggcaacggttgacgcggtggtggagctgcagcggctgaaaatgggcgcgctgattgtatttgaaatgcagaccaagcttggtgacatcattgattcgggtactgtcatcaatgcacagccttccgcacaaatgatagggaatattttctttaacaaagcgccattgcacgacggtgcaatggtaatcagggacggcatgatatgtgcggcaggctgtattttgcctttgacaaaaagtgataaagtaagcgtaagcttgggaaccaggcatcgtgctgctttgggcatgagtgaagtatccgacgcgattgtggtagtcgtttcggaggaaacgggacagatttctcttgcaagacaaggtgtattggcacgtaactttacaaaagatactctgaaaagcgagctggagaaattgattttgtcccaatatgccaataaaaatacaggagagaccaaatcgaaacgattcccctccatcagaaaggggaaaaagaaatgagcaatcaaccgaaaacttccaaaaagaaaaaatcatttggtattccaaaattattttacaatgaccgctttgtgttgattttctctattttggcagctattgttctttggttcattatggctaccgtcaacactaacgaacggcccagagtgatttacgatgtacccattgaagtcactttgccggatagcgccttggaacaaggttacaaaatttacggacaaaatgaagtaaaggcgagagtttccgtaaaaggcaacagcctgacggtaaatcaaattaaaaattcagatattcaagtggtagcgcaggaagtttcctccgtttcgggtgccggagaatatacatttaatttggtagcggtgaaaaaaggtcagctgacagattatgaagtggtttccattgacccgggtactgtggtggtagaagtggataagtccaaagaaatgacgctgccgattgaaagtaaaatcaattataccacagatgaaaatcactatatttcagcgccggaattgtctacttcttcggtgaaactgtccggcccggaaacggtgctgaataaggttgcaaaagcagttgtggaatacgatgtaaaagaatctttgcaggaaacaaaaacattttccaccaaaattaatttgtatgatagtgagggtaatttgattgaagatgatcgcattaccatgtctacagacagagtggatgttacattgaccgtattgagcagaaaagaattgccgatta

SEQ ID NO: 3263 - DNA, 2905 bp, Unknown
  16S sequences of unknown bacteria
cttctccttcgtccggaatcgagttatcctcccgttccaccacggtaatattgggatggtttcggatgcgcgccgtcaccgcgcgggaaaaatcctcacgatccactgccagcgcgccgccggcaggcacccgtgtctcatctgcgcaggcaaggatcagagaccccaaccgccgcagttcctccttaagcagccccacagcattctccagctgatcggaacgcagggagttggagcacaccaactcggcaaatgcctcgttggtatgcgcgggggagtatttagcgggcttcatctcatgcagctctacggcaatcccccggcgagccagctgccaggctgcttcgcagcccgccagacccgcaccgatcaccagaactcgatgctgtgtgttttccatcattccgtcgctttctcagcggtatcttcggcatcacctttagccgctgttttagtggtttttttcgctgccgttttagccgcagtctttttggccgcacttttcggcgccgcttttttcgcagcgggcttcttcgccgcagcttttgtggccgccggctttgcggccgccttttttgccgtgctttttttcgcggcaggtttcttctctgtcttcgatgcaggcgcgttctcttccgaagcgccttcctccgcagcagcggcagtcttctttttcggataaccgcgctgatcctccggcacaaagttcggacactgctcattgatgcaatagggccgcttgaagcccttgccgggctttttaaacatggtgtggccgcacatggggcagtcgtctttcaccggcacgtcccatgtcatgaagtcgcactcggcctcgccctctttcggccggcccacatgctcacagcaatagtaggtgtactgcttattggtctttttactggtgccggtacgcttcatcagccggccgccgcacttagggcagcgccccggcatttcaatgaccagcggcatggtaaaagtacactcgggatagcccgggcaggccaggaaccggccgaaacggccggatttgatcaccagattacgtccgcactgaggacagatctcctcggacacctcgtcgggcaccttaatgcgcttgccttccagatccttttccgcttgggagagcgaatcggcaaaaggcgtgtaaaaggcatgcagcaagcccttccagttttcctcgccctcttcgacccggtcgagattcttctccatattggctgtaaaacttgtgttcacaatggccgggaacttctccttcatcagccccgtcaccacctcgcccagcggcgtaatacgcaaatatttaccgtctttgataacgtattcgcggtcaagaatggtggaaaccgtgggggcgtaggtggagggacggccgatgccctgctcctccatggcacggatcagcgtagcatcggtatagcggctgggaggctggggaaaatgctgctctttttccgcaccgtctttcaagaggctctgtccttcctgcagggcaggcaggggcgagttctttttctgctcccccgtgtcctcgtcttttccttcctcatacacggctgtataaccggagaatttcagcgcgctgtagttggcacggaagctattgcccgctgcggccgcttccacgctgacgctgtcatagacggcattggccatctggcaggccagaaaacggctccagatcaagcggtacagacggaactgctcggatgtcaggtcgcccttgatgcgctccggcgtcagcgtcacatcgctggggcgaatcgcttcatgggcatcctgggcgccagccttggttttataatgacgggtctgaggcggataatactctgcaccatagcgcgtctgaataaagtccttggcggcggccagagcctcgtccgacaggcgcaaagagtccgttctcatataggtgatcaaacctacggtaccctcgccgctgatatcgatgccctcatagagctgctgggcgatcgccatggtgcgccggggcgtcatgctcagcttgcgggacgcctcctgctgcagcgtggaggtggtaaaaggaggcgaaggggaacgctgcttatccgcgcgctttaccttttccaccgtaaaaggctttccttccaccgccgcaagcacagcgtcgacctcttcttcgttcttcagttcttttttctttccatcctgtccgtaaaagcgggcggtgaaaccgccggtcttgtcctcattggtcaggtgcacatccagcgtccagtactcctccgcctcaaaagcgcggatttcctcttcccgctcggccaccatgcgcatggccacagactgcacgcgtccggcagataatccccgacggatctttttccacaacagcggcgagagctgatagcccacaatgcggtcaaggatccggcgggcctgctgggcgtccaccaatttctggtcaatgtcccgcggctcctgaatgctctcggtcaccacctttttggtgatctcgttgaacgtcacacggcgggccttgtcatccggcaggttcaaaagctctttcaaatgccaggagatggcttcgccttcacggtcggggtcggtggcaagataaacatattcgctgtttttcgcagattttttcaggtcgctgataatatcttcttttcccttgatgggcttataatccggctcaaaatcgtgttcaatgtctacgccgatcttgcttttaggcaaatcgcgcagatggcccatgcaggccttcacctcgtagccgctgcccagatattttccaatggtcttcgcctttgccggcgactccacgataaccaggcttttctttgccataggtacctccacaagtttctcttttattccgtaagcacagcgcgcagcgtgtagcggcttccgctctcctggcgcacaagctcct

SEQ ID NO: 3264 - DNA, 10708 bp, Unknown
  16S sequences of unknown bacteria
ggggcgtctgccagagctgggggccaaggaccgggactttttcttccttcgccgcctcgacagcgagcgcctggtcaagacggtccaggacctctgcgtccgccgcctgccgcagaatctgggcatcgactcaaagaatatccaggtcctgagcccgacgcgcaagggccccaccgggacctatgagctcaattgccagctccaggcggtcctcaatccgccccaggagacgaaaaaggagaaaaaatacggcgcgttttgcttccgggagggcgaccgggtgatgcaaatccgcaataattatgatatactatggacaaaagagggcgaggcccaggtcggcgccgggattttcaacggtgatatcggcacgatccaggagatctccttccgcgatgaatgtatgcgcatcgcctttgacgatcgcctggctgaatacagcttcaccctgctgcaggatctggagctggcctatgcgatgacggtccataaaagccagggcagcgagtatcaggcagtgatcttgtctgttttgcagggttcaaagtacctgctctcgcgcaatgtgctctatactgcgctgacccgggcgcggcagttgctgatcctggtcggctccgaggaggtcgtcgcgcagatgacggccaacaacgtgcagcagcgccgctacagcggcctcaagctgcgcctgcagaaggaggaatagggaatgctgctgttggaggcgctgctggagctgctttatcccagcaagtgtgtcctgtgcggcaagctgctcgatggaaatgagacgaatctttgcagcggctgccgcagaacgctgcagccctttaccggcaaggcgaccaagcctgcgctgacgagcagtgtcaccgtggcctatgcctatgaggacccgctgcggcagtcactgctgcgctataaatttcagggccgctcctactatgcaggcgcgtacggcgcgatgctggggatgcagattctacgggagcatttggagtttgacgtgatcacctgggtgcctgtcagcagaaagcgccgccggaagcggggctatgaccaggcggagctcctggcgaaggcaaccgcccgggagcttggccgctgcgcggagccgcttttggagaaattccgcgatatcccgccccaatccggcattcaggatgccgcccggcgaaaagcaaacgtgctgggtgtctaccggatgcggccgggcgctgcggtgcaggggaagcgggttttactgatcgatgatattttgaccactggtgcgaccttgggcgaggctgcccgggtgctgatggaagcaggcgccggtgaggtacaggtggccgtcctggcggcggcgcgcaaataggaggttccaatggcatttttttccagagatttgggcgttgatctgggcacgaccaacgttttgatttatgcagagggcaagggcatcgttctgcgggagccgtccgtcgtggcggtggataagatcaccggcaaggtgctgcaggtgggctctgccgcccgcaatatgctgggcaggacgccgggcaacgtcgtcgcaatgcggccgctgcgggagggcgtcatctcggattacgacatgaccgagaagatgctggcggcctttttccagaagatcatgcgctacgcgctggtcaagccccgggtcatcgtctgcgtgcccagcggcgttaccgaagttgaggagcgggcggtcatccagtcggccatggaggctggcgcccgccgggtctatctgatcgaagagcccctggccgctgcgctgggtgcaaatctcgatgtcagcggccccgatggccacatggttgtggacatcggcggcggcacgacggacatcgctgttctgacgatgaacggcgtagctgtctcctcgtccatcacgacggcgggcgacacatttgacgacattattatgcggtatctgcgccgccgccatggtatgatcatcggggaaaacctggcagaggagatcaaaatgaccatcggctgcgttcgggagcgcccagaggccaagatggaggtcaagggccgcgacgccaagacgggccttgccaagacggcgacggtcgattcctcggagatgctggacgtgctgcgccgcccggcccggattattgccgatgaagcgctgacggtcctggagcggacctcgccggagctggtggcggatatctcccgcaacggcatcgtgatgaccggcggcggcagtcagctctggggcatggatcagatgatcgcagagcggacgaatatggcctgtaccattgcagaggacccggattcctgcgtggcctatggctgcggcaagagcctggcgtggatcaaccacatgcaggaggggacgatcaacctggcccgccggaaactgctcaaggattaagcgtgtcaaaaatacttttttgacacgctctcaaacgcgacaacgctgtataagctcgaggggcaaattgactctcgcttaccgcttcactgggctcacgtttgaagggactgcaccctgctgcgcgcataatttctacgccttcggcgcagaaattccacagcgctgcatgggttcgacttgaccaattgcgcaaggcttgcgcaattggagtctcacccacttgccgccggagaaaataattttgaccttatttgcgccgtgcgcggcgcaaactctgcgaggcttttttgatcgtctgaaggataagctttgtaggatccttcccggcagcagcggcagagaagcatctgccgctgctgccggatttttcatgcgctggagggggaagcgatgaaccagtttaaggactgccgcctgcgagcactgctgctgtgctacggcgtcgtgctgctgtatcttctttatttgcaccgcctgccggggcgggcgtttgcggggcgtgttaatctggtgcccgggcagacgctgcggacctatggccgggcggcctggttcggcctgcaggcccatcgcccggcgctgctgcgctacgccgccgggaatctggcggggaacctagcgctgttttttcccgccgggctgctgctgccggcgcgctttccggcgctgcgaaagttttggcgcttttttggcgtcctggccgggtcggtcgctctggtcgaggtactgcagtgggtgacggggctgggcgcttgcgatattgacgactggctcatcaatctgcccggcggcctgggcggctttgcactctggcggcgattttttggcaaaacgtcagtatgactggaaatttctgccgtgttgtggtaaaataaatgaaataggtacgattattgtgcctgaaatgatcgccctgtcaggaggagataccatgcgcattgtagaagcaagaatcgaaatccccatggggagccaaaataagtatgaagtggatgaaaaaaccggcaagatcaagctggaccgggtgctctactccgcagccttttacccgatggagtacggctttgtggaaaataccctgagtgaggacggcgacgcgctggatatcatggtcatgacctccgcgcccacgttcccggggtgctatatcgacagtgtcatcatcggcggctttgatatgatcgactgcggccaggaggatacgaagatcctggcggtcaatatgggcgacccccggtatgcacatatcaagagcatcgaggatctgccgccccatacgatgaaggagctggaaaattttttctcgacgtataagacgctgcaggagaaggagacccgcgtactgggcttttttgacgaagccgaggcgtgtaaacgcctggacgcggccatcctacgctatcggcagcggtaaagaaaccagaatggaggggtaatcaatgtattgtgtcagagcggtaacaaaggacctgtactgggtcggcggcaatgaccggcggcttgcgatgtttgagggcgtctactccgtgccggacggcgtctcctacaattcctacctgctgctggatgagaagacagtcctgttcgacacggtggaccgggcagtcagcaaggtgttttttgagaacatcgcccatgtgctccaggggagacggcttgactatctcgtggttcagcatatggagccggaccacgccgggaccctagaggacctcctgctgcgctacccggaaacgaccgtcctctgcaataaaatgacggcgacgatgatcggccagtttgcggccggggacctgtctgcccgcctgcggattgtcagcgagggggagaacttctccgccgggcggcacacgctgcagtttatcaatgcgcccatggtccactggccggaggtcatggtgacctatgaccaaacggataaaattctcttctcggcggacgccttcggcaccttcggcgcgctgaatggggcgctgtttgccgacgaggtcgattttatgcgggattatctggacgaggcgcgccggtattactgcaatatcgtcggcaaatacggccagcaggtccaggcagtcctgcagaaggcggccaagctggagatcgcgatgctctgcccgctgcacggctttgtctggcggcagcagctgggggattacctggagaaataccaggcatggagcagctatcggccggaggagcagggtgttttaatcgcctatgcctctgtctatggcaacacggaaaatgccgccgagattctcgccacggccctgcgggagcggggggtgaagacggtgatgtacgacgtctccgtgaccccggcctctgagatcatcgcaggctgcttccgttacagccacctggtttttgccgcgacgacgtataacgccgggatcttcatctccatggaggagctgctgcgggatctcgttgcccataatatccagaaccgcaccgtcgccctcatcgaaaatggcacttgggccgcgacatccggcagactcatgcgccagctgctggacgagtgcaagaatatgacattcctgggcgagacggtcagcctgaagtcgtctctgaaggcgccgggctatgcccagctgcaggccctggccgatactatcaccgccacgctgccccaaacggcggcaccccagccccacgcggccgcgaccatcgaaaaagcagcctaccggaagctgacctacggcctgtttgtcctgactgcccagcaggatgggaaggacaacggctgcatcatcaatactgcccagcagctgacctcgacgccgggccgcattacgatagcggtcagcaagcagaatttgacgcatgatatgatcctgcagactggccagttcaatgtttctgtcctgacgcagagcgcgccatttgcgctgttccagcgcttcggcttccagtccggccgtacggcggataaattcgcgggcctggcgttccagcgcagtgccaacggcctggcctacctggccgagcacgcgaacgccttcttctccgcccgtgtcgtggatgcgctggactatggcagccacaccctgttcatcgccgaggtgaccgaggctgcggcactgtcgagcgagagctccgtgacctatgactactactttgcccatatcaagccgaagcccgctgtcacgcaggagaaaaagaagggctttgtctgcaagatctgcggctatgtttacgagggcgattcccttccgccggatttcatctgccccctgtgcaagcacggtgcggatgactttgagcccatttcctgagcgccgtcggcggctgtaggattgagaaatcaaggcttgatcgcctgcccgggaactccccgggcgggcgattgttgcatattgtggtgcagaaaaggaagaaaatgacaccaaagtaggtttaaaaatgccattagtgaaaaatttacgtgtgtttcttgcaaaaaacggggaaaataacgtgtgcggcaaaaatccgctgtgtttggctgcaattgccataatcaacaaaaatatgcggaaatggtgcgggaaacttttacctgtaaattcattttatcggttgattttcgaaaaaatgacggctattattagaattatagatagcgatatgttgaaaggatgaatcaaatcagtggccagagacatatcgctatttttgtatctaatgaatattaggcgaggcattccgccaaaaaatgcgaattgccgccgccgcagacgcccgcaggcggagaaaagaaagttggtgaacacttggtagaaaagaccatggaagcgatcaaggccgcggaagctgccgcccaggcgctggctcaggatgcggcccagcaggccaaagacatccggcagcaggcccaggcgcaggcccaggaggagcgccgtacaaaatgtgaagcggcgcgccgggacgctgccgccgcgctggaggcagcgcagcgggaagcggaaacgcagctgcagcaggcgcaggccgccaacgcggcagaaatggaaaccctgcggcagcaggcgcggaaaaagcaggatcgtgtggtcgcggcgattttggatcagttgatctgatcggccgcagctttactagaaacaaataaaggaggtgtgtaggaatggcagttgtgcagatgcagcgtatgaatatcttcggcctgaaggctgaccggaagcagattctagaacgggtccagcggtggggcctgatggaggtcgatatccagctggaggacgcgcagttttcctgcagcgatacgctggcccagcggcagcagtttgaccggcagatccgggcactgcagcaggcgctggaactgctggaccggtatgcaccggagaaaaaaggcctggcagggatgctgggcggaaaaacgcagatcacccaggcagaatatgctgccattgtacaggatcaggcggcggtgatgcgcaaggccaacgcgatgctggaggaagagaaaagcatcgcagcggaccaggcggccatcgccaagctgcaagcgcagcaggagagcctgacgccctggctggggctggatgtccccatgaacgccaaggggacggcccgcacggccctcttatgcgggacgctgccgggccagtgggaccagcagaccctgcagacagagcttgcatcccttgccccggaggttgacgcttacgatgcggagatcttatttcaggaccgagacctgtgctatctcagctttgttgtcctgcgggagcaggcgcagccgctggagcaggcactgcggggcatcggctttgcccggcccgccatcagctgcgagaagaccccggcccaggcgcgggaagatatggcgcgccaggtgcgggagctagaagatcaaattgccgcggcgcagcaaagacaggccgcctgcggccaggagcgccgggcattccagatcgcggtcgattattataggacccgggcggataaatatgctgtcctgggtaagctcccccagagcgccaatacctttctcatcagcggctacgtgcctatgcgggaggggcaggcgtttgccaagaaattggaggcggattttgccgtctcagcggagctggaggaaccggacccggatgcggatgtgccggtgctgctgaagaacaacaaattcggcgccatctgcgagggcatcctggcctcctttggcctgccgggcaagggggagatcgacccgtcgtttatcacggcgtgcttcttcgtcttcctcttcggcctgatgctctcggacgcggcctacggcctgatcgtatccctggcctgcggcatttgccttttgaaattcccgcggatgggcgagagcctgaaaaagagcctgcagctgtttttctggtgcggcttgtctacgatcttctggggcattatgttcggcggctattttggcgacgttgtggatgtcgtctcccggacgttcttcggcaaggaggtcacagtcccggcagcttggttcgtcccgctgaaggacccgacgcggctgctggtctactccatgctctttggcctgattcacctgtttacgggcctggccctcaagggctatctgtatttaaagcagaaagatatcgccggattcctgtttgacgttgtctgctggttcctgatgctggtcggccttattatcatgctgctgccgacggacctgttctacggcatctcccagatgacctttgccttcccagcgggggttgtcacagctggtaagatcatggcggcggcgggcgctttgggcattttgcttatgtccgcccggggcaagaagaacatcgggctgcgcatcgcgctgggcgcgtatgatctttataatatcaccggctggctcagcgatgttctgtcctattcccgcctgctggccctgggcctggcgacgggcgttatcgcccaggtcgtcaaccagatgggcagtatgctgggcggcggcgtcctcggcgcgatcgcgtttattgtgatctttatcgtcgggcacctgctgaacctgggcatcaacctgctgggcgcctatgtccacacctgccgtttgcagtacgtggaattcttcggcaaattctatgaaggcaccggccgtgcctttgaacctttcagaaacgacacaaaatacattgacattatggaggttaacgagaaatgaacggtattgtttatgcactgatcggtgctgctttggcagttggtctggcgggctgtggctctgccattggcgtaggaattgcgggccaggcggcctcgggtgttgttacggtcgatcccagcaaattcgcaaaggtcctgatcctgcagctgctgcccggcacccagggcatctacggcctgctcgtcggctttatcacgctttctaagatcggcctgctgggcggcggcgcagccagcctggacgcttcgaccggtcttctgatcctggcagcctgcctgcccatcgccattgtcggcctcgtctccggcatccatcagggcaagacggcggctgccggcatcggcatcgtcgccaagaagccggagcagttcggcaaggccatgctgttcccggccatggtcgagacatacgcgatcctggctctgctgatctcgatcctggcggtctccgcgatcaacgtataagcagccgttgggagtgaaacgcttatgagtggattggaaaaaatcatcgggcagatcgacgcgcaggcgaaggccgacgcggcggagctgctgcgcgacgcccgggcagatgcggaggagctccgcagccaggcgcaggccggctgccgagcggagctggcgcagatccaggaaagatccacccgggatatcgcggcctgccgcacccgcgccgcttcggcgctggagcagcagcggcgcatggcgctgctgcagaccaagcaggagatcatcgggcagatgctgcaaagtgcgctgcatacactgcaggccgaaccggcggacgcgtattttaacgcggtcgaaaagctggtcgagcgctttgcccggccccaggcggggcagatcgtcttttcccagcaggatctggatcgcatgcccgagaattttgccgcgcggctgaacgccatcgcccaggagaagggcggcgcgctgaccctagccccggcggggcaggtcgttggcggcggctttatcctcgtttacggcggcattcaagaaaactgcacgttcccggcgctgtttgaagcccggaaagaggaattgcaggacctggtgcataagcagctgttcgcataagggcgacaggaaaggagttttccatgtctgatacaacatatacctatgcggtggcgcagatccgggccctggaactgagtttactgagcgcggcggatatcgagcagctggtggcctgcaaaagccaggctcagtgcctgcagcttctggcagaaaagggctggggcggcagcgagattccccaggagccggaggccattttgcaggccgaacggcaaaaggcgtggcagacggtacgggagcttgtcaaggacgatgcggcggtgctggatgtgctgtcctacccggatctgtttcataaccttaaggcagccgtcaagcaggcctgcacgaaggaagccgtgccggagatctatgtcgccgattgcgcgatcaccggcgagacgatgcagcagtggctgcgcgagaaggactacgacgccttcccggaaaatatgcgcgctgccgcccgggaggcatttgagaccctcctgcacaccggcgacggccagttgtgcgatgtgatcgtcgaccgggctgccctggtggcgatccgccaggcagggcaggtggcctctgagccgatcctgcgggattacgccgagtcgaccgtcgcggtcgcagatatccgcatcgcggcccggggcatgaagaccgggaaaaaccaggaattcctgctgcgggcgctggccccgtgtgacgccttcgtgccggaaaatctggccgcggcggccctgcggggggcgcagcccctgtgcgattatctggagagcgcaggctacggcgaggccgggcaggcgctgcgggagtccccggcggcatttgagcgctggtgtgataaccgcatcatcgaaaccattgagccgcaaaaacgaaattcctttaccgccggccccctaatcgcgtatctgctggggcgggagaatgagatcaaaaccgttcggatcattctgaccggcaagcacaacggcctgccggaggcagagatccgggaaagggtaaggaagatgtatggctaaaattgcagtaatgggcgattatgacagcatctacggctttgcggccttggggctggagacctatccgttgaacagccaggagcaggggcacaagctg

SEQ ID NO: 3265 - DNA, 32759 bp, Unknown
  16S sequences of unknown bacteria
agcgcggcgaaaagcgcgggatagccattggcgaaaagcgtggcgaagagcgcggcgaaaagcgcggcattgccattggcgaagagcgcggcatagccattggcgaaaaacgcggtgaaaagcgcggcatagccattggcgaagaacgcggcgaaaagcgcggtaagctggagacggcgcgggccatgctaaaagaattgcccatagaccaggtcgcgcgcttcacgggcctctcgcgggaagaactacaatcgctggccggcgaaattgccccgcagggctaaggggcggatggatatgacctatctggcgcatgctcttccttgggaatgggcatgtgcctatatctttgcgctggatggaggccatatccgcgcctgggagcaaacagcggccgtagcaggcggtatgggccatttgggcccaacgccggatgctttttatgcggctttccccgctttgccacggcgctgggtcgcgcccatccgaaaggcttcgccgtatcgcgggccactattccctggtttagcgctcccaacgttcggcaaggccgccgtccatctcatccgcaaatcctttggcgttccgcgcttgatttctcccagaattgcttggcgcgatcgcatccgtccgcgcgcttgcaatccgcgtgcgcttgcggtataatggaagtggaaaaatacgaaagcgggggccgggaatgtacgaaggcaagattaagctgatcgaataccaggggcgcgaattgcggtttttgaaccagcgcagccgcaattggacgcatccctatccctatggagaaaacgacgattccacgctttccagcgcgggttgcggcatattttccatcgcgcacgtggtggaatggttcacgggcaagcgcatgaagccggaatcgctggcggatttttcggtggaaaacggcggccggggcgatgacggcaccgacaggccggccttgctgggcgcgatgatggcgcatggctatgctgggcagtgcggcttttcgtaccagctcgacgggctgcgcaacgatctggaggcgctgtgggagcacatgcgcgcaggcaacgccgcgctgtgcaacctgcgcgtagggcacatcgtggccctggtggacgcgcgcgaaaccgagcgcggccgcgaatacctggtgatcgattcctattccgagagcgcgcatgaaaaggtaaagaacgccgtgcgcgaggtggtggaagcttcgtccatcaccgcgcccgtgcgcaacgcggaggggctggaggtgggcgaaaccacgcaatacgccatgtattgggtggacgcgaaccagcccaaggacttcaatcttttgcaccgcctatgagcatggattttgcgcggctgaacgcgctggccgagggctggatgcgtactcgtcaggcgcacctggagcgcgagcggggcagcgtatatttccatgggcagcgcgtggccaagggcgtgctggaattgcgccgccgcgtgacggaggacgcttcgcacgatgaaatcctgcgcgcggccgccatttttcacgacattggcaagggcattgagccgcacgcgcaaagcggcgcggcgctggtgtgcggccttttgcgggaagagatcgcgccgcaggcgcttgcggaaatcgcccgcttgatcgccgcgcattgcgaccgcaggccgcgggaggacacgcacgacgtatgggcgcggctgttgcaggatgccgatttgctcgatcatttcggttcttacggcatttggatgctctcgatgaacgccgccaacctgtcccacgggagcatagaagcgctcaacgagttttaccagaaccaatacgacgaatacatccgcaagaaccgcgcgctgctcaattttgcgcagagcctggcggtgtttgacgaaaaggacgcgtttgtgcgaaagtttgccagtcggctgcgcgtggaaagcgcgggaggatattgcatatgaggttttctgtgatcgtgcccgcgtacaatgccgaattgtacatcgaggattgcgtgcgctcggtgcgcagccaggggctgagcgattgggaactgatcgtggtggacgacggttccagcgattctaccctagagcgggcgcgcgcctgggcggaaaaggacgatcgcatcgccgtgctgcaccaggagaacgccggggcaaccgccgcgcggctgcggggcctgcgcgccgcgcggggtgaattcgtgctctatctggacgcggacgacgcctgggagccggacttgctctcaagcgtggacgagggcctgcgcaaaagcggcgcggagctattgatgttcgctttccggcgcgtgccgggcaaggaggagcatcccttccccgcagaaggctggatcgagcgcgagacgtggacgcagaagctgatttcctccagcgccgtgaacatggtgtgggacaaagccgtgcggcgcgaaatcgccctggcctgccaaattggggaagagcacgagggcgtggcggaagatttgctgatggtgctgcccattctggaccgcgtgggccggttttattatatcgaccagccgctctaccgctaccgcgcggtgctggacagccgctcgaacgcctttcggcccaaccggcacaaagagatcgacgcggcgcgcgcccaggtgctggaatacctggcggataaagacctgaacgacgaggcgacgctcgcgcgcttttacacgctatatgtcgaccgcatgctcgattgcctttcgcgcgccatccgcgcgggcgcgtcccgctcgcagcgcaggcaattgttccgggatgtgcgcggcttcgcgctgttccaaatggcgcggttttatccgctggatctgccgctttgccggcgggcgatgcgcgcgctagtggcctggcgcttggacgggctatacgcttttttggtgcggcggcaggccaaggcgcaaaatcgcgcgcgttgctgacattgccgaaaatatttaacgcatagatgagggttttacgcttgtcaaagccgtaatattggggtaaaatgtaagatggaactaggaaatggagggaactatcatgattaagattggtatcaatggtttcggtcgcatcggccgcctggtttgccgtgccgcgcaggatcatgagaacgtccgcgttgtcgcgatcaacgatccgttcatcgatctggactacatggtctatatgttcaagtacgacaccgtgcatggcaagttcgacggcaccgtcgaagccaaggatggcaagctgtatatcaacggcaatcccatcaccgtgttcgccgagaaggatccggccaacatcaagtgggcggaagccggcgcggaatacatcgcggaagctaccggcgttttcaccaaggaagagggcgccagcaagcactttgagggcggcgcgaagaaggtcgtcatcaccgctcccgccaaggacaagaccaccccgatgttcgtcatgggcgtgaacaacaccacctacaccaaggacatgaagatcgtgtccaacgcgagctgcaccaccaactgcctggctccgctcgccagcgtgatcaacgataagttcggcatcaccgaaggccttatgaccaccgtgcatgccaccaccgccacccagaagaccgtcgacggcccctccagcaaggattggcgcggcggccgcggcgcggcgttcaacatcatccccagctccaccggcgcggccaaggccgtgggcgtggttatccccgagctgaagggcaagctgaccggcatggcgttccgcgtgccgacggcggacgtgtctgtggtcgacctcaccgtcaacctgaagacccccaccacctacgaggaaatcaagaaggtcatgaaggaagcctccgagtccgatcgctataagggcatcatcggctacaccgaggacgcggtcgtttccagcgacttcatccacgactcccgcacctccatcttcgatgcttctgccggcatcatgctcaccgacacgttcgtgaagctggttgcctggtacgacaacgagtggggctattccaacaaggtcgtcgacctcatcgagtacatggcgaaggtagacgcggaataatctttagaccaacccaaattgtgagggctgtgaaagaacagcaaaagttctttcacagcccctattaccccaagaccgaggcagccagtcgcggcgcgggacaactcattgccaaagttgtacaatggaaaggcaatggcctgacggacagccccaagagcttcgcacttataaagcgttttgtcaagcgctttttttgagttattgacgcaaattatcgtgaacgtgcgaaagtgcaaaggatctgcgttttgcacttttcgcttgtggattcgggcggctgcttctttttgaggaaggtgtgccattgaccgccaacacgccttgcgcctagtttccccggacggtcaagcttgtcgtgccgtttccagcggtattcattcccggcgcgggtaagctgctcgccctgtgattgcaggaaagaaacaaggtcggcttggttcgcccggtctatctgttcttgggtgtaatacatggttgatacctctctttctgtggttgaattgttcacagatttcaaatataatggggttagcaagttggatttaagaggtgatcttatgattgatttaatagttgatttccttgcaaccataggtgatataattgtagatatatgggtaaataagattgtaacaaaattcaaaaagaaatgagtcgccttttatccatccaatagtacagagggcggacaagccgaacagcttgcccgtcctttcctttatcgctcctgttcctgccgcttggtgcggctctgcgtctgtgccggttggtcggcgcggagtgcaatatccacgcatttgcggattttttgaagctcggcaacttcggcgcgggtatctttcagcgtttcatattccgcttcccgctgtgctttgagggcggtatattctttctcccacgcggagatcggcagggttttcacgccctccggcaaatgggcatggagatagcggtttgccgcgtcccatagggtaagctcggcgcggcgggcttcgactgcgcacttcgtgtgctcggcacttcaccccttcgaaccttcaccttttcgcaagcatttgctcccgaaaaataccagaaatgacgtacacgccgtcatttctgatgaaagcttcgttcttccgatactttgtcaatgctctgggggctgtgaaagaacagcaaaagttctttcacagcccctgtttcttgtcgcatggctttcagtgttcctgctggcgttataccatctcccaggcatgaaccgctgtccgcagtttgatacggctcgaaatcgttttttcttttcgtctcacgaaaatttcttcattcttcttgcagagggcgagagcatatagtataatttgtgtaatcgtgttgttcggatctgacagatttgggagggaattccatgaccctgatcgtttaccttgtctgcctcgcccttctcagttttctgctgcgcaattggagccaacggttccgcagcctgctgattaccggattcaatctcgtctttgctgcgctcatgttcttctcggtgcaggtgcatccaggcatgacgggaggagaggtctttgccttagtgggcagcatcctttctgcagccccgtctgccatcgcatttcagggcgacgcctctcttttcggcccggatgccagctatgtgtttttcctcatgtcgatttacaccgtccgtgcggtgttgatccttttcttccgggggctttttatccgtatccggatgaaatggcggctcgccacccgcaaaaccatctacatcgtaagcggagcccggaaagatgcggcccggttcatcgaggatctgaaccgttgccgtgcccatccggccatcgtctacctttccggccaggaagccggggatgcgcttctcgatgcctatgaggcagcgccctcctttctgcagcgattgaagaagtcaaaggactatcaggttcttcttctgcctgcgaaaggccagtacaactaccagcagcttttgaaattggaggaactgggcaagcaggggatggccctgcgggtcaccgcctttgtggacaacgaactgctgcggatggaggacatggcgttcccccatctgaatctgtaccttctttcgcaagagcaggccgtggtgcaggatttcgtctgccagcatctgcccctggcccacctgcgccaactggaaccccctccggaaccggggcacatcttccggcctcagtcgcccttctccctgtgcctcattggatttggcgctttttcccaggaattcctgttgcaaacctatgaaaacgccgcgttcaccactgcctcggggaggcccgctttggagatcctggtaatagaccaggatctggccgataaacaagccgcctttctcagcgattttccccattttgcccaagcgcccggcttgcagtggttggacgcgcacattccgtctgccattctcatgcaggcgctatccacaaaaagttttcaccagatcctggtggctacgcccgatacggaggaaaatatccgcctggccctccgccttcgccgcttctttggacgctgtgcgccaggccggccccatcctcagctggtggtcgccctgttccaggaagatccgggcgccgtggccctgctcagcagcgacgaaaacgtaatttttcaacaggtcaaccagcgccagtttacgtatgaaaagctgattgcccgcagcgctgaccgccaggccgaagaaatccaccaacgctatcagcacaacagcctcttcacgcccgagtggcgggaactgggctcctttacccaggcatccaaccgggcggcggtgtgggacattccgaacaagctgctcctggccggggatgtttccggcttgaccccgcaggccagggagactctcttctgggaactggcccagtatgagcatcttcgctggaacgctttccacttcgcccggggatggttgccactgcctcaggaagagctgaccagagaggagcgggaacaatgccgcatcaagcggccccaggaaaagcggcacgcctgcctggtggactgggatcagctggatggcctgccccaacgggagcctggcatcttgaagcggtatgactatgagaatgttgcatatctctttcccgctgcccaggagaaagcctgacttccgggccaatgcccaatggaggcggctcgcgccgcgcgatttgcttctcttgcgaagttagcgtagataccactctatttaggaggccttcccatgccccaactggcttacatcacccgcggaaatgccagcccccagggcaagccccgggtatacttctgctgccaccctgccgaccaggccgcttttctgcagccaatggccaaggaactgttggctctggtggactgctccgtttggtacgacccggaacccgccacgcccctctcccccgaggaacgatccagccgcgaagcagatctgatccagatgcagctgtttgtgctgccagtgactacccggctgctcaacggcccatcgcgcgccatggagtgggaattcccgcttgccagggagcagcgcatcccggtgttgcccattttgcaggagccgggcctggaaacgcttttcaaccaaaaatgcggcgatctgcagggcctgaacccgaaccagaccgacccaaccgcccggccctatgcggaaaagctgaaaaaattcctggaatccgttctcattggcgatgcgctagccacccaggttcgcgctgcctttgacgcctatatttttctgagttatcgaaaaaaggaccgccgggaagcccaggccttgatgcgcctgatccatgagagcgagttttgccgggatattgccatctggtacgatgagttcctcactcccggcgaggatttcaaccatgccatcgcccaggcgctggaaaagagcgacctgttcgcgctggcagtgacgccccatctgctggaaaaccccaattatgtgatgcgcgaggaatttcccgccgccaagcagagcggcaagcccatcctgcccgtggaaatgacgcccgtcgaccgcccgatgctggaacaagcctatccgggcattcctccctgcgcttccgggcaacagggcgcctctctttccgaagagctgaaatccgcgctgcgaggcgtggctctgcgggaaaatgacagcgacccccggcacaacttctttattgggcttgcatacctcagcggcatcgacgtggaggtggataagcagcgggcaatgggtttgatccaaagcgctggtgacgctggcctgcccgaggccatggaaaaattggtggccatgtataacaccggcgacggcgtggcccgggactatcgccaggccattgtatggcggcggcggctggccgatgccctgcgcgtccgctgggaagcggctcccacggaagacgcctttaaagccctggccaacgctctatgggaactgggcgaccaatacagcgatttggccgatctggccgctgcctgcaaactgtggcaggaagaatttctgcccctgtgccagcaggccgaggcgcagggcatcgcctgcgcccggcagtatctggccaacggttatagcagcctgggcaatctgtaccgcaggcagggcaatttgcccgcagccaagcactggctgaaagaaagcaactcccttcgtttggcgctgtcccgcgaggacaacaccgtgccggtccggcgggatgtggcggccagccagatccagttgggcgttttgtatcaggaagaagaaagcggcagcgccttaatgtacttcgaggcagccggggttctggcccgtgcgctggtgcgggataccggcgagtatgaggaccggcagctcctggcaactgcctgcgagtggacgagcaccgagtacaagcacggctctgacatgaaggacctggccaaggcgcgcagcctgctggaagaaagcctgcagcttcgccgcgccctgaacgatgaacgcccctcctcctacacccggcgcaatcttgttggcagttccctgggactgggaggcctgctccggaggatgaaggacctgcccggagcccgccgctgctacgaggaaagcctggcgctgctgcgggatctggttgaggaaaccgaggggctggacgcgcgggaaactctggcggtctgcctctgccggatgggcaccctgaaccggctggagggcgatctgcccgctgcccacagccattatgaagaagccctggcgctgcttcgcgctctggccgatgaaaccggtacgctagagagccggtcgaatctggcgtactgttgcagcctgctcagcgcgctgtgcaagcaggaaggcgacctgcccgggagccgccactggttggaggagagcgtgcatttgcgccgcgccatcgtggaagagagcggccttatccaggctcgccgcggactggctcgcgacctgtaccagttgggcaccctgcccggcggggataccgaagccctgtaccaggccgtggagctctggaacggcctggcagatatcaaaggccgcacctcgcccgattgggacgagcggcacaccgccatcctgacgctggcccagcacccgatcgcaccgaatccgccggccggtctggagagcgccggccgccgcctgtttgaggaaagcctggcgttgccaccggcccttatcgctaaccccggtacgcccaaagattggtggtatttgaccgccggccatctgaagatggggctgatcagccttgcgcatggcaactgcgagcgggcgggttactggttcaaaaatggatgcaatatcgccaacggcattgtgaaaaaaaatggcgtgccgctggaacgccacgccctggcggtattcctgtgccacacgggcagcctgccgggcggggatccccagcttctaaagcaggccgcaggcatctgggcctccctggcccaggaatgcccacaggcgccccaatatctcgaatttcgcgacatcgcggccacgcttctggccaaacgcactggggaggcccttgagtagttgcggtccataatccgtgtgtgcgcaaaaggggctgtgaaaaaccagcaaaaggtttttcacagccccttttttcgctcagcctcaatccgggtaggtaaaacgcttctggcgcaggtaatcgtgccaaaaatcgtgcaggaaatagccgtattcgtggctcacccaatagcggcggaaggcctcctcgggccggggatcccaatgttccaacccatcggcctgcgtggcgcgcgcggtggatagcgcgccttcgccgttgccattcacggcggaaaccgcgtagacggcctcttccggcccggcgaggaattcgcgcagcggcccggcatacgccagcgcacggacgttccccgccaagcagtacagccggtattcgctcgcgcccagcacttcgccccaggtgacccggtatccttgcccttcgcgcacgacccgcaggccgtccggcgcttgggcaggctgcgccgtgggatagagcggatactcccagcacggctcgccttcgcgcccttggtttgcgccgcgcacgcgcgcgtggtatttcctgccattgtgcaaatcgtgcagccggcagtgcgtctgttcggtttccaaggcgcttagccaggtgttgccgccatcttcgctgagctccacgcggtagcgctgcgcctcgccccgccaggagagaagcgcgcagccatcgcccacgcggcagccgaggatttccggcggcatgggtttggcgggcgcgtccgtccattcgaattccacgcgcccggcgggcacggtgaagcaaatgccgccttccacgccttgcgcgggcgcttcccgcccattcaagtacaaacggtagccgccgcttggcgcgtccagcctcaaggtcacgcgggcgttttcgcgggccaggatcgcgccgctcaaccggtggttttccacggtgaagccgatggcggcgttttcgcactccgcccgcgcgccgcccgcggcgatggcgcgcccgtcgaacagcgcggcctgcgcgagggtcttcccatagcgccgcacgatgcccgcgcgaccgtcgaattggatatcgccctcccggtgacggatgcgcgcgtcgcgctggaatacgaaatcggcgcggccctgcatctccaccagcacgccatattctttgaccgtggtgtacgtcccgcgatcttggttgaacgggcggtgcgaaacgagcgtgaggaaatcgccgttcccttcataataccggccggtaaaatcgccgtcctccgccaggccgggcgcgtccacgggcacgccgccctggctgggcacatatccggcgccgggcttgagttgcacgatgctggggaacttttcccggctgtcgttgaaccagctaaagcgtccgtgcacgtgttggtccgtcaccgcgtcgtagaccgtgatgtagtcgttcccgctcatgatcacgctgcggtagcggtagaaggcggaaaccccggcattggcgttcacgcgggcgtattgcgcaaagccaaaatcgcacagcggctccgtcaggtcgttgcggcccacgctgtggtattcatgcccgatcagcacgccgaaattgcaagtggcctgcgcgtcgcccttgttccagtcgcccacgtcttcccggcgctggccgccccactgcctgccatccgcccagtagcaaagactgccgcagccgccctgcgccgcgcagccccagcggtaattggggccttcgtcaatttgaatgagctgcacggccatttcatccggttcataaacccggctgcgcagcacaaaaccgtggccagtgtatttggcgctgaccaggcgcggccgcgtgccgcccaacttggcctcgggccggttgtccagcaggcgatagggcgaagtgtccgcaacgcgctcctcgaagccaggcgtatccttgcggcccaggtaccacaggttttccgccagcaggggcgcgtagccaaacagcgcgtcgccccagttcagcagctcgtagccattggccgggcgcacgtcgctgtgcgcgcccagggaggggaagcgccgcacgccgtccaccggcgcggaaagcgtgcccagcagatagcgccaaagcttgggtagcgcgggatagaggcccgcgtaatcgccataagtcaaatgcagcaagacctgcgcctggttgaaggggcgcagcatggcatgtacatagcagcccagattttccgtccagcggccgcccaggcaatcccaggcgcgcacatcgggccgggtgtggtatttgaggttgcgcgccatggccagctcataggtgtgccgccaggcctgcgcgtggggatggtgcgggaacagcgccgccgccacggccgccacgccgcgcgcgtccgccagaaaattgggatgccccgccagcatgttttgcacgggcatgtaattctcgtccgaaaacgcgtaggcgcaaaaggcgaaggccgcgcgcaaatcgtcaaattgccgttcgttcatgcgcgcaagcgtccggtcgaacaggatggcccaatcgtagaactcccggttggataccgcgccggtgcgcgccatctggtttagcgaatcgctcagctcatacaccactttttccacctgcgcgggggtcaaatcgcccttcacatgtcccaggtaccacaggtgccagccgttgcccggcactttatcgtccgtgaaaaagcgcggataagccttttgctcctccggccagcgcaaaacccagtccttcaccttatcgagcgcgagaaactcgtgccagaaccacagctcttccatgtgggtaaggcgcatgggcgaagctgtatcctgtttcaccaggccatcgctcttgggcccgcgggcggggccgtccagttcttggggaaagcaggccaatgccgtgccccggcagccgtccgccagcggatagacgaagcgcagcgcctcctcctggtaataaaagcgcacggccagcgtagccgaggagcgccacagcgcgtactcaccgtcgtcccacgattcggcatgtcgaatgaagacgccgatggcggcggtatcgtcccggaaagagactgttttatcctgccaccagctcacccagctatcgtaaggcgccaccagggtgggaatgcgcccgtccggctccagatattggtcgatatattcttcgccccggtaatggttcaggcggtgcgtgggccgaaagcccggccactcgatgacgagcgccgcgttgcccgcggtaaagccgtgcatttcctcgcgcatttccaggtattccatgcccagcgccaaccgcagcgacaagcgatagcggccccctaccgccgcgcgcgcctcgatgcatacgtcgcagaacacgtcgcccgcctgcaccagcgcgacatgtttttccgccaggggcacgttcaggcgcgccacgccgcgaaaaccagcgccggcgctctggagggagaacaacacatcgccgtcctcgcgcaccacaagggcgatcttcccgttgtccgcccagatttccccttttgtccgccgccaacggagcgcctgctccgcccggccgggcatgggctggaagcgcttttcctcgccgcaaagcagcgccgtgcacagggcgattttcccgtccgccgtgccctgcgcggcatagacgcgcccctgtgcatccaccagatggaagggttgttccgcgggcgcttttcctgggagaaagaccagactttccggccaggaatagccgggatggtgcaaattttccgtgagcgtgatcgcttgcatagtttgcctccctgtatttgcaatattggggaatgccgggatgtttgcgatttgtatgccacaagtataccataagccgtctgccggcgcaaagcggctgtgaaaaaacgattgttgttctttcacagcccctgtcaacgaagctgactgaaggggtgtcaatccctccgtcacggcttacgccgtgacacctcccttttcccttcgggaaaaaggaggcttttggatagtgctacttcatacgatagtgccactaaccaaaaggctccccttgagcccaaggggagctgtcagcgaagctgactgaggggttgtgaaagaacttttgctgttttttcacagccccttcaaagcagaagggattattttcccagatactcgtccacctgctcctgatagccctcgatggcggtttccagaccagcggcttcgagcttatccatgtattcattgtagtaggcttcccagccggccgcgcccttcacgccgccgtgcaggccctcgtgatactcctcatagatggcgttgatctgatccagctcaatggagaaatcatcgctgcgcagcacgatgccggtgagcggggagatgatggtgtggtcgccgtagttgatttcatcgatcacatcgatggtgtactgggtgcaagcctgattgaggtacgcattgcgggtgttgcccatgatccacttgtgcgcggaatacaggtaatcggaaccgccctgcgagctgtcatagccaaaggtggtgatggtttcgccatcctcgttgaattcccagtgcgtgccctcgatgccgtacaccacggtgttgtagatttccttgccgcgctcggtgttcatgcactggatgaagagcatggccttttcggggttcgagcaggtggcggtaatgccatcgccgcccgcggcgtagatcatgggcgcgtagtagttgtcgttgagctgataagcggtaatggaatagccgttcgcgtccgaattcgattgcgtgaggtattccgaggtgccagtgccgttgctgaattcaaacaccatcttggccgcttccgtggtgggataatccggggtgacaactttctgcggcggagtggtgatgtccatgtacacatagcccttgtcgtaccactccgccacgcgggcgaaatagtccttcgcgccttccatctggtcgaccatctgcaccgtgccggtggcgtaatccacgatgagcgctttgctggtggaatggccggccacgctgtcgtagtagcccacgaaattgttgaaattgctggtgccagggatggtgagcacactattgagataaatgttgtcgttgcccgtgccttcgcgcacgttcagcaggcactcctcggcgtaatcgaggatttcttcctgggtgtacttgcccaggttgctggccaggtacatgtccgccaacttatcgccatcgatccaacccttttcgatgtattcggtgggaatgtatagcgagcggccgttggcgatctgctgctggtggcagatgatgtattgcacgccatccaccttgccgtagtcgatcatctgctccggcagctcggcggtgagctcgggcaccagctccatatactggtcgatgggctgcagcgtgccgttttccaccaactgatagaggttgaggctcacggtgttgaggatgtccatgggctcgcccgaagagaggcccagggtcacctgcgtttgataatcggaggcggcgaaggggcgcagcacgatttccacgttttccagcccttcgtaggtcttgagcatttcattcaccttggcgttgaccagctcggtatcagcctgttcgccgttgccacggaaccaccaatacagcgtgacggtctcttccgcgccggcggccagcggcatggcgcacagcagcaggctcagagccaccaggatgcccaggaactttttcatgagaacaacttcctttccggatgatttatttgctggaggcacagccccctacaaatccaactttcttcgcggcgcttatcccttcacagcgccgatggtcagccccttggagaagtatttctggaagaaggggaaaatcaccagcaccgggcccgccgccagcaccgccatggcgaagcggaaggattccgtggggatctgcgcgcccgcttccagcgcggcttgctcggcggaaagctgctttaggaactccgcctcccgcagaatgcgctgcagcagatattgcagcgaatagagatagggcttgttgatgtagtacacgcaggtggtccagtcgttccacttgcccacgaaatagaggaaaccaatggtggccatggcgggcacgctcagcggcagcacgatgctgaaacagatgcggtattcgctggcgccgtcgatcttggccgattccaccagcgcgtccggcaattgctggaaattcgtgcgcagcacgatcaaattccaggcggaagccacgctgggcaagatgtacacccaataggtgtttttgagttgcaagtacttggtgatcagcaagtacgtgggcacgatgccgccgttgaacagcatggtgaagaaggccaggaaggtgaacacccggcgcagcgcgaagttgcggcgactgagcgaataggccatgatggacatcacgaacacgtgcagcgccatgcccgcaaagctgacgatggttgtgaccttataagagtcgatgagctgcttgggattgcggaacgccaattgataggcttccgtggaaaagggctgcggaaccagggaaaagccgccggatacgatggcgttttcctccgtgaaggaaacggaaaccatcaggatcaagggcaggatgtagcacagggaaaccaggatgaagaagacgtgcagggcgatttgcccatgctttttgctcttttgcaccgagtgttccgaatgaaccgcttgcatgttgccgtcctcctctcgttaaaacaggctgttttctgggctgatgcgccgcacgatcaggttggtgagcaccaccatcacgcagccggcggcggattggaacaggcccacggcggcggattgctccatggaaccgcccatcagggcgcggaatgtgtaggtattgatgatatccgtggtgggatagagcacgccctggtcttttgtgacctggtagaacaggccgaaatcgccgctgaaaatgctgccgatgcccagaatggtgaggatgatgatcacgcccgtgaggtgcggaaccatcacgtaccacactttttgcacgcggttcgcgccatccagctccgcggcctccagtagctcggtatccaggctcaccaggctggcgtagtacaccacgctattcatgcccaccgtttgccagatgtgggtgatggtgaggataaagggccagtatttgggctcggcgtaccagttgatccgctcgccgcccagagccaccaccaggctgttgatcacgcccgaggtgggcgccagcagcgcgtaaacgatgtaggcgataattacagtggacatgaacttgggcaggatgatcgtggtgtgataggccttgagcgctttttgcgatttcaggttgtagcacagcaccgccagcagcacgccgaagaacacgtccgtggccaaaaacgctatgctgtaaccgatggtattgcgcatcacgcgccagcaatcctgcgaggcaaagaagaactcaaaattccttaggccgatccaattgctggccagaatgcctaggttgggattgtatttcttgaaggcaatcacaatgccaaacatgggcagatagctgaaaatcaaaagcgccagcacgccgggcagggccagcgtgagcaattgtaggttgtccttcacgcggccaggcttggccatagcgctccggccaggttgcacagcagccttcacgggaatccctccatttcatgcgatatgtttattatatcgaaaaatcgcccgcattgaaagttacaatttgtgctatccgttaccttttgtgcccaattggaaggagggtcgtggacttttctgcgcgtttgtgtataatgttgactggaagattggcagattcggaaaggaggggagcgcagatgtggacagtggtggtcgtggacgacgaaaagaatttttgcacgctcctttcagaatacatccacacgctcgcgccgcgctttcaggtggcggcctgctttcaggacgggcgggcggcctggaattttttgcgcaaccacaatgtggacctggtgatcagcgatgtgcgcatgccgcacatgtccgggctggatctggcgcagcgcttgttcgcggacgaccgctccatccctgtggtgttgatcagcggctattcggaatttgaatacgccaagcaggccattcaatatggcgtggtgaattatttgctaaagcccgtggattttgaagaactgcgggaaacgctcgcccgcctggataaacagcttctcagccgccacaagagcgaaaacgccgaaggccaggcggcgctgtttctgttttacgccatttccgggctgttcgcaagccaggaaaccctgctgcgcgccgccgcgctggccggagcgcccttccagccggaaacggatggattcgcgctgctggaagtccgcgtgaacgcgagcgcgcaaaacgtggagcgggaaaatatgggcctcatcctggagaccctgctgcgcggcccctttgccgggaaccatatctaccgcgtgtacgaggcggcggacgcgttttattttgtggccgtgggcccgcacgcgccggacgccgaaacccaggcgggcgcctggcgcgcggcgctggaagaagtggcggatttttcggtgtcgctcgtcatcctcgcgcaggcggcggggctgttcgcgttttgccaacaaatcgcgcaatgcggcctgcgagaacggttttcttccagcatttcgcgggaagaagtggcggatagctccctttccggcgaagtggccgacgatcagcgcgcgcaacgcaagcggcagatctaccggcgcgcgctcgcctacatgcgcgaccatgtgcaccaggatctctctcgggaagacgtggcgggcgcggtgtacgtttcgcagggctatctctcccacttgttcagcgaaatggccggcatgagctttgtggagtgcctcacgcaaatccgcatggaaagggccgtggcgctgctggccaccaatatgcgcatcaacgacattgccgaacgggtgggctaccgcaaccggaaatccttcctggtgaattttcgcagctacaccgggctaacgccctcggaataccggcaaaaatattgtatgggcggtgaaagctaacatgggaaagggcgatggcgcgcccatgcggcgcgcgcttttgcgcaatttttgctatatctttttgtgttttctggccgtcacgttcgcgcttgcgctgttcacctacagcagcacacgcgccgcgctggagggcgaattgatgaacagcaccgccgacatcgccgcgggctatgccgcgcaaatggacgattttttcatcggcctaaaccggctcaacgccacgctgtccatcaaccagctcatcaattcctacattgcctcgccgcaggcgtccccgggcattttcgagggcctgcacgagagcatccgctcgcagctggaaaccgcgatttattcccaggattatgtcgattccatctatatcgtgtccgaagccgatggcagcttcatttccaagagcggctaccagccgctttccatgctgctggaccagaactggctttccatgctgccagaggacatgcagcccggcaagcccgtgcggctgtaccgcaaagtggcggatctctatccctatgtgctttcctatgtcacgcgggtcaatagcggcaaaaacgcgggctatatcgtggtgaacgcgaacatcaaatatttcccggcgctcacggagcaaagccgcatccaggccctctcctcgtatatcctcacccaggatgggcagattctctaccgcaccatgaagcgggatcttctcgagccgcttgcggtcgtgcccgaattgagcgcctttgcggcggaagaaaatcagatcacccgcttggtgcgcggcgatgcgccgtatgtctattcccaggtctattccccggagcaccagctctattttgtcaccgtcgcgcatttgacgcagtacacgcagagtctgtccatgcagcggcgcacgctggccgcgttttcctgcgcgctgctcgtgttcttcgccatggtggcggttttcctgtgcctgcgcgcgcaaaaacccatcaaggccctgctggcgctcctggaaaacccgcaaaagctcgcctatcaagcggattattctcccctggaagtgaagcaaatcgccgagcactttgtgcgctatatccaggcgaataccgcgctttcgcaggaattgcagcagcagatgcaggtgatgagcgatgtacggctgtgggcgctgcaatcccagatcaacccgcattttattttcaacacgctgaacctcatccattgcgaatgcgtgaagaccatgggctataccaaccccgcctccgatttgatcctgaagttcagcaagctcattcactatgcgttgtattccaaccacctggtgccgctcagccaggaactgacctacacccgcgtttttgccgatattctcgcccggcgctatggcgatagcgtgcagctggatttcgccatccccgacgattgcctggaagcttccgtgcccaaactgctcttgcaaccgctcatcgaaaacgccacccagcacggggcggatttttccagcggcaaaacgctgcacatcgtcattcgggcggaaacgcatgccgcggcggacggcgaggaattggttttcaccgtggaggacgacggcgtgggcatcgcgccggaggcgctggaagaattgcgccagaagatcgccagcgccaatggacagggcaagaatggcaaaaacggcatcggcctgagcaatgtggtcgcgcggctcaaactgctcttcccgcgccgggccagtctcaccatcgatagccgggtggaagaaggcacccgcgtaacgctgcacatgccgtatatcgtgcaggaagaatagtggcccttcgcgcgtcccctttgggaaaggggagccttttgggcgcagccgtgacggagggattgcgccatattccgccggaggctgtctcaaaaaacgaggcagcctccggcggcgtttttgtacgctttagagttcttccgccaattccaggcgcaataggcgggtttcgcccagctgcatttccatttcggcgtacagttcggtgccgggcaggcgcttgccatggatcgcgtcgaacgcgcgccccatgcgcgggaagtacacgcgcttcacgccgccctcgcaggcgtgcacgcacaccagattgcccgccgcggatacggtatcgcggctatacaggtagatgtgcgcacccgcgagcagcaaggcttcgcgcaccatggcggcgggcagctgcggcacaacgctccagaggatttggtattcccggttgcggtggagcaccgcggcggccgcgccgttttcctcgcgcgcgagcaccacgtcgccatcccccggcaacagcgcgacttgcgggccgctgcacagcagggaaggataggcctcgccgcgatacgcggcgcgcaggggcgcggtatctgccccgatttcgcaggcgatttcgcacgcctcgcctagcttgcccgccgcgtaaccggggtagccgctaaagagcaagctgcgaccttcccgcttccagtccaccaggcggcgcagttgtgcctcggaaaagcccgcgggcgagaggaacagcgccgcgcggtagcgcgcgggatcgaccgaggcgaagtcgctaaacagataggtatcgtaaggcgcgccgagccagccgagctgcaccatctgctcgtacacggcgcaatggccgaagccgtcggcgggagcaaaaccattgagcgcgtcctcatccaaaaatacggccaactgcgcgcgcggcgtcaggccgcccgccaggcaggtttcgcgataaagatcgcaggcccagcggtggaaggcgcgcaaggcgtcgtggtcgtaccagccgccccacatatcaaaccaccagagcgctccgccgtgcgtgaggatgcgcgcaaaggcgcgcagcatatcgcccagcgaggcttccaatgtgttcgggccgtgccacacgggcgcgtcataggcgctgttcacttccgggttggcatgcggcatggcctggcggatggggcgggaaaggaacgtgcgcacatccgcttccacaaaccagggcttgccgtgcaggtgcgcggattccagcgtggcctggaagggccaatccacgtgcccggcgcggctttcggtgtagcagaaggggctggcgaaaaaatccaccgcctcgctttccagcagcaggcgcagggaattgtgcccctgctccggattgaggatacttacatttccataaaaagcgcccatcagtttatgcccgccagtgatgcgcttgcctgcctcgcacaactggcgcacgaacagggccaactcctcgctgtaaaacgcgtaaaaatccaccacgtccctttccgcgatggggtcgcgcaggccgccgcgccaggcataggcgcgcgcagcgggccggggcacggcgatttgcgcaaaatcttgccattgcccgccccaggcgcggttgagcgcggcgacatcgccgtattttcgcgccagccaggcgataaacgcctgccgggtgggcgcggaatagtccataaagtgcaaaggatgcagcaccgggcggatgtattcttccgtggaaccggcggcgatgtgccagcccaccacgtattcgttccagccggaagcttccagccaggcctcgaaccgctccatggcctccgtggccgcttgcagccaggcgggcgaggagaacgagcagtgcgcgctcgcgcccgaagcgtcgcggcacagggcctcgggatgggcttcttcccaccaggtgggcatttccagcatcagccgcggcaggaggaaggcctcgccgggccgcgcgccgcaggtggcgcggcgaaaatcctcgtccacccagcggaaatcgtattcgccaggcgcggtcataaagcccgggcgaaagggccggatggcgctggagggattgatgcctcgatcgcccgcgtacaccgccacggagcaaaaccgcacgcccgccgcgcggaaatccgcgtagcgcccctggctgggctggtaggtcatatacgcgtaaggcgggagaatctgatcgttcgcgcgcaaaacaaacgcattttggttgcgctcgatggagcaggtaagcatgaaaccatcacactcctcatatagaaagaattgcccgcaagggcgctcgtccgcgaggaagaagcgccgcttcgattatagcacattttttcccgctatggtattgcgaattggcacatttgggttgcgttgacgaagtagccgcggcatttttgcatccggatgcaggaaaggtagcgaattgcaaacggaaaacaggatttgacactttttaacctgtgggaaacatgttatagttaggttgcatggtttatatgtgcaaccaattcgcattgcgtgtaaagggggaacgcgaatctatggcaatggaaaaatcgtccggccgcagccttctcaggcaaaggattttccggaactgggagctatatttgatgttcctgccggtgctggtctttttcctggtgttccattatgcgcccatgtatggcgtgcagattgcctttaaaaagttctcggcggtgcgcggcatcgtgggcagtccctggcgtgggctgtactattttcagcaattcttcgacagctatcttttcggcgagctgatcggcaacacgctgggactgagcctgtattcgctggccgtgggattcccaacgcccattctgttggcgctgatgatgaacgagctgcgcagcgagcgcgtcaagcgcgtggtgcaaaccatcacctacgcgccgcatttcatctccatggtggttatgtgttccatgatcatcctgttcctttccccctcttccggcgtgctgaaccggatcatcgagatactgggcggacaaagcgtgtatttcatgggcaagccggaatattttaaaacgatttatgtgctcagcggcgtgtggcagaacacgggctggagctccatcatctatatggccgcgctttcgggcatcgatccgcagttgcacgaggcggccaccatcgatggcgcctcgcgcctgcagcgcgtgtggcacatcaacctgccgggcattctgcccacggcggtgatccttttgatcatgaactgcggcagcctgatgagcatcggctttgaaaaggcgttccttttgatgaacgacctcaaccgcgcggccgcggaaatcatttccacctttgtgtaccagcgcgggttgatcgaccgcaactatagcagcgcggcggccattggcctgttcaattcggcgatcaatttggtgctactccttggcgtcaacgccattgcgcgcagggtcagcgacaccagcttgtggtaaggaggcggagggcatgaaacaaacgcgcgcttccattttttcgcgccagtccacgggcgatagggtttttgaaattgtcaacaccgccctgctcgcgctcatactgctggtgatcctgtatccgctatggtttgtggtgattgcttcggtgagcgacccggccaaggtggtcgccggggacgtgctcctctggcccgcgggcgtgtcgtttgaggcgtaccgcatggtgttccgcgattccatgatcatgacgggctaccgcaacacgctgtattacaccctcctgggtacggccatcaacttggtgatgaccgtgctggccgcctatcccctctcgcgcaaggactgggtggggcgcgggttctttatggcgttggtgatgttcaccatgttctttagcggcggcaccattcccacctatcttttgatgaacgatttggggctgatcaacaccacctgggcgatcgtgctgcccggcgcggtgagcgtgtacaacgccattgtgatgcgcacgttcttcatcaattccattccgctggaattgcaggaagccgcgcaggtagatgggtgcagcaacacgcggctgctgctgcggattgtgctgcccctgtccaagcccatcctagccgtgatggtgctgttttacggcgtggcacactggaacgcgttctttggcgcgttgatttacattacagaatccgaccgttatcccctgcaactggtgttgcgctccattctcattcagaacaccgcctcgcaggacatgctgggcgaggtggacaccctgggcaaccgcgtgatgctggcggaaaccatcaaatacgcgctgatcatcgtttccaccctgcccatgatggtgctgtatccctttttgcagcgcttctttgaaaagggcgtgatggtcggctccgtgaagggctgatcgcgcacttcgcaccccaccggccggtggccggaaatatagaataggaggaaattctcatgaaaaagatcctggctgcattgctcgcactcgcgctgctcttgcccggcgcggcccttgccgaggcggcgaacgcagggtatccctgcgtggacgagcccctcaccctgaccgccttcgcgacggctggcccctataccaaaggcgattttaacgatttggccatgtgggacgtgatggaagagctgaccaacatcacctttgaattcgaggctgcgccttcgggccagtccgccgagcggctggggctgttgtttgcctccaacacgctgcccgatgtgatcttcaaaaccggcctgagcaccaccgacgtttcgaactacgcggaagaaggccagctggtggcgatcgacccctatctggaagaatacgctcccaatttctccgccctgctggaaagctatcccgaggtgcgcaaggcgatcaccatgccggatgggcacatctatggcttcccctatgtggtcacggcctcgccgtccaactgcgcgcccaagctgttcatcaaccagaaggtgctggacgccttcggcgtggaggaaccccgcacgctggatgaattgacggagctgctgcgccaattcaaggagagcgactggaatggcaacggccaggcggacgaaatccccttggccatggaaagctttggccaggtggccactggcctgtttggcacctttggcctgggcacgcgtggcgccagcagcacgagctgggatattgacccggagaccggcgcgctgcgcttcatccccgcctcggaaggctatcgcgagtggctggaatacgtggccatgctataccaggaaggcctgctggatgaggaagtcttcaccgcggatatcccgtccctcaccgccaaggcagagcaaaacaccctattccttgtgtttgccacaagcagcaattatctgagcacgtatcaggacgattttgtggccttcagcgcgccgctcacgcgcgcggaaggcgatgagccgttctgggcgggcgcaaacctggccgtgtacgccaacaacaccttcatcaccaaccaatgcgaaaacccggcggcggttgtgaagtacttcgattatttctatggcgaggaaggcattaccctgttcttcatgggcatcgagggcgagacgttctattacgatgagaacggcaacccccaatacacggattttgtgaagaacaatcccgatggcatgaacatggaagaggcgctgggaacctacgtgtgctggagcggcggcggcaacccctccgtggcggacgatttgcactttggcgtgcacctgatcccggagatgaccgtcacggcggcgcagaacctgctcgcctatggcccggagacaatctggcccgcggatttcccctataccaccgaagaggcggaattgctggcggaatataagctggaaatcctcacctatgtggaggatatgcgcgcgcggttcatcaccggcagcgaatcgctggaaaattgggatgcgtatctaaaacagcttgaccaaatggatttggaagggtatactgaactggtgcagaccgcgctcgaccgctataacgcagaataaaacagtattggtttgtgggcgggggaggaagctcccccgcgcgctgtttcgttccacaggggagccttttggataatgctacaacgtaggaagttgcactcccaaaagccttcctttggcaccaaagggaggtggcacggctatcatcgcagatgccgtatgtaggaaacaaacgcttttccgcctctgcgagaatggcggctggctttgccaacgcccaatggatgcactgaaacaatttttgccgcgggaggatttccgtgaaacgaatgggatggtttttgcgcaccctgctgggatatttccttctggcggcgcttttgctggcgggcgtgggcataccggtttcgggcaatgtgcgctcgctggtgtatgaggagatcctctcgaacgcgcagggcgtgctggaatcgatggaaacggtgtttgccgattggatgcggggcatggaggaatacgcctaccaggtgcgcggcgatgtgcagatgaacccctatgtgctgcaggacgacggctacgccgcgctgaacgcggtgcgggaactgagcaaaaccgtgacctatagcaacgcgtgcgaaaccatcgtcctcgtgtacgccagcaaatatttttccggcctgccgcgtgtgtacacttcccaaaactataccgacgcccagcgctatttcgcgtatttttaccggtacgatcaatggagcctggaaagcctgtacgcggagatggcatcgatcgtggcgcccgttttgcgcggcccggaaatgatcacggtggatcgcgtgcgccgtgaagcgtatatgacatatgtcgtgcccctgggtgcgtcgtcctcgcgcaaccagcggggcgtgatgctatttctcaccccggtctcgcaactgaccgccatgcttcgggaaatcaacctaccggaagaggcaacgctggtgctggcggatgcgcagggccaggtgctgcttgcgagcggctctttggcggtgccgcagggatttgcgctgcccggcgaaggcgcggagcggtgccaggtagcgggcgaggcgtgccttttgctgcagggcagcggcgaggcgtgcggcgtgcggctcgcgctgctgctcgacgagggaaaaatcgcgggcatgatgcgctcgcggctgacgaacatcctgctaatcctgctggccgggctgttgctggcggtgggcgcatcgctcgttttgagcacgctggtgtttcgcccggtgcgccggctggcggggatcgcccgcagcgtcgatggaggcgcgggcggcaaacagcaccgcgatgaattcgagcacatcgagcgcaccatccgtttattgcacgcgaacaacgcggatttgctttcgcgcctgcattcgcaaaatggcatgctgcgccagcatctcttgcgcgccatgtgcctcggccagggcggcgcggagaaattcctcgccctattgcgggaggatggcatcgccttttcggagcgctgcctgcgggtgctgatcctgcgcatcgataacgaagcgctgtttgaaagccggatggacgcctccttgcgcgcgctaacgcggtttggcctcctaaaggtgctgcgcgagagcatgggtgcgcggcagatcgtggccgtgggctgcgaaatgggcgtgaatggcgatattgtggcgctgctcagcggcgctgtgcaggaagaatatggcctggcagccgcgctggagcaggtgcgcgggattgccgcgcagcactttgggctcacgctgtccgcgggcatttcgcaggggtttggcggcctggacggcgcgtgcgtggcctatggcagcgcggcgcgggccgtggagcagcgttttttggaaggcggcggcaaggattttttcgctggaaagctgccggattccgcttggaacgaggaattggagcgccaacttacgcgcctggaagcgcgcgtggcgggcgcgctgcgcgcgggcaactatgcgcagtgcgcgcaggcgctggatgcttatgcgcaggaaatgtgcgccgcgcacgatccggccaaagcgcggcagagggcgcttttgctgtatgcttccctatgccagcagttgcaaatgagcgagatgggcgcgtcgtctctgccgttggaaatgcactgccaatatgaaacgctggaacagatgcgggatgacctgcaccgcgcgctgcgcgtgcttcaggagcggcacagtggtcagcaggaaacgcagcgcagcgaattggtggacaattgcgtgcgctttatgcgcgagcacttggcggatgaaacgctcaccatggatagcttggcggcggcactttcggtttcggcgggctatctttcccgctgtttccgcgagcagatgggcttcagcccctggcagtatttcgacgatatgcgcatgcagcacgcgtgcgcgctgctgaaaggcacttccttgcgcattggcgatattctcgaaaagtgcggctatgtggacaaagcgaatttcatgcgcaaattcaagcgggaattcggcatgacgccaatggaataccgccgggccaacgcgcacgcgggttttacggacaagggatgaatctgggcgcgaaagatgcgctcaagaagagggaggaacatgcccatgtatgaatccaggctgcacgccacgaacggcgtggtttccctggcgctggacgcgcgcaacgccgagctgctcgagctggtgaacgagcgcacggcggacaatgtaatcaagagcaactgctatccgcaggcgatttcgccgtttgtgctggaaatcccccgcgagggcggcggcctgcgccgcctgtgccctccgcgctacgcgcaaattttgcgcgatccatcgctcgcgccggatatccgggtagagcaggaggagcgcagcgcccgcgtgcgcatcgactatcccgccgtggtggaaggcgacgcgcgccgcgatgtgcgggtgcaggtagaaatccgtttgcccgagggcgattgccgcacacaatggaagatttccctggaaaacggcctggaagaagagatccagcgcgtgcagttcccctgcctgggcggaatctatctgggcgatacctgggaggacgatgaaatcgttctgccggacaacgccggcttgcgggtgaagaatcccgtgcggcggcttgccgagccgcccagggtggtgcattggaaatggcaggaatattgctatggctacgggctgaacggcccctgcggcggcaaggacgaacggggtagccatgtgctggaataccgttattccggctctggctccatgctgtggacggatctgttcgatgtaggagaaaacgccgggctgtatctcacctgccggaacgatggcttgcgcctgaaggccatccgctgcgaaacctttggcgaggagcggccgggcatgggcgtggccattgtgcatttcccgtgcctgcagggcggcgcgcgctgggaaggcgaaccctgcgttctcgcgctgcacgagggggattggcactgggccgcggacgattaccgcgcgtggcgcacgggccttccgcaggccataccgcgccgccaccggcctgagtggttcgaaaagagcgcgggcctggtggcgcattacgattttaagtaccagggcggcggcgtagtacaccgcttccgggacattccggatttgcttttgcaggcccgcgcaatgggcatgaaccatctgttgatatccggctggaactttgatggcttcgatcacggcttcccccaatactggccggatcccgagctgggcagcgaacaagaactgcgcgaagccgtgcacaaggtgcgcgaaatgggcgggcacctggcgttttacattaactcgcgcctgtgcaacaccaaatacgcagaccggcaggattgcatccgccgcagcgcgatcatgcggcgcgacggttcgctatccatcgagcgctatggcgcggccgacctctccttcgcctgcatgtgcaaccaggataccgcctggcgggacgaattcgtgggcgtggtaaactatctcacgcacgatatcggcgcggatagcatgtatctggatcaactggccatggcgaggggcgagctgtgctaccaccctggccacgcggagcatgcgggcgatcctgcgggctggaatcagggctatgaaaaaatgctcgcgcagatgcgcgcagactatgacgagggcggcatggcgctgctctatgagggcgtgagcgatattcacggctggggcgcttccggacagctgatttccaccatgttctcgctgaacagcggctcgtatccggagctgtacaaatacactttcccggaacaaatcctggtggatatgatgaacccgcgcaggaacagcggcatgcgcgccgaacacgtagcgcgccggtccaccttcctgctgtaccgcgcgtttgtcacgggctcgtatttctgggtatacgacctggagatggacaataccttccggcgcgacccggagcaatacgcgcgcctgcaaaagaccgtggccctgcgcaacgcatggctcgccgcctatgggcaggggactttccgcgataccgtcggcctgggcgcgtgcgcgccgggcatgctggccaagcgctttgcgttggaagggggcgcgctggtcgcctgggcgaatgaaaagcgcatggcggacgcctttatcgatgtctattggctgggcgaccagctgcccaaggccgtggcccgcacctaccactgcccacaagaggaacggcccatccgccaagagattctgccccacggccagggcgcgattgtgcgcctgtatcccgaggtggaagacgaactgggcgtggcgattttgcgctgacggtgcgcgcctgtccttaggctctcgcacgcgtttggccgcctcagcattttgcccaaatttccatttcgcgcaaaatcataggatttctgacttgagttgcaccatcccgcggcttgtgagtttccaatcgctccatcgcttcgatgacaagggctgtgaaagaacttttgctgttctttcacagcccattgctttgcgcgccgtatgcgccgccgcaacccatgcgcgagaaagaaaatccgtttctgctttttcaaacccggcggcctgttaatcgtggcaaaatgcagtggtcacgctccaggcgggaatggacggcaagcacagctggatttcgtctgggccggaaggaacgaaggagagcggcgtttgcgccaaatccaggcccatgagcgtccattgcccgcccttgggccgccgcacgcgcagggacagcgattcgctcgcgcccggcgaaaggttcaccaccgaaacgctgctcacgcgcccgtttgcgtcctcgcgcggcagcacccaggcttgccacggcgtatccaggatggcggccagcgcgccgggttgcagcgcttccgccgccgcgaggatctggcggcgcttttcgctggaaatcacgctttgccataggttgtggccgaacaccgcccattttgcgccggcctgcgtggtgacaaaggcgttggcaatgccgtatggcgcggcgggatccgcggtttccgcgcggcggtttttgctatccgtgccgtacaacgcgaagggctccgtggttccatccaggtcttccaggcgatggcccttttgcacaaacagcgtttggctccacgttctgcccgcggccgcgccattgacggggtgcggcaaatagcgctcgtaaagctggctgacgtcaaccggcaccgcccgcgcgccaaaacgatagccgcgccgcgcgagcgcctccagcgcgccgccatcgcacagcacgctgcgcgcgagcaaaaactcgatctcctctgcgcccagcgccgccgcgttcgccgcgctgagcaaatagacc

SEQ ID NO: 3266 - DNA, 2345 bp, Unknown
  16S sequences of unknown bacteria
cctcatgcagctgctgcgctttgtgctgattttttcaaacagaagagattgaaaaatctgcaaaactgaattaattgaaatattaaataaaagccctgggccgattggaccgccccagaatgtgcggacagtacaaaaaagcccctatgtaggaaatattttgttttaagcagagtggcgctgcgtcagtggcgccactcctgtttttgtctggatacgttcatggttgtagaaatgaatatagctatctatcatctcatttgcttcctggaaagagtggggcttgtgccggtagatacattccgttttcaagattgaaaagaagttttctgccatcgcattgtcataagggtttcccttccttgacattgatggtgttatgccgtaagattgagttagcttgaaatatgcttgagaggtatattgaaagccttggtcgctgtggagctgcaactctgcggcgaccttctttttctctttactcatcgccaactttatggtatccagcacgagattgacagtttgatgtgttgccgtcttgtatgccacaatactgttgtcatacagatctcggatcatggataggtaaagcacaccttctttcgtatggatataggaaatatccgttacccacttttcatttggcttggatgcctggaagtttcgattgagcaggttcttataccgatggagttgctgaccaaggttctgccactgcctctttctgcgtatttcagccagaagcccgtttcttttcattattcttaatatcgttttggggtcatgatggatgccctggttttcccgccagcggtgcatccggcgataaccgtaagtctgatggcagtgcgcttggtgttggcaaagcatggctaccacaatggcatccttttggggctgccccttccttttgacataatcgtagtagccgctccgagaaactccaaagatctggcacataactgctactgggtattctgacttgtgacggtagataacctcatactgatactttggcctcacatcccttctgtgagcgagagaaaatcccgcagcaatttattttccatcctcagccgcttgttctcatacttgtattcctgcaaggtctttgcaggtttccgccctcgtgtttttggaacaccttgaactgctttctttcgttcccgttttagtagtgcgtggacaggccggtcgccttcgagtcccaatgcttctgcgacttctcgctgggtcattccatcctccaacatctgctggatctgtggcagcagcacctgtatcttttggtatcttcttgccatatacaactaccccctcatgtagtcattatcctacatgagggggcattttgtctattgtccgttttttacggttcagttcatttaccggcgggcattcctgctctttttactttagccttattttgcggtattcctctttatctaagacgctcaaagccgtcttcattcggtttttccactctgggttttacagccttcttttgcatattcatgatgagcagccactcatacagcagaagctgcattgcagcccccagcattattaggtgcatacccatatatctgtcgtcggccagcgccataatgcacatcattacgcccatcattattgtgaagaagctctgccaagtctttaccgccccataggcaaagcctgccgcccggaagaaagccatcatagcggttattatggccatcatctctataaggtatgaccagataacactgttaagggcattttgcttatagcaaattataagccacagggcatagagtactatgggcagagtagttcccaggcatgccagtgcagggtggcgcagtttgccgtgcttgtcgtttgcacttcctattaccagggggaaggaaattcctgaggcaattgccagcagggagagtatcaagagcaatgtggcatctttgtctgtttcgctggtggctatcagcagcacaccgcccaaagccataaccagtccgcaggcccagcgggccagagtgaacagccgcccctcattctttaaggcctggcagaaatccgtgggtatatacagcttttcgtttttcgcctgttcaataaagcggttaaaaagcaaggcggaagccagtatcgccagaggaaccagatagttgaatacgctgtgttccgcaagcccggcttcatcaaaggccatttgatcctggagccagcggaaaaacacgccgaaggctccggccccgcacacgtaacaggaaatctccaaagatcttttttgcataatcacatttccgtttcaataactattgattgaggcctccttcccgttagggcggaggaaaataaca

SEQ ID NO: 3267 - DNA, 20602 bp, Unknown
  16S sequences of unknown bacteria
gtataatcgaaaacggtggaggcgcagccctcgataaaggggataaaacggtcaagtccgcctgtcgagccggtggtttttaaaagctcggcatcggaaagaatctgttccttggtcttttcggatttgggcgagcgaagtctcgacaccgcgtcctcaagccgttttgcaagaccctcgggatcgtttataagcacctctcttgcgggaggaatttcgattttgtcaaagctgtcccgacggcgctgggaaatgacgtcaaagctgcccatgcagtcaatttcgtctccccaaaattccacgcgggtcggaaggtctttgtcgggagtgaaaatgtcgagaattccgcctcgtttggcaaactggcccggcccctccaccgtgtcgcaccgcacataaccgttataaatcagctttttgacagcctcgtcgggagagatttcctgccccgcgcaaagggagaaattcatgcggtaaagccgctcgggggaaacggtgaattccatggccgaatcgacgcaggcgactatgaccccgtagtctccctcaagagcctttgacagcacgaaaagccgttcctgctcatattctctcgagcttgcgcctttcgggcgaaaatcgaagtcgcgggcggggagcagtattgccttttgccccatggcgtttatgtcggcgcaaagcttggtgccttcgccctcgtcccccacgagcacaagccccctgcggttcgttcttcggcagagggtggaaattatgtgggctcggtgaacatgggaaactcccgtcacgccgagggggaggcgttccttttccaccgccttttcaagagagcggtattcggggagcgcagttaaaaaattgtcgaaaaagggcataaatcctccgtttcaaatcggctttttgcgccgataaaactcaaattaccccgcaacacgctttaggggggtgttgcggggttaaactcatattcgggcgaagattatttgttctcaaacattttgagaatggtcttgtcgccgtaaacgctttcccaatcggccttgaagtcgtctatggcgtaaagggtcatgggatgataaatgatggaatcgtaaagctcgggggtgatggtgatggcgtgggttccgagcatagaaatcttgtgaacctgctcaacggtcttaaaggaagcggcaagcaccttggtctcgatgttgtgagccttgaagagggtcacgatgtcgccgaccacgtttacaccgtcggaaactatgttgtcaagacggttgacatagggggcgacaaaatcggcgccggccttggctgcgatgagagcctgctgaggggtgaaaatggcggtttcggtaaccttcatgcccatttccttgagctttgaggtggctttgaggccttccttggaaatgggaacctttatatagaggttgccgccgacataatcgcgaagatcggtggcttccttgacgatttcttcataagtgtcgcctgtgacctggatgtggaacattctgtcctcgccgatgatcgagcggatttccttaataagcttgggaaaatccgagtgttccttggaaatgatcgaagggttggtggtaacgccgtcgataggataaaattccacacaatggcgtatcttgtccagattagcggtgtccataatgtacagcataatgttttccttcttttatctatattcttgcacacattatatcataccgaaaaaacaaaagtcaaccttatccttgaaataaatgggctttaatgttataatcgtatcaattaaaacaaaaggagcaccttatgaaacgctttttgtgcatttttgcggcggcggctcttatgcttgtgctttcctcctgcggaatgaccgcctatgaggacgccgacagttattttaaaatttcctttcccgagagcatgaaggtttttgtcatgagcgatttttctcccgacgacccggctcttgaggaatacggcatagacgccgacgaaatgagcaattttaaggaaaaggaaggcggaattttctacgcaaaggacagcctcggaaaaagctgcagcgtggccattaacggaagcgataccacaatcgacatctgggagcttaaaaaatccgattccgacacagttatcgacctttataagcagatagcctcatcctttaacggagcgggatatgccgtcatcgccaaaaccgaggtcgaccagggcgacgcacattatatatacatcgaattttcttcaaagggaaccgatattgtggatacgatttatatgaccaccgtcaaaaacggtttgcagtattccataatgtataccgccgaaaacatgaccgaaaacgatgaaaacgaggcacattcgatttttgacaccgcctttataaccaagacaatttccaacaccgagaccgatgagcaggcgcagcagcgggtgagaaacgccactcttgccataatcgccattgtcattctcatcgccgttgtggttaccgtcgcctttgtaaaacacgcaaaggagaaaaaacgcaaaattgataacggggaatatgtttcccagtttaaagacaaagaatagagaggaaggtatttatgaatacgcttaaaaacagagattttctcaaactgcttgacttttcctccgaggagataggttatcttatcgaccttgccgcgagatttaaaaagcagaaaaaggaaggaattccccacagacttctcgagggcaaaaacgtcgcgctgattttcgaaaaaaccagcacccgcacccgctgcagctttgaagtggccgcaagggatctcggtatgggcacgacatatctcgacccgaccggttctcaaatcggcaaaaaagaaagcattgccgacaccgcccgtgtgctttcggggatttttgacggaatagaatatcgcggcttcggtcaggaaatcgtcgaaaagcttgccgaatatgcctcggttcccgtttggaacggactgaccgacgaattccaccccactcagatactcgccgattttctcactataaaggagcggttcggccgccttgagggaattaaatttgtctacatgggcgacgcgagatataacatgggcaactcccttatggtgggctgtgccaaaatgggacttgattttgtgggctgctgccccgaaaaatatatgcccgaaaagggccttgtcgacacctgtaaggagcttgcaaagcaaagcggcggcagcgtgacctttgagaccgacccggcaaaggctgctgtcggcgcaaacgttatttacaccgatatttgggtgtccatgggcgagcctgccgaggtttgggaggagagaataagcgacctttcggcctatcaggtcaattcaaagcttatgagcgcagccggcaaggacgccgttttcatgcattgcctgccctcctatcacaataaggaaacgacgatcggaaaggaaatgtgcgaaaaattcggccgcgaggacatggaggtcaccgacgaagttttcgaaagcgagcagtcggtggttttcaccgaggccgaaaaccgtatgcacaccataaaggcggtcatggccgccaccctctgcgatgaaatataacattgtcgatagagagtttcgcagcaaaatgcacaaataatatcataaatattcatttttcatagcctcgtttacaaatttcgcctaaaggtatataatggaagtgtcgaaagacaaatatattgattttgcttggaggtatttactataaaaaaattttcgagctttgaaactgcaacgcacttcaaaatgatatatttttgatacaagaaaaggcaaatcccacagataatgctgacgcatatctgtgggatttaacgcgttattgtacaaaaagatgttgttttgaagcaaaactgccttattaacgctcagccttgcgttgaggttcttttcttatccgattaaaacggttggaaagcggccgtataaatctcctgctcgcttaaaccttgggaatcgacaccttgtttaccgaggcctgaaggataagcagcgcgtcggtgacggtcacaaatccgtcaagatttgcgtcggcaagtgatttttgttccttttcaagaccgatttttcccaccgaggattgcagcacgagcagcgcgtcggtgacgcttatttctccgtcggcgttaacgtctcccacggagaaaaccgtcatttggcctttttccgacacggccgtggaaaacgaaatcatgggaatccccgccgatgaacacatattgaccgtttcggggaaggtgttttcggtggcggcataccaaatgccggggttgtaaaccgaggatggggcgttatatttgacctgagttatctgctcgtccgacgtgagcgtaacgctgttatatcccgttatttcggtcgaaaggggagaggtgttgttgttcaaaagaaaaccctttatgccgccgttttcaaaggacataagcccctttcccacatagtcgaaatagagcgtgacgctttttttgtcctccgaaagtcggtatccctttatctgcggcccggccgtcatgttgagcccgccgccgtcgtatataaccgaccccgcaagcgccgaaagccttttggcaatgtaatatttgcagtaggggtggagattgtttttgtgctccctgtccttccaaatgtcggaggtggcggccatataggtgttgtcgacggccgtgggaataagccccattgccgctcttaccgcggcggtgggaagaaatgcccaaccctcctcggtgccgttgaacatggagggcagctcggttacgaatacggggaaatttttgtttgtcaaattgctgttttgccgcatatattccacaagagccgagaacctgtcgacatatgtttcataggaaccggatataaaatcactctctccctgataccatatcatgccggcaatggccgtgtgtttaaaggggcgcatataatgattatacataaagcgggtgggaattttcgtgcccgcataatttgttttataaagcccgtccgagtccttttcgtcggttttaagagcgtttgacacctcgttcggcaaaaaggcgtttatggcctgaccgttgccgtttatctctattatacccacgggaattttgccgtcggttttttcgataatgtcccttgcaaagaaatatcccacggccgaaaaatccttcacgctttcgggagaggttttttgccagccgccgttttgaataatgtctttgcactcctcgtccgagccctgagcgggataggcgttttgatagacaaggccgttgttgcatatgcgtatggggtcggactcatcgggaacaacgttctttccgccgtagttttcgggagagtttgtcaccgcctcgtcaaaggtataggcgatgttcgactgccccacggccatgtatacgtcgccgacaaggatgtttttcagggttatttccttggttccgcacctgacggtcatgtcgctgccctctgtttcggcctcaagggctttgggataggtgaccgaccattcgccgttttcgacgattccgtcggcgctttggtccttaaattcaaccgtgaccgtttctccgtcgagagaggagtcggcaaatccgaaaacacggaactgttccccccgctgtatgaccatgttgtcaccgaaggtgccggaaattttaaaggaggaaaaatccttttcggcggctcccgcaaagccgctgccggtcagggcgagggccgcggtcagcgttgaggaaacaagggttttaagtattttgttcataaaatccactccgtaagttcgttattatcctttccgataataacataaaaaggcaaaaaaatcaatgaccgcggcagccgagatttcaaaaattgtttacaaattctttgttgacaaaaaaatgcctttatgataaattgttaatcggttaattgttaatcggttaaataaatcgaaaggagagggaaaatgctgtcgaaaattgaggaaatatcacttctccagcggcagtttctcacatatcaccgccttaatcatcaaaagtttttggagggtctcgggctctattacggacagcctatgatgctcatgtgccttgccgataacggcgagctttcccaaaaggagcttgcccgttttctccacacctcatcggccgccgtggccgtttcggtcaaaaggctcgaaaaaaaggggctgctcaaaaaaagggtggataaggaggatatgcggtttaacaaaattgcgctgaccgaggaaggtgcaaaaaaggccgccgccgccaaggaaggtatgggtgccgtcgacaaacggtgctttgacggcttttcggaggaggagcttgacgctcttgtgcgcttttacgaacgaatgataaagaatctcgaatcggaggtaaaagaatgaaacgatggtttaaatacataaagccctatgcgctttattttataacgggtccgctgtgcatgatagtggaggttgtgggagaaatttttatgcctttcttcatggcacagataataaataattacagtgcgggcaatctgacggtgggctcaagcctcggctatatgataggtatggtgttaacagccttatgtatgatgctcggcggcgtgggcggctcctatttcggagccaaggcctcggtcaactttgcggccgacataagaaacgacgtctataaaaaggttcaggccttttcctttgccaacatcgacagattttccaccggctctcttgtcacccgtctcaccaacgacgtgacccagcttcagaactttgtcaacatggtgctgagaatggcgctgcgcgctcccggcatgatgatcggcgcgcttgtgatgtccattgcgctcgagccgagactgtccatgatattccttgtgagcataccggtgctgcttgtcgcaatatttatcataaccaaaatgggattcccccgtttcacccgaatgcagaccaaaatcgacgggctcaactccaccgttcaggaaaacatcacaaatgtccgcgtagtcaagtcctttgtgcgcgaggatcatgaggaacagaaatttgcaaaggccaaccgcgaccttaaaaagaccggtatgggcgccatgaaggtcatgatattccttcagccggtcatgagcctttgtatgtatgccaccataatcgccgccgtgtggttcggcagcaagcttgtcatgaacgcgggcatggaggtgggcaacctttcggcctttataacctatgtcacccaaattctcatgtcgctgcttatggtgaccatgcttttcatgttttcatcccgtgcaatggcctcggcaaagcgtatcaccgaggtgcttgacgagcctctcgaccttaacgacgacaatgccgcccatagagagcttgccgttcaaaagggcagggtggagtttaaaaatgtcggtttcagatattacaaaacaagcgaggacgccgtgctttccgacataaatctcaccgtcgagccgggcgaaacggtgggaataatcggctccacgggctgcggaaaaaccacacttgtttcgctcatcccccgtctttacgactgcgatgagggcgaggtgcttgtggacggagtcaacgttaaagattacagcctttatcatctccgcgagggaatcggcatggtgcttcagaaaaacgtgcttttctcgggctccatttccgacaatctccgttggggagacgcctcggccgatgacggacagatcgccgacgccgcaagaaaggcgcaggccgatatgttcgtaaaaagcttccccgacgggtatgaaaccatgctcgaccaaggcggaacaaacgtttcgggcggacagaaacagcggctttgcattgcgagagcgctgcttaagcatccgaagatactcattctcgacgactccacaagcgccgtcgatacagccaccgaggcaaaaatccgagaggcctttgcaaccgagattgccgacgcgaccaaaatcataatcgcacagcgcatttcttcggttaaggatgccgacaagatcgtcgttatggacgacggcaaaataaccggcgtgggcagtcatgccgagctcattgaaaacaacgaaacctataaggaaatttactggtctcagatagataaggagggaaattgagatggaaaagaaaagaactcttgaagacctccaaaagcaatacagccgctcgggcggaccgggacgaaagagaggtcccatgggtcacggacccggcggccccggaatgaggggcgcaaaaggcaagccaaaaaacatgggcgccacggtaaaacgcctgcttcattatgtgggagcttataaattccgctttgtcatcgtacttgtatgtatgctgctcaacacggcggcaagcctttgcggctcctatatgcttgcgcccattatcaaccgcctgaccctttttgttacgggaaaccaaggcaccatgagcgccatggaaagctttgccgacggcattatcgaaaagatttgcggtctgccggtgatttccgcggcaatggcgtcgacggcgggcgcggtcacggtttatataacctccgcccttgcccttcttgccgcagtttatgtcatttccatagcctgcacctatcttcaggcccgccttatgctttccataagccaaaattcggtggagcgcataagaaacgatctgttttccaaaatgcaggctttgcccgtgagatatttcgaccgcaactccaccggcgaggttatgagccgctataccaacgacatcgataacatcgacaccatgctcaacaactcccttgtgtccattgtcagcggcgcggtaaccctaatcggaacctttgttttcatgataaccaccaacatctggctgaccctcatcaccgtcgcctttgtgccggttttccttttcgccggcggatttatagcgggaaagagcagcaaatattattccggtcagcaggccgccatcggcgccgtcaacggatatatcgaagaaagcgttaccggcagcaaggttgtcaaggtgtttaaccacgaaaaggtttgcgaggaggaattcgagcttttaaacgacgatcttcgcgaaaagcagttcaaggcgcagttctacggcggaattatgggacccattatgggaaacagctctcaggtatgctacggtgttaccataggtgtcggcggaattctcatgtgtctcggccgcatgacccccggtgccctgaccgtctttgcgggatattcccgtcagttctcccgccccataaacgaaatttccatgcagatgagcaccatattcgccgcccttgcgggtgccgagcgggtgtttgcggttatggatgagcttcccgaggtggacgaggccgagcaaaaggccaaaacccttgaaaatgtcgagggtgaggttaaattcgaacacgtcaccttcggatatgttcccgaaaagacggttttaaaggaactttccctttacgcaaagccgggtcagaaaatcgcctttgtcggctccaccggagcgggaaagaccaccattaccaatcttctcacaagattttacgacataaacgagggtcaaatcctcatagacggagttgacattcgtgaatacaaccgtctgaccatacgcaaaaagatttccatggttcttcaggatacccaccttttcacgggtacggtcagagaaaacatccgctacggcagactcgacgccaccgacgaggaggtcgaggcggcggccaagcttgcaagcgcccattcctttataatgaggctgtcaaagggctatgacaccgttatcgagggcgacggagccaacctttcgcagggtcagcgccagcttttgaatattgcccgcgccgccattgccaacaccccgattttggtgcttgacgaggccacaagctcggtcgatacccgcaccgagcggcacatagagcacggtctggaccggcttatgaagggcaaaaccacatttataattgcccaccgtctgtccaccgtccgccatgccgacgccattatggtgcttgagcagggcaagatagtcgaacggggcacccacgagcagctcctcgagcaaaagggaagatattatcagctttacaccggcgcagccgagctcgactgaccgaagcataggttttccgttcggggcttgtttatattacaatccctccgtcacggctgtgccgtgccacctccctttacacaagggaggcttaacgaacacaatttttgtgaaagcttttagctttcatccccgcggtgaaaaaaacgattaaaggaaagccgattgaccgtaagttttaatgaaatttcttatctgtcaaaattaagcaaaaagcagaccttcgtgcaaacgaaagtctgctttttccgtatttcgggagttgtttttcgataaaaccacaatccctttgaagacaacataaaacagagtttttcccgcagtacctgctcttttgtggaaaaacaaaaattaaagcgttacgcaaaacgcaggctcccttgtgtaaagggagctgtcaaccgcaaggttgactgagggattgtccgttttttaacagccgccggtttttcatattatgaaaggtgttccggaaaaaacttttgaaaataataaaaaaacctcttgacaaaagggtaaagaggggtataataaaaccaacatatgaacaattattcaaatgaaaggttgagcaaatatggaaaacgacaaaaacatagagctctgtgccgacgaatgcgtccacgaggacgtcatcaaaaaggtgaccgaaatcatgcccgatgaggacattgttttcgaccttgccgagcttttcaaggttttcggcgacagcacaaggcttaagattctttgcgtgcttcttgagtcggaaatgtgcgtctgcgatattgccgagctgcttaacatgagcttttcggctatttcccatcagcttcgggtgcttaagcagtccaagcttgtgaaatttcgccgagagggcaaaaccgtgatttattccctttcggacgagcacgtccgttcgataatcgaccagggacttgagcatataggagagtgattaaaatggaaaaagagcaaaaagaatccttaatcagaataatcgcctcggcggtgctgctcggggcggcatatcttgtcaacagtctcaccgagcttaccgcttttcagcaggttttgctgtttctcattccgtatcttgccgccggctatgacgtggtcatttcggccgtgaaaaatattcttcacggcgagcttttcgacgaaatgtttctcatgacggtggcgaccgtgggtgccttctgtatcggggattatcccgagggcgttttcgtcatgattttctatcagctgggcgaattcttccaggattatgccgtcgacaaaagccgcgattccatttcggcgcttatggaaatctgccccgaaaccgccaatctcgaaaccgaaaacggccttaaaaccgtcgaccccaaagcccttaaaatcggcgacataatcgttgtcaaggcgggcgaaaaggtgccggtcaacggccgcataatcgagggaacttcctctcttgacacctcggcgctcacgggcgagtcgcttccccgtgaggttgccgagcgcgacgaggtgctgggcggctgcatcaacataaacggcacgctgcgcataaaggtcacaagcgtgtttgccgattcggcggtggccaaaattctcgaaatggtcgaacacgcaagcgagaaaaagggtaaggccgaaaaattcatcaccaaattttccaaaatctatacccccgccgtggttgttgcggcggtgatgcttgcggttattccgccccttgtgacggggcagcccttcgcttcatgggtcaaccgcgccctcattttccttgtaatttcctgcccctgcgcccttgttatctcggtgccgctttccttcttttcgggaatcggcggcgcatccaagagaggtattctcataaagggctcaacctgcctcgaggcgctgtccaagacctcagccgttgtttttgacaaaacgggaaccctcaccgagggcaaattctcggtgactgccgttcatcctcaggtcatttcggaggaagagcttgttaaaatagccgcgtcggcggaatatttctccgaccaccccgtttcggtgtcgcttaaaaatgcctgcaaggacgaaatcgacccctccgttgtcaaaaatgtaaaggaaattgccggcaagggactttcggcggaaatcaacggccgtaaggtgcttgtgggcaacggcaagcttatggcggcggaaaatgtggaatatcacgactgccacaaggtgggaaccgttgttcatgtggcggttaacggaaaatatttcggtcatatcgtcatttccgacgtggtaaagcccgattccgaaaaggcaatcagagagcttaaaggtgacggctgcaagacggtcatgctcaccggcgaccgcaaagaggttgccgagcaggtgggtaaaaacctcggtcttgacgaaattcacgccgagcttctccctgacggaaaggtggaaaagctggaatcggtcatgaagaaaaacagcggcatgacggccttcgtgggcgacggaattaacgacgcgccggtgctgtcaagcgccgatgtgggtattgccatgggtgccctcggctccgacgccgcgattgaggcggccgacatcgtcctcatggacgacaagccctcgaaaattcctctcggcattaaaatcgccaaaaagaccatgcgtcttgttaaggaaaacatcgtcttttcccttgccgttaaggcggtcatactggtgctcggcgccgttggcatagccaacatgtggcttgcgatattcgccgacgtgggcgttgccctcatcgccacccttaacgccacaagaggtcttaatacgcgaaatatgtaataaaaacaaaccgccgtttgaataatttcaacggcggtttttctgtacattttattcgcttctgagagcctcgacggggtctttttttgcggctaccgagcttggaataagcccggcgataagggtgagcacaacgcttataataacaagtattgctcctcccgccggcggcagcgccgaaattcccgcgatgtcggtcaggtgctcgacaataatgtttatgggaatgttcaaaagcagcgtcacaagtattccgattatacccgccacaaagccgacaataacggtttcggcgttgaacactcttgaaatgtcctttttggaggcgccgatgcttcgcagaattccgatttccttggtgcgctcaagcaccgaaatataggtgattattcctatcattatggacgacaccacgagggaaatggccacaaaggcgatgagaatatagcttatggcgtttattatggtggtcaccgacgacatcataagccccacatagtcggtgtaggttatgctcttttcctcgtcgacgccgctgttatattgcttgataaaatcgacaattttgtccttgccctcaaaatccgagcagtagaattccacgcccgacgggtcgtcaagggtggaaacccccagcttttcgatgttttcgtcataggtggcggtggaggaggtcattttgacataggcccttattgccgaggtcagcgagtcgcccgaaaggccggcgaacatcatttgatactgaggcggaaccgaggaaatgtcgaaattcttgatttcctcctctatatcgtcggcggttttgaatttgttccccgtgaaaacgtcggtgtcggtgtgctccttttgagccttgacaacgtcggtttgattgttcttttccatgacataatcggtaagctcgggaagataacccaccgttccgccgataaaattgcccacctttgaggcgtcttcggtgtatctcgcaatgcccacaatcgtaagctccccggcgtccttaagcttttcggcaagcttttgcgaatcgtcggttatgtcggtgaaaacgccgtcctgctcggaatagagctcgccggcagcggcgaatttgaattttcttcccataagctcggaatattcatagtcggcataatcgggctcgccaacctccgatttcataagctccttaagcctgtcgcggtcgagaattccgagggtgtagaggctataatcgcttatgcggttgtttttgtcgagaatgaggacggcctcgtttttgttttcaggcatttttccgtccagcagctcataataattttgctgaagatttttgtcggtgaaaatttcggtgaaaacgtcgctgtcgttggccgacatatatttgctcgactgagagtcgccctttgaggaaagatactcgttcatgttaaggtcggatgtcagggtattgggattggccttgacgggattttgctcgtcgtcgcagttataaacgtaaatttcggtggaatatttatatcggatgtcggaaacgctgtcggaaatttcgtcggcatgggcgtcaagatattccttaaaggctttgaggtcgttgacgtggctcgccgaattcaggctcttgatttggtcatagaggaagctttgggtgtaggccttgtcggtgccctccggctgctcgtccttcatgagacccgacatcatggaactgtaatctatcgactgcttgtcaaccgtcagggggtagcttgaaagggtttcccgttcggttttgtctatataaagccgcgcgccgcttgacagcgaaagaatgagagcgatgccgataattccgatgcttcccgcaaaggaggtcatgaaggttcggccctttttggtcatgaggttgttaaggcttagggaaagggctgtgaaaaacgacatggaggttttatgtttctttgcgccctttttcggcttttcgccgactttttcggccttttcggggacaaaggggtcggtgtcgtcggttatgcggccgtccttaaggctgattatccttgtggaatacatttttgcaagctcggggttgtgggtgaccattatgacaaggcggtccttggcaatttcctttaaaagatccatgatctgaacgctggtttccgagtcgagggctcccgtgggctcgtcggcaagaagaatgtcgggattgttcacaagggcgcgggcaattgcaaccctctgcatctgaccgcccgaaagctgattgggccttttgtgaagctgtttcccgagccccaccttttcaagcatttcggccgcccgctttttcctttcggatttggaaacgcccgaaagggtcagcgccagctcgacgtttgcaagcaccgattgatgaggaatgagattatagctttggaaaacaaaaccgattttatggttgcgatagctgtcccagtcgccgtccttatattccttggtggaaacgccgtttatgacaagatcgccctcgtcatatcggtcgagtcccccgatgatgttgagcatggtggtttttcccgagccgctttggccgagtatggacacaaattcgttttccctgaagcaaagggacactccgtccagcgcccgctgaacaaagtcgcccgttttatagatcttgacgatgtttttcagttcaagcatatttacctcctgtttttcgccttttgtcaaaatgtaacaaccgaaccattatacatataatatttgaacctgttatgaatatttgacggttgaaattcgcataaaaaagaattaaaatgtaagtatggatattaaagcttttaaaatggaaataccgaaatatgtcgaagagctttgcggcgtcctcgccgacagcggctttgaggcctatgccgtgggcggctgcgtgcgcgacagccttctcggtaataccccccatgatttcgaccttacgacctcggcgctgccgcagcagatgaaagaggtcttttcgtcgtatacggttttggaaaccggcattaagcacggcaccctgacggttatgtgcgggggcagcggggttgaaatcacaacctttcgtgtggacggaaaatattccgaccaccgccgtcccgacgaggttaaattcacctcccgcctttgcgacgatcttgcaagacgggatttcacggtcaatgcctttgcatacagcgaaaaaacgggtcttgttgaccttttcggaggaatttccgaccttgaaaaagggattatccgctgcgtcggggaggccgacaggcggtttgaggaggacgcgctgagaattctccgcggtctgagatttgccgcaaggctgggcttttccatagagcaaaatacggcaaaaagcatgataaaaaagcgagagctgcttaaaaacgtgtcctccgagcgggtcttttgcgagctgtgcggctttcttgagggaaagggcgaggcggtggaaaggctgcttattgattttcgagaggtttttgccgccgtcattcccgagctttctccttgctttgattttgaccagcgctcaccttatcatcggtatgacgtctatacccacattgcaaaaaccgtgggagcctgcccgcccgacagaaaaatacgtcttgccgctctttttcacgatattgcaaagccgctgacatttaccgccgatttggcgggcaacgggcatttttacggtcaccccgaaaaatccgcaaaaatcgcaaaagaggttttgcaaagactccgcgccgacaaaaatacggcgggcgccgtcgaaaggttggttctcatacatgacgacgagctttcgcccgacagaaaaaccgtggctcggcttttaaagaacttgggacgggacaccttttttgatttctgcgctctgaaaaaggccgacatttcgtcacatgcggcgccgtttgcctgtgtcggaggcatagaggaggccgaaaaaaccgcaaactgccttcttgccgagaacttttgcctttcgctcaaacagcttgccgtcaacggggacgacattaaagccctcggaatatcggggcggcaggtgggagccgtgctgcaaagacttcttgacgaaacggttgacgggcaaacagaaaacgagcggtcggcacttctttcgagagcaaaggcaattgtaaaatctcaaaaataagtgttaaacttcttgacaggaaaaaatgcaaatggtattatatatgttgtaaaacctttggtttagtttaatttgattgcgaggttatggtatgaagaaaattatttcgctcgttctcgctctgtcaatgattttgagctgcggagttattctttcgggaatgtcttttgccgaagaagaaaccgaaaagctgctcaaggtcgactatgacggaacgggagcggcacatttgagctatgtcagactcggttggctgacccccgaaattcaggagggcgactatcttgagtatgacgtttggctgaccgacgatgtttcgggagtcggcggacttgacttctcgggagagggaagccggtattgccgcgactgggacgaatttaaggacacaaacggcataaagggccaccccagcgccgatttgagcgactacgcatacggcaagtggtattcgagaaaggtcaagcttgccgccgttgtaaacggcacctccgacaattttatcattgtcgcttttgagggtttcaccggaaagaccaccgcctatttcgacaatatccgcattacaagaaacgacgaaattcttgaatatgcctttaaggacggcggaagcgaatatcgttatataggctcccactatgccggagacgaggataaaatcactatttccgcggtggataaatcttccgcagggctgcccgatatttctcaccccgacgagatcgaagtggcgaaaaatcttattgcctcaattcccgacgcaaactcggtgaacgacggcaatttcgagcttcttaaccgcgccgtcaaggcctatgacaatcttgtcgcgggcgacaaggcgcaggtcgacggctcctctctcaaaggtgccgccgagctttatgcaagatataaaaacgccaagctcggagacgtggacggcgacggcgagataaccgttaccgacgcccttgtggttctccaattctcggtgggaaaaatcgctcttgacggagtggcgcaaaagtccgcgagagttaccgagaacggcaaaatcgacgttaccgcggcgctgcttattcttcagcgtgccgtcggaaagataacccgtttccccgttgaggacagagagcttgttctttcgggaaaggatgccgagcttgcgctgacggtcggaaagaccaaggtgtcggtgacatcccttaaaaacaccgaaaacaacgttgaaatgatcggcgagccggtggaaattgccatgcccgccacctatgataccggcgaaaataacggtaatttcgtctggagctttgcttcggccgagcagtatacctgcaccgaaagcgatgtgtcgggcaatgccgctctttccggctataagcttgtctacaccgatgaaaatgcgaatttcgactatgaaatctacgcgctttccaccgacgacattgcgggtcccttccaattttccgaaaagcttgtaaataaaaacgagcttcgcaccacgatcaccctctccgacttcttcgacgcctcggtggacggcaaggacacccccacgggcatgaagattcgcaccgagggtcagacctattatcccgacggacttcagaaggttgaactgaccgacggcgtttcggtcgccacctccacctccacaagccagggcggctccgatgacgttcccatgatctatctcgattacggcgataagggcgtttatgcggctcttgaatggccgaccggcagtatgcttgccaagagaaacggcgattcgataaaaatgagcgtatatttccccaacttcaccacccgcgtggacggccagaccgctcttgaaatccccaccgtttatttcggaacctacaacggcgacatcgaggaaggaagcaacgcctttaagcgctggttctataacacaaaatcgcccaagcttctccgcgaaaatcccaacgagccgcttacccaaatggatatgcaggtcggtcttgaggtcgaccgcgtgggcggaatcgaatcggtcaaatgggacaacggctggtgggccgacgcaaatcacaagattgccaacggctggggcggaaacgaaggcgactggaacgcggtgcgcgatcccggatatatttcggccataaattcctatggctgcaacgaccttaaggaattcgccgcgctgtgcacccaaaagggtattaacctcaccacctatgttctccttcacgacgccaaaaacaccaatcccgacgcgctgacctccctcggcgaaaacggacatcccgaatggtttgtgggctacaccaataccgacggcgaatttgccgacctcggaaacaaggaatgcgtcgattggctcaaggaaaagctgctcaacttctttaagggcaacggcgtccgcacatggagaaccgacttcgagcccattgccgagacttcgaacaaggacaacagacactttgcaaacggaaccgacgttcagtattggaacgccgtgggcttctatgagatagtcgattatatctatgcaaactactccgacttccgttatgaaaactgctccagcggcggcagtcttaaggattttgccaccctttcgagaaccgtttatataaacaacgacgactcggcagatttcaacagcctgcgcaccaccttctatgactcctcctactgcttcccctcctcccagctgcaggctccctccaacatggataagtgcatgcccaactgctcgcagtattatatcgacggcacaaatcccgatttcggattccgcagcgtcattatgggaagcataatgttcgcaagctggtcgggtccgagaaacggcagtctccagttcggcctcgaggaatactacaacaaatacatcaccatgtacagagagaagatcaagccccttgtccgcgacgcagatctttatcatgttcttccccgacccgacggcgttaactgggacggcgttcagtatatcgacgccgacagcgaaaacgacattaagggtgccgtgtttgtgttcaagccctctgccgaaggcggcaatcagaagcagataaagcttcgcggccttgacagaatcaagaaatataagcttgaatttgaggacaacagcagccagaatatcaccctcaccggaaattatcttatgaacaatggcctttcggtaacccttaaggacgatgttgattcggaaattatctggataaaggaagcctgataatcggcaaaacgcaaaataatcaagccttgaaatctttttcgacggcttgacggcaaagagccatggtcttgtcaacgcttatgcgtcggccatggctctttttgcgtaaagaaacgatcgaatcggcttttccgacctctgccgcccgtcgatgttctttccctgtttttattgtttcgccgcttgaaatacgtcagtctacgggtgatgaacgtgctgccgcacgggaaaaggaacgagcaaaaccgcacggtgttcgggcatctgctgcttaaccatagtgcacacatacgaacacgattttggcggagaaaaatccccgcatcctgtgttaaaatgctcgttaatccgacaggataaactgcgcttttgccttg

SEQ ID NO: 3268 - DNA, 5602 bp, Unknown
  16S sequences of unknown bacteria
tgcccaacacgggcatccgcgaggtcgatggcctctcgcgcgaggtcgagcgcctgagccgcgacatcgtggaaaacggccagcgcttctccaagaccatccagatggcgacagaaagcctcggcagcttccaggcagacgaggcgactggcgcgctgtacatctcggacggcttcttcgaggtctttggcatgaaggcgcccgtcaagcccgcggagatgacggtcgcggcgttcgacgcgtttctcgagaagctggcggagcactccgtcgaggccgaggcgggcatagacggcgaggtgttcgagatcggctcgggcagcgaccggaggtacgtgaggctgcgcatcgcgcaggacggcacggtccgctacggtctggcagaagacatcacgcagctggtgctcagggagcgcatgctcgtgttcgagcgcgaccacgacgcgctgaccggcatgctcaaccgcaaggcgttccaaaacgcgatggcctcgctgctcgaggagggcggcaagaaatttgcgtgcgcggccttactcatgatggacctcgacaacctcaagctcgtcaacgacagctacggccatgcggtgggagacgagtacatcaaagccgccgcggacacgatcgtcgacgcgctgcccaagcacgcgctgtgcgcgcgcatctcgggcgacgagttcaacgtgttcgtgtacgggagcacccgcgaagaggtgcgcggccacatcatcgcgctgcgcgacgcgttctcgagcgcggccatcgacatcggagggcacgagcagcgcagcgtgcgcatctcggcgggcatctcgtggtacccgaaggattccacgagctacgagtcgcttctacgctttgccgactcggccatgtacgtggctaagagcaggcgcaagggcacgttcgagaacttcgacatgagaaactaccgtggcgaggaggagctgcgcatcaagcgcgaggcttttgtggtgctgctcgagcagaggctgctgcactacgtgttccagccgatcgtcgaggcaaagaccgcccgcatctacgcgtacgaggcgctcatgcgtcccgaccacgaggcgttcaagtcgccgctcgacgtgctgagcaccgcgcgtctggaacgcaagctcaaccaggtggaggaactcgcggtgccgctcgccatccagaccttcgtcgcgcatcgcgccacgggaaagatcgccccgcacacgaagctgttcttcaacaccatcgccaaccagagcctgcccgccgcagcggccgaggcactcaacagcgagttgatgcccgcgagcgatgccgtcatggaggttaccgaggaagacgcaatcgactacgggctgtgggagagcaagatcgcgccgtttatcgcgcgcgggggcaaggtcgccctcgacgattacggctcgggatacaacagcgagaaggtgctgctgcacatctcgcccgactacatcaaggtggacatctcgatcgtgcacaacatcgacgtgagtgccgacaagcgcgccatcatgaagtacatcgtgaacttcgcgcatcagcgcgacaagctcgtgatcgccgagggtgtcgagaccgaagacgaggtgcggacctgcatccagctcggcgcggatctgctgcaggggtactacctcgcacggcctgccgcgctgccgccgaccctcaccgacgaccagcgacgcaccatcctggcaatgagcgagtagcgcgcgggtgtgcgggcggcaataaatgcgcgagatgtgtggcattgccacgtttttcgcgcagcaagcagcaaacgtgtggcactgccacgtttctcgcgcacgcggacgcccttgctacaatggcacgaacacagcaaaacgaagggaacaacatggcaatcggcctcgacggcgtcagcaagctcggctttgggtgcatgcgctttaccggacgcgaagacgacaagatagacatcgcgtacacggccgacatgatcgaccgctacctcgcggcaggcggaaattacttcgacaccgcgtgggcgtacccgaacagcgaggccgcgctgcgcgaggcccttgtcaaacgccatccgcgcgattcgtttttcatcgcagacaagtgcgtcgcgtggacgcactgcaacagcgccgacgacctggaaaagcagctggaagaatcgctcgagaacctcggcgtggactgtatcgacctctacctcatgcacaacctgggcggaaaccgcaccgccgcattcgagaaatacgacgcctgggagttcgtgaagagcgtgaaggcgcgcggcctggcccgccacatcggcttttccgcgcactgcacgcccgaggagctcgaagacctcatcgcagcctaccccgaggcggaggtcgtccagctgcaggtgaactacctggactgggagagcccgtcgttccgcgagcgcgaatgcgtcgaggtggcgcgccgccacggaaagccggtggtcgtcatggaacccgtcaagggaggaatcctcgccgatcccccgcaggcggtgaaagacatcctcgacaccggcatgcccgacgactcgtacgcaacggctgcgctgcgcttttccgcgagcgtcgatggcgtcatcacgacgctgtcgggcatgagcacggtcgagcaagtcgaggacaactgccgcgcgttcgctgacttcaagccgctctcagatgtcgagctcgcagttattgggaacgcgcagcgcgcgatggaggcaagcgggaccatcccctgcaccgggtgcgactactgcgccaaggtctgccccgtgggcgtgggcatttccggctccatgaccgcgctcaactactacatcaactttggcgatgcggaagccgccaactaccagctcgggtttatcgtgcgcttcaacggcggcaagaagatgccgaacgagtgcatacgctgcggtgcctgcgagcaggcgtgcccgcagaacatcaagatcatggaatgcttcgaccgcatcgacagggaaatcacgcctttccgcaagccgcagatgctgatgaagccgtaacgggcgccccgccccgcgtgggatgcgtggcattgccacgcttctcgcgtatatcacgtgggatgtgtggcactgccacgtttctcgcgcacatcatgtgggattcgtggcactgccacggttctcgcgaatcgcgcgctctacccgatcaccttggcggcgcgcttgagctcgtcgatgatcgcgatcccctgcgggcatgccttctcgcacgcgccgcactcgatgcacgcgctcggtagcgccctgcccgcgcccttgttgagccattcctgcacatggcgaccaaataacgtttcagcgttcatcgcgagaaacgctcccgagatgccgacgttttgcgggcacaccttcgcgcagtaatcgcagcccgtgcacggaatcaggtcgaacttgtcgaactcggcctgtgcggcatggatcacgtcgagctgctctgcgctcagactcgtgaagcccttgagcgcggcgatgttgtcttccatctgctccatcgtgttcatgccggacagcacggtgatgatgttatcctggcctgcggcaaagcgcaggccccacgatgcgggcgacccctcgccagcatcgtcgaacaccttcttcacgctcgcgggcgggtcggcgagcaggccgccgcgcagcggttccatcaccacgaccgggaccccgtgcttcttcgcgacctcgaggcaggcgcggctctggttgatggggttttcccaatccaagtagttaacctgcagctgcacgaactcgaccgcgggatgctcggagatgatctggtcgagctcctctgccgtgccgtgatgagagaagccgacgtgcctgatgagcccctcctccttcatctgcacgacgaaatcccacatgccgagctggtcgaacacctgcgtgcgcgggccgcccgtcatgtgcagcaggtagaagtcgaagtagccggcgccggtgcgctcgagcgactcggtaaactgcatctgcgcgtcctcgggcgtcttgcagccaatccacgagatgcccttcgtggcgagctggtagctctcgcgcgggtggcgctgcacgagtgccttggccgtcaccgcctcgctgtcgccgtagacccatgcggtgtcgaagtacgtgaacccagcgtccaagaaccggtcgaccatcttgcagatgaggtcgaggtctgcgcttttgtctgcgagccgtggcaggcgcatcagcccaaagccgagcttgccgatttcttcacccaggtaactcatggtttcttcgctttccgtgcgggcagcgcactcgcaggcgcactgtcgtcgtgtcgattgtcagcatctacagtaccatatgcgcgcctacgcttcttctttgcgccggttggccaggtgcgcgaacagcgcgagcgccgcagccgagagcaaccccgcggcagcgccgatcggcagcccgtctcccgtgcgtgccgtgccgttttcgacgacgcgctgatcggtgacgacaagcgcggtgccctcgtcgcctgccttcacgttcccgccggcatcatcgagcacctggagcttaccgtcctcgcccatcgtgaactgcgcggagcctgcaagcggctgatagcccgccggcgcggcggtttctgcgagcgtgtacgtctgccccggaatgagcagcgaggcaagctttgccgtcccctgcgcatccgtctggacgctctcgctcgtagaaccccccgcgaactgccccgtcacgtcaaacgaggcatcggggagcatagagccttcggggtcggtcttgagcagctgaagcacgtacggctcgtcagagcaggtgagcacaaacgccccgtcgtcggccgcgtccagcgtgtagctggcaggagcctctccgctcagcgccaccgtgccatcggcgtcgatgtggacggtaaccgcatccgcgtcgagcttgaacccatcaggcgccttcgtctcggcgatcgtgtaatcggtatcgaccgcaagggcgaggttcgacagatcgacgtcgcctgcggcgtcggtcgcctcggttatcagcggctcgccctctgcatcaaccggcgtgacgctgaacgtggcgcccgacaggtcgtagtcgccctcgcccgcgtttgccttgtggatgcggaacctgatcggcgcatccttctggacgagcatcgaacgtgacgggccctgcccggccgtcgcagctcaagaccatggcaattgccagcacataggcgagcgcctgctttgcgactcctggcttacgcgaatcagcgggaatattcatctacagccccataaacgacaagccgcccaagctgcgcctcatctcaccggccttgcttggggcagcagatattcccactattgacgaatacagattacgccttatctcagcgaagataaatccccgctcccccagctcatcgcacgagaaggagcagtggacaggcaggatccgcaacgagacggcacccccttcggcatgaaaatgcaaacatgcccggcggggatgtatccccaccgggcatgcagtgttgcaggctatgaaagcagcgacgcttgactagtagcgcttgccgccgtatccgcc

SEQ ID NO: 3269 - DNA, 3896 bp, Unknown
  16S sequences of unknown bacteria
tcttttgatttattaaatcgactgcggtcgaaggctgctcctacgcggagggcgcacaaggagactcagacgccgtctccttgtgaatctacgctcacggtggagttaggctgatatgatgagcttttgtctccgcacatttttaccgattagtcgcgcggtcttccataatccgtagtagtggagcttaaaatgtgcgcgcggtgagttttggggcgcgataacgcataaaatttagtagtgaagcgtaacatgtccgcgtctgtttatttggcttaaatttataaatcgttcgtcggttctcctacggaagctaaacgaaattggacgttcgctccacgtgggcgcacagattaacgacaatccgcggttagcctactccatttcagttataatttggtattcaaccctccgcgcgaaagtgaaagcagtgatttattaaatctacccgcgtctcactctcccgcgcgaacatgctaatgccactactaaggcttatgcgaaaccgcgcgactggtctgttcaaatgggcgacaccagtagtgtatggtttaagcctaacgaaaccgcgagccggtactcacagaggggcggcgtttgagcctctctgtgcgccctccgcgtaggagcgtcccctcaccgcagtgagatataattaaaatctgaaagggcgaagctctttcttcttccttctcacttaggatttaagtgaaacttcatcaagggaagtctcttagaaggcgcacgtcgtctaaggtagaaaatatcagctcccgctatttttcgctttttcccttgaaaatcccgtccgtatgtagtataatatcctttcggaaatacgttatttaaagaaaagaaaaaattcaaaaagaacagaggtctttttaatatgcagactcttcttgctttgtccattgctctcctcgcgggtcttatgctctccagacttactaaaatctggaaccttcccgcagtcaccgcttacctcgtcgcaggtatcctcatcggtccctactgcctcggcagactcggtatccccggaataggctttacctcctccgacgacgtttcatcctacgccatcatcagcaacgtcgcactcggtttcatcgccgtcgctatgggtaacgagttccgtctctcggagctgaaaaaaaccggtaagcaagccgtcgtcgtcgctatcttccaggcactcgtcgctactatagccgttgacgtctccctcttcgtcgttcatctcttcctgcccgataagctccccctcccctgcgtacttaccctcggagctatcgccacagccaccgcccctgccgctaccctcatggtagtcaagcagtataaagccgacggtcctctcacccgtatgctcctgcccattgtcgcgcttgacgacgtagtgggtcttatggtcttcgcaatttccttcggtatagctaaagccctcgaaaacggtcaaattgatatcatatccgtcctcgtaaatcctatcatagaagtcgtagtctccctcgttctcggcgcgctcatgggtctgctcttccacttcaccgagcagttcttccactcccgcagcaagagaatgagcatctccgttacatacgtcttcctcgccgttgcactctccatgcttgagttcaagatcggccccgttaccgtaggcttctcttctctgctcgtctgcatgatgatgggtacagtgttctgcaacctctgcgacttctcggaagagcttatggaccgcatggatcgctggacaggccccgttatggtactgttcttcgtaatcagcggctcgggacttgaattcaaggtcttctccgattgggctgtaattctcgcaggcgtggtttatatccttgcgcgctccctcggtaaaatctacggcgcaaaaatatcctcgaaaatggttcactgcgccccgacaatacaaaaatacctcggtatcacacttcttccgcaggcaggcgtgtcactcggtatgtcgctcaccgcaatgtccctcggagaaagcggtcttataatccgtaatattgcactcttcgccgtcctcatctacgagctcgtaggacctctcttcacaaagatagccctcgataaagcaggtgaaatctccgaaaaacccatcacccccagagaacaagccaaaatcgacgccaaatccgcaaaataaaaagaaaagaagaaaacaaaatcatactcccgtcagcgcatacagaataactccaccgcgccagccaatatcgaaccgaacataaagtttcaaccgaacaaaattggtgacggtgcagaaatttcaactgcaaatccggctatcaactgaagtataattttggtataaatccgcggttagcctactctaagaaaaccctttcgccagtatgatacaggtgcgacaccaaaagttgattgttcaacataactccaccggtaagccggtactcgcagaggggtggcgtttgaacctctctgcgttccctccgaaaggagcgccctccgcgtaggagcagccctcgaccgcagtcgataaaataaaaatcggaaagacgttagtctttcttccttcttctcacttgaagtgaggaaaaactaaatttgataaatataaagaataactttaatccataataaaataaacaaagcctgaaaggtataatccatgaagaaaaccgtaattctgctcttcgggggacgttcctccgagtatgaagtctccctctcctcctccttcggcgcactcgaaaatattgataccgaaaaatataacgttgtgaaagtcggaatcacccgcgacggtaagttctacctctacgagggcgaaaattccctcattcccgagaataaatggctcgccgagggaaaatgcacacccctctcacttgacctcgaaaaaggctgcttcacggcagaggacagagaaatccgccccgacgcagtcctccccatgatccacggcaaaaactgcgaggacggcacgctgcaaggtatgctcaccctcatgaaaattccggtagccggatgcggttgcacttcctccgccgtctgcatggataaagccttcaccaaagctattatcaattccgaaactaaaataaatcaggcgaaagccgtcgtaatccgcgccgaggactatacccccgataccgcagtctctttccgcgaaaagtgcgagaaacagctcggctatcctgtgttcgtgaaacccgcgaatgccggctcgtcagtcggagtgacaaaggtgaagagcgcagaagacttcgacaaagccgtgaaaaccgctctccatgaagacgaaaaggtgcttgtggaagagttcattctcggtaaggagatagaggtcgcagtgcttgaggaacacggaaaatactacgccgcgcatcccgcagagatagaccacggcagtgcggagttctacgactacgagacgaagtacataagcgacgcgtcgtccttctacatccccgcgagaataccggagaaggagcaggaaaacgtccgtgcgcaggctctggaggtgttcaaggcactcggctgccgcggattctcaagagtggacttcttctacagcgaggagaggggatttgtcttcaacgagataaacacgctccccggattcactccgatatccatgtaccccaagatgatggtgaacgacggaatatcgtataaagagctgatatcccgcctcatcgaagcggcaagataaaaggagaaagacctgtcgagttctttcttgccactaatttctctaccttagactacgagcgtattctaagagacttcgcccagtgaagattcacttaggttttaagtgagaaggaagaagaaaagactggcgtcttttcgatttaattattccactccgcgtggggcgcccttttcagggggaacgcaga

SEQ ID NO: 3270 - DNA, 6024 bp, Unknown
  16S sequences of unknown bacteria
cgcactcgtggccgtccgcatgctcgtgatgaggatggtggcagccgcagtcgccgtcatggtcatgctcgtcgtggtcatgaggatggtggcagccgcagtcgtcatcatggtcgtggtcatgatcgtgatggcagccgcacgcctcgttatgatcctcgtgatcgtggtcgtgatgatgctcgtgcgcatgctcgtgctcatggtcgtgctcatggtcgtgctcatggtgatgatggtggtgatgggcctcctcgtgctgcagcgcggccagctccagggccagggtctgggtctgctcgatggcctcctgcatctggacgcccgtcagcttgtcccacggggtggtgatgatggtggccgagtcgttgtggctgcggagcatcgcgacgacgtcgtggatctcttcgtccgtcatctcatccgtccggctcaggacgatgcaggatgccgtgtcgatctggttttcatagaattcgccgaagctgctcatgtagatatcgcagctggtggcgtcgacgactgtggtaaaggagcccagctggaccgtctccgatgtctccttcttgacggcggcgatgacgtcgctgagcttgccgacgccggagggctcgatcaggatgcgctcggggctaaattcccggatgacctgctgcagcgcgcggccaaagtcgcccaccagggagcagcagatgcagccggagttgatctccgaaatctgaatgccggactcctgcaaaaacgcgccgtcgatgccgatatcgccaaactcattctcaatgaggacaagcttttcgccgtgataggcttctttgatgagctttttgatcagggtcgtcttccctgcgccgaggaaaccggaaaaaatgtcaatgcgtgtcatactctacaccttctcagataaatttcacgagaattcacacagccccgccggtccggcagggctgcctgcgtttctttgcaatcattatagcacggtttttggaattatcaagcaattacctagcaaaaccgtctgatttttcaggaaatatccaattctgcgatggtcacgccgctctcaccttcgccgtagacgcccaggcggaagctgcgcacaaatttcttccgccgcagttcgctctgaacggcggcccgcagcgcgccggtgcccttgccgtggatgatgcgcactggggagcgcttcgtccgcagggccaggtccaggtattggtccaggacgctgatggcttcgatgctgtccatcccccgcaggtccagctccgccggggcggcctgggtatgcagcgtctggccgctgggcttggggtgcgtttttgccaccggcttgggggcctgctctaacaaatagacctcgctgggcttggcgttcagctgcaggatgccggcctgcagacggtagctgccgtccttgttgcaggcgagaaccgtcgcccgggtccccagcttgaggagctcgacgacatcgcccacacggatggcgcgcgtcgctgccgggcggggggcggctttgcgcttttccgccagcttgtcctgcgcttcgttcagcgcccggcgcagctcggactgcttggcgttgtacccagaaagatccgcgcccttttgcagctgcttgcgcatctggcgcagctcctcctggaccttattcgccgtcgcccgggcgtcttcgatgatctggttggcctcggcccgggccatttcgactgccttttcccgctcctggcggatctgcgcgtagtattcatcggacttctgcttctgctgcagcgtctcagcccggaggcgctccatctcggctttggcgtcctccatctcctggcgctgctgctccagctgggagagcacatcttcaaagttttggtcgttctcgctcagcgtatccttggcctgcttcaggatcgcctcggacaggcccaggcggcgggagatggcgaaggcgttggacttacccggcacgccgatgagcaggcggtacgtcggctgcagcgtctgcacgtcaaactcgcacgccgcgttgacaacgccgtgcgtgcgcatggcgtagagcttgagctcggcgtaatgggtcgtcgccgccacccggcagccggcctggcggcagtattcgatgagggcgatggccagggccgcgccctccgccgggtccgtccccgcgcccagctcgtcgaagaggaccagggagctggcattgcactgctgcgtcacggcgacaatcgtcttcatatgagcggagaacgtcgaaagcgactgggcaatggactgctcgtcgccgatgtccgccagaaccgtctcatagacgcagacgcagctgccgtcgtcggcagggatatgcaggccgcaggccgccatcagggtcagcaggcccagggtcttgagggtgacggtcttgccgccggtgttcgggccggtgataatgagggtgtcaaagtcctcccccagccggacggacacggggacgaccttctccgccgggatgagcgggtgccgggcgcggttcaggtgaatcgcgccgtcggtccggatctccggctcgatgccgtggatggcgaaggaatagcgggcccgggcgaaaatctcatccagctggaccagcatggtaaagtccatgtcaatggcgtctttgtgatttgccacgtcggcggagaattcggcgaggatgcgggcgatctcccgctcctcggcaagctccagctcccgcagcttgttattggcctcgacgacggaggccggttcaataaagaacgtgctgccgctggacgagacgtcgtgcaccagtccggggacggcgctcttatggtcgctcttgacggggacgacatagcggtcggcccgcatggtgatgatcggctcctgcagggccttttggtagccgggcgaggagatgatcctctgcagcgtctgcttgatcttatcgctctgcaggcgcatatgccgccggatgctggtaagctctgcgctggcgctgtcggcgatctcgtcgacggataagatagcgccggtgatctgctcttccaggtagcggttcgtgctcagggcgaagaacagcgggtccaggaccgtctgctggtagtcgccgtcgcagtagctcttgacctcccgggcgcagcgcagaacacccgcgacctgcagcagctccgccgggttcagcgtgccgccccggtcggcccgggccaggaccggccggacatccgtcaggccggaaaagccgggcgtccccttaaactccaccagatggcaggcggcggacgtctgctgctgcaggatgcgaatctccgccgcgtcgcgcagcggctgataggccaggcaccgggccttggcctcctggctgaccgcctgctcactcaagcgctgcagcacagcgtccagctccagttttttcatggatttcgtatataattcagacatagctcgtttccttatgtatcccaaacagtcaaaaaaagcctcgcagagtttgcgcccgcaggcgcaaataaagtcaaaatcatttttggcggcggcaagtgggtgagactccaagagcgcaagcgcgattggtcaagtcgaacccatgcagcgcatacgtcgacaaaaatacttctcgccctgcaagttgggtgagactccaattgtgcaagctctgcgcggcacaattggtcaagtcgaacccatgcagcgctgtggaatttccgcgccaacggcgcggaaattatgcgcgcagcagggtgcaatcctttcaaacgcgagcccagcgcagcggtaagtgagagtcaaaatcttcgattttgttactcgaacttatacagcgttgtcgcttttgagcgcttgtcaaaaagattttttggcaagctcttttgaccggttccagcaaatggaatggtaaaagtccagcgtggagaagctgtgctccagctgcacggtcaggtatgtctccgccaggccgctcagctgccgcaggaccgcgtcggacgcctgaaagccgaaggcgcgccgcgggtcagcctggcagatatagcgcagcgccgccagcgtccccgcgctgacgggcaggcacaggccgtcgccgggccgcaggcagcccttgcagcgcagcattccctgccgcacgcagaaatagcccgcatcctggcggccgcagacgccgcagccggagacatccggcagataccccgccaggcacgcagcctgcagctcaaagaccgccttgacctgctgctggggcttgcccagatgacacagggcataaatgctgttcagtgtcatcgagagaagctccgggttcggcatatcctcctgggataagacctccgccacctgggcaaaataggacgccaggctgagcagctccaggtccgaccgcagcggcaggaacagctccagcggcgccgcctcctggacggtgcagaagccgcggttttcaaaaatcgtaaattcggcgtaggccagcagctggcagccgcttttgagcttgctgcgcttgcccttgacgccccgggcccgcagcgtcatgcggccgtagtctttggtcaagaccgtcaggagcaggtcgtggtcctgataattggtctgccgcaggacgaggccctcggtttttaaatgcattgcatctcctccgcggcgcgttatgcgctgcacggctgcgccgccgcgagcgcttgccggtagagcaaatagacctccggcgcgccggtctctaagaaaatcgcccagtaatcctccgcatgcacaagcaacgccctccgttctcatgagtatagcgttagcatttgcggaatccggcgggctatacgcccaaatcgttacagggaataatctccctcctccaggcagggcagcgccgtgaagatatgcggctccggcacccgcttgagggggtcatagcaaaatctgccgcaggccccggtggcggggacgagcccctttttgacgcaaaccatctgctgggcattggccttggccgcgtatttgcagtagacgcactgccgggcgatcttttttcgaaatagcatggccgcacctccctttccccggccttgccccgcctgcaccccgctgcactgcggggggcgcggctacgccggtcgcttccaagctttctttttctgattataccgtttttcccgggaaatttccacctttacttttattttttgcaggaaaccggccaaaaggaccagtgcagcggcaaacagagccgcggcggtatactggccccgcaggcagcaatagaccggcccgctcagtgcggcggccacggcgcactggcagagcttgccccgcagatgataccgcagcggcagcgccgccggggcgacggcgtcgctcgtctgcagatggatgcacagcccggcccagtttacaaaaacgctgcaaagcagaaactgcgccgcagggtccgggacggccgccagggcggcgatgccattgggcaggtccaaaaaccccgccgccagggccgccgggatgggctgcgccgcaagctgcggcgcgcagaacgcaagcacggcgcccaggacgccgagcaccgcgcgaaaggccaggatcaacgcgcagatacgcgccgtgctgcaaaacgcctgccagacggcctgggacaccggcagcggcgcagggccatgccggggcgcagtcttccccggcacggcgggaccggcctggggcgacgccggggggcgcagcagccagccggtggcaagggcggcgaggatatggatggcatagagccccgccagcagccccgcaggcaagcaaagcgtgccgccgatgaggccgaagaagatcgccgggcccgtgttattgcaaaaggacagcagccgcccggcgtcacactgcgtcagggtaccctgctgcgccagctgcgccgccgtccgcgcccccatggggtagccgcccagcagcgagatggcaagggccgccgcaccctccggcggggcatggaaaaagcgccgcattgcgccgccccaggcgctggcaagctttttgggaaagtccgtcgccaggagaagattcgtcaggataaaaaacggaaacagcgacgggaagacg

SEQ ID NO: 3271 - DNA, 16130 bp, Unknown
  16S sequences of unknown bacteria
tgatttctgtcagagcttccgttttctttttccccacctgacggagaaaatacgcctgccgatggatattcgaaagatccacctcatcatcatccacgatgtgaagtctgccgatccccgcccttgccaaagcgacagcggtatgagagcccaggcctccgatgccgccgattcccacccgcgcattccacagtttttcccgcacttcccgcgtatgccgccggtccagcgtttgaataattcatttctcatccccgtctctcttcagctctgccgcactccgcatttctgtctcttcaggcgccgtatagccgaatccgcatccgtctttcatccgccgcctacaaaactgacgatttcgatgatttcaccgtcccgtattactttttccccgtagcggttcttcggcaggatctcaccgtcgcattccaccgcaatccgccccggatgatatccgttcttctccagatactcagacagagtccttccgtcggctcctggttctttttttccatttattactgccatcatcggctcctttctcaaccggtctgattttcctttctcagtcccggatacaaaaaaacgcacgaagatctacacccgcggtggtgtaccccttcgtgcggtctctgcactttctttcattttaattcacctatctgtacctgtcaatgacaaatttttcttcaaatctccccataaatcgcctcctgcatattgtacacctgtgtacatgatgctataatagccaatacagattttaacactccgttaaatctgtattttattatctgcagaaaccgactctgcacggaaaagatttacaaccgaaattattcagcggaaaagaaaggcacatctgacgcgcgtcctttttctgaagcaagcagccgccagcgtcagcggcagattggagatgattttatgtccgaaaattccataaaacggccgtccggttctccggcgctgccggaaaataaaatgggagtgatgccggttccgaaactgctctacagcatggcgatccccgcgatctgttccatgactcttcaagcggtctacaatatcgtcgacagcattttcgtagcgcaactgagcgaacgcgctctggccgcggtcacactggtattcccgattcagatgctcatcgtagctgtaggcgtcggtacgggcgtgggactcaactccctgatctcccggcgtctgggggaaaagagattcgatgaagccaactccgcggctacacacggatttgtccttgctattttcaactggcttctctttctgatcttcacgctgtttttctcgaaactgttttaccagacgttctccgacacgcaggatctggtaggacaggcgatcgattacagcaatatcatcacaggattctcctgttttgtattcctgcaggtcacaggagaaaaaatcctgcagtccacaggaaatatgattcttccgatgatttcaaatatcgcgggatgtatcacgaatatcattctggatccgatctttatcttcgggcactttggatgtccggcgatgggagtcaagggcgcggccatcgccacagttatcggacagtttgtgggaatgtctatcgtactcggtttccttttctttaaagatcatatcgtgaaaatctctttcaaaggattccggctttccgcgagaatcatcaaagacatctacaccgtagcgctgccgggcatgatcatgcaggcgattccgtctctcgtaaacgtattcctcaatatcatactcatgggcttctccgaaacggcggtatcggtcctcggcgtttacttccgggtccagtctttcgtattcatgccagtcttcggtctgaaccagggagcaatcccgatcatgggctacaactacggtgcgaaaaaccgggagcgtctgctgcagacattaaaactatccctgctcaccgccggtgtgatcatggcgctgggactcatcatattccagattttcccttcacagatcatgtcggtcttcagcgattcggaagatatgctgaaaatgggcgtctcggcgatgcgtctgctcagtctctgctttattcctgcagcgttcggcatcatattctctacgctgtttcaggctctgggactgggtacatacagtctgatcatgactcttatgcgccagctgatctgcatcctgccggctgcatggattttctccaggatgtggggcgtcaccggcgtgtggctgtcctaccccttcgctgaaattttctcgctgacctgcgccttctatctcttcagcagagtttacagacagcgcatcaaaacgataccgctttccaaagagcaggactgagcctccggcaagcagagtctccggcgatcggagtttgacaagcgccgagacctgagatatcatagatgagacaaaaattaaaccgatacgatccgacagttcattggtaccatcctgtcgcaaaacaaaactcggaccttgtagagaacttccgccgactccgcccgccgggcggcaaggcggtgattcgcgtttcttacaggcgtcccttggcgggcgcctttttattttggaggcagactgatgtataaaattacggcgaatgaaagctttgactcagcgcatttcctcaaagattatgacggaaaatgcgctaatattcacgggcaccggtggaaggtgctcatcaccgccggggcggaagaactgagccggcagtcccagacccggggcatggtcatagatttcggggatctcaaaaaagacctgcgggaagaaacggaagcgttggatcacaggctcatcatcgaaagaggctctctgcgtgaaaaaacattcgaagcgctgacagaggaaaattttctgatcgagcaggtcgacttccgccccactgcagaaaattttgcaaaatatttctatgaccggatgacggaaaaaggttaccgcatactggagtccaccgtatacgaaacgccgaacaaccgcgcctcttacacgccgaaatgacgtccggcggcgctctccttccacctggtatttccgcagtacctccgccccgcagaccgaaccgcatctgaaaaagacagagagaacattccacccgtattccgctctgaaaacagacagccgaacgattctcatcttctgaatcgccgggacagaaaaacagaaagggacaaaatgaaaaaattcaaaatagcagaacacttcgtcagtataaacggcgagggaaaccgtctgggggaactggcctatttcatcagatttccgggctgcaacctcacctgcagctattgcgacaccgattgggtcaaccagcctgacactccgtattccgaaatgtccacagaagagattttcgatgcggtgcggttcagcggagtcagaaatgttacgctcaccggcggcgagcctctccttcaggaaaatatcagctctctgatcgaactcctgaatacggacgaccggatccgcatggaaattgaaaccaacggttccgccgatatcgctcctcttgccggcctgaaaaaacgacccgccttcacactcgattataagctgccttccagcgagatggaaatcatgatgcgagtttccaatttcgatctcctggcctctcaggacaccgtaaaattcgtggcgggaagttctcaggacctgcgtcgggcagccactgtcatcgacgcttacgatctcgccgaaaaatgcaacgtacatctcagcccggtcttcggtgaaatcgaacccgccgatctcgtggaatttatgaaagaaaaccgcatgaacggcgtatccctgagacttcagatgcacaaacagatctgggatcctcagacccgcggcgtgtagagcgtcaaaatcacaaaggagagcaaaaccatggcaatcgaccagaaagcgatagaagaacatatccggggcatacttaccgccctgggcgacgacccgcagagagaaggactggcggatacccctgcccgagtggctcgtatgtatgccgaaatgttcgaaggcatgaattacacaaatgacgaaatcgcagatatgttctgcaaaactttcgaagaggaaagtgaattctgcgaatccgatcaggatatggtagtcgtgcgggacatcgagattttcagccactgcgaacatcatctcgcgctcatgtacgatatgagcgtaacagtagcctacgtccccgcaggcagagtcatcggcctcagcaaaatcgcaagaatcgcggatatggtttccaggcgccttcagctccaggaacgaatcggagctgacatcgccgacatcgtacaaaaaataacccggtcccgggacgtcgctgtgctgatcagcggcaaacacagctgtatgagcgccagaggcatcaaaaaagccggcgccaagacttatacgtccacacttcgcggcagatttcgcgaagatcctctgctgatgtcccgcatccggcaatatccttaaacgacacgatttctgcggtaaaaatcgcatttaaaaaccaccagccgcctgccgataccgttaaacgaacagagacacccgtataacggcaaatgatattccgctgtttctgtctgcaaaaccggcgaactccgtgaagagcgcgatatctcctgcggagcgaaattccgggaaaccgcgaagaatccataaaattccgataaaacaaataattccataggagaaaaaatatgacaggaagaaacgaaaaagaaaccgacggcatcactctgctggggaatcagggtacaaaatacccggatgactatgctccggaactcttagaaacatttatcaacaaacatccggacaacgactatttcgtcaaattcaactgcccggagttcaccagcctctgtccgatcaccggacagccggatttcgctgcgatcacgatctcttatgtcccggatatccgcatggtagagagtaaatcattgaaactctatctcttcagtttccgcaaccacggagactttcacgaagactgcgttaatatcatcatgaaagacctgatccgcctgatggatccgaaatacatcgaagtatggggaaaatttacgccccggggaggaatctcaatcgatccttactgcaactacggcaggccgggtacccgctggcaggagacggcagaacgccggctgatgtaccatgacctctacccggaaaaaatcgataatcgctgagagatcgaaaaactccgtcccgcagagtgcaggatcattcagggaatccggttccgctttcgaaatatcttccgcagaagatccgtccggtcgcagccggttctctccggacagtcggaaatttccggctgccggagtcctgcccatcatgccgcgcatctgttttccctgccggcaaaaattaaaataccggcgaaaggcacgatctctgcgtacacttttccggtatcttcgtctaagatatataattatctgcacgctggatctcttccatacctaaaagataatatattgtaacatccaaaacatctgccagatacggcagctcataatctgcaatcacacgtttgccggtttccatcctgctgaccgctttctgagtaatatttaatcctgccagctgaagcttcgccgccagctgttcctgagataaattttcccgttctcttgtttgacgcatcctttctcctgatatattgcatcttccgtcgtgtttgtagatcttcaataggcacttccttactgtacatgcttatgatggataactacgttgacattaacatgcatacaatctcagtattataccaaagatgagtacggcagcgaaaaatctcagatattggcagaaaaaatacgatatttttccttattcttccttatttcggctgaccagcattttaaatctgcttctttcacactcgagtattttctctttccgcagcctgctgatttccgccgacatcgcgctgcgttctacgcccagataatccgctaatccctgcctgtcataaggaatcgtgaattccggacttccatttttcttggcctgaagggaaagataagccatgagtttttctctcgtcgtgcgctttgaaatgatctcgatcttctgattcagcatcagatttttttcagctacgatacgcagaagacgccggatcagctgcgtatgaaacctgcaggtattgccgcagacgtgaagtatccttctgcagtccgccagcagaatctcgctgtcgcagacagcgactacgctcaccggtatggcccggacttgcgcgcaggcaaatgcctctccaaacaattccgaaggcccggcgtctgccagaatactgcggttcccgctgtaatcattccgtacgatctgcaccgccccggacaaaagaattccgatatcctccgccggatcgccttcgagaaataccgtttcgccgcgggagacctctatcatccgcgctccgagacaatccagcatgccgaagagctccgtctcttccattccttcaaaaagagagcaccgcgccagcacatcataatatttcttcacagccgtctgcccttttcaatacagactacaaatgatgtcggcgcacttatccagccccagctctccgctgtccagcgcgatatgataattctgggactgcccccacttcatatcggtgtaaaagcgatagtaagaagcgcggcgcttatctttgctcttcagacgctgctccggcgcttccctgcgctctccgtactcgttgacgatgcggaccgcacgcttttccatactggcgtgaataaatacccgcaggcagtttttatcccgcagaatgaaatccgcacagcgtcctacaatgacgcaggactccttttccgcgagctccagaataatattccgctgaatcgtccagagcagatcctgattagacggaccattccagttccatcctgtaaaagcggacgccagccagctgctctgcggcacatgctcgccctcttctttgatatattcctccacaaaaccgctctgctctgcgattttctgtatcagctcattatcatagcacgggatgcccagacgctccgctactttctttcccacggtatggccgccgctgccgaattcacggcttatggtaataattcgattactcatatgtctgcctccttgcacaccattttcccgtttcttttccgaatcgggacgaagttctgccagtttcgcccggccagacttcggatcattttaattgcggttccggaaagtatcgtcttctccagcattccatagaaaggcgttacgttcctgaaaaccgcgaagtgaaccctgacgccggccagggccatcttgtattatactattttattatatcacattcgcggtttttccatagaatctctcgcgtttcccggtaaattttttacgaatgatctaataaaacaaaattacgcagatcacatttcattcttttaaaacagggacggccggaaattcatgcaaatatatcggcagacagagttctccgtttacggagagacgaaaaaagccggggaatattccccggcttttaacaagataaaaggaattgtccgctgctgcgtatcgattgctgttctaattttcataccgtgtccagtccggatcttctttcagcgctgtccagcgttcgtgaacgccatcttctttgcgttcaaaatcatgactgttagtcgcttcctgaacagtgagatagtaccatgctccgatctcattgtccggccagatatgcatgctttccagcagatcgctttcgctttcaggcagacggcagagcactcggttgatcatcgccatagcttcggcgcgggtaatcggattctccggacggaaggttccgtcctcataaccgcaaatccatcccaacgtcgccgcccgctctatttccgcttcagcccagtggccggagatatccgtaaaatcactgtccccctctgttttgtatgtgtcaaaacgcgcacagacagctgcaaattccgcacgggtgataaaagcattcggagcgaaagtttcctccgtacgtccctttacaacgcccagtttcgccatggtggaaatcgcggtattgcaccacatctcctcgttcacatcggtaaagacattggagaccgtcaggtttttctcccggatctccggactcagcagccggaagaatatcgtcgcaacctcagcgcggctgatattgcttacaggcttcaccctgccgtcctcatagccgatcatataagcgaaatgatctctgccgttgagccaatccggaataccggtagcctcccagcccgcatatacggtcttcgatgaattcattcgaatttcaccgacagactgcgtcagttctctgtccgcataccagccggtaaaagtataaccctctctgaccggatttttgtccagctgaacgagagtatttgaaggataacgttccgatgcgtattctgttccgccgttagaatcgtaagtcagagtatagtaaatatctccgcctccgcttttagcgtgatgaatatgccggttattgccgcagcccggttcaaaggttacatttgcaattcccatccctttcgtgctgagcctcttcagataactctgtccgataaaaaactgtccagaaggattttcttctcccagttcaaaaccggtttacattcatctttactcctactcattttcctccgttttcatttttagagattcaaactcgcaatccagtctttaagttcctctttttcgacatgtccgtttaaaagacgtccttcttttattgcggcagacggcggaacgctttttgcaagttgtgtcgccgtctttccaaaatcgcttcctccggatgtggcaaacaggacgattatttttcccgaaaaatcataagcttccaggaatgtgttgataatgttcggcgctacataccaccaaatggggaaaccgagaaaaataacgtcatgaccgctgacatcagcatcccgatctttgagagcagggcggaaagctttatccctcatctctctcgaacttcttgaattgccatccagccagttcagatctgcctctgtgtaaggaacttccggacgtatttcgtaaagatccgcctgtgcggcctctgccagtttttcagctgcactctttgtcacaccgcttgcgctgaaataggctactaattttttactcattttgatcacactcactttcccgaattcgttttcacttctatttctgagggatgctgcacttcagcgatacgccttctcaaaaatagcggcgcattcttcatctgaaagaagtaccctgtcgcagaagaacaatcctcccatagttgctctggcgttctgtgccagcgtcataaattcatccggtttgattccgtaatcggacattttcaaatctgctacaccgcactgttcctgcaattcaacaagcgccgcgataaaatccatcggttctttcgcgtctgttttccccagcgcctgcgccatgcggataaatcgttcatcgcaggcgtgattctcaataaaatgggtaaaatacgctttggaaatcatgatgagacctgctccatggggcagatcatgatgatatgcgctcatggcatgctccatagaatgttcgcttgtacaggaactgattgtcatcaccacgccggataaggtgttcgcaaacgccacgtgttctcttgcctccatatccgaaccgtcttttacagcgcgcgccagataggcgccgatattttcgatcgcagttaaggcatacatatcgctcatcaggttcgctgctgcagaaatataacactctacactgtgaaataacgcgtcaaatccctgataagcggtaaactccgccggaacggatttcatcagctgaggatctacgatcgcgatctgcggaaacaacgaatcatatccgccaaaaccgattttttcatcggtctcctcattggaaacgacgccccactgatctacttcgctcccggttcctgctgtcgtagtaatcgctatgaccggaagcggttcctgcacaagaggcagtccctttcccgtgcctccggaaatatagtcccataaatctccgtcatttgccgccattgctgcaatagcttttgatgcatccataacactgccgccgccaagagcgacaataaaatcacagtgattttctttcgcaaaggctgctccttccattatggtctgcttcaatgggttcggcataattttgtcaaacagaaccgtttccgcacctgccagttttaactctttttccgtcttttccaaagctccgtttctctttgtcgatttcccattggaaatcacaatcattgcctttttgcccggcagcttctgtttgtgaagaccctcaagctgcccttctccaaataaaattctcgtaggtacatacatctgaaaactcataatcaaaacctcctttatattatctgcctatcttatatcttttttacaaactgcgcggaatttcctgcaggaaaatcaattcacccgcaagttacagtcataaaaaattcatctttctatagttttcttcctctctgagtattttcttaatccacaggatacataatatgcaagacatgcccacaacaccatcatcgctgcatattcagttaggaagaaaatcagaggctgctgcaggtcaaagaacacaaactgactttttagaaacatatacgatacaagattatgcttcataaaggcacagacaccgaatccgctgaccgctgccgccaaaatccgcagcatccacgtccgtacccttgatgcgtctttccgcttccgcatctttcgcaccatacccataaccattgcccagtgcagaccaagatgagcactcataagaaagaatccccaataggccgcagccatgtgcagaagacgtgcaaatcccattcctccttcaatggaaaagaaggaaaatacgaccctcgacatcatcatcccgctgatcatcaaactcagcatacacagcaggagggccagattgactactgtctgcagaatacgaaatcccgaatattttcctttaaacagattgcgatacaattttacatttaaaatgttatgtgagataaacaataccagcattgctgtgcctgcccattcatgcaatgtatttcccaccagcatatatgccatctgaaacagcaacagaacagtcatgataaaatcaatggacattttcagttttattttcggtttcatctgtatcctatcagtcctcctttttgacccccccttttgtttatagccatagtatattccattctctttttcatatctaatgcttatgttaaatccacttatatgcctatcaggtatgatttttttcaaactactttatatccggctttaagtctccataaaaataagacgccgttgctcctccgtcaatcagaaaatcagctccggtaataaaagccccccgattactcaaaagcaactctgccacatttgccacttcgtccgctgtgcccggacgtccggcgggacatttggcaaacatatttttataaaactctccccgtggcccactgaactcatctgccgcaagaggcgtcacgataattcccggtgaaatggagttgattctcgcaccttttctcccccagtttacggattcgtacatcacccgtttctcgttgcagcgtttcgccatttgatacgcatgaagtgtatctctgatgctctccggctgtaacataggtaattccaataagctttctgccggagtacaggcaagttgttcatcctcccatgccgacaactgaggcattcgatgcccggactgactggaaattgtaattcctgctcctcccggagcaattacatttccaacctcttccaataaaacggctgtgccatataaatctaccttcaaaatcgtttcaaccggtgcctgactgggggatacccctgccgcattaatcatcattgtgatttccccatacttctttgcctctgcaattagcttcaaaatagattttctggaggataaatccatttcgaccggaatcgtatcaaatcccgcctgattcataatttcggatatattttctgcattctctctgctcttatcgccaatcacaattttcttaccatatcccactcttcgtgcaatcgccattccgatctgacctgcacctgtcagtatcattacttcctgattcatctcgctcctccttgcatttccgacttaaataatatatacttacttaaagttactttcagtaatacaccttaaactatagtttaagtcaagatattttttcaatttttactgtggatatagtaaaaatcaggagggtgcttgctatgttatataccataggagaaatggcaaaattactggatattcctgcttctactctgcgctattacgacaaacagggtttgcttccctttgtagagcgttccaaaagtgggatacggatgtttcaggaaaaagattatgaatggttaaaactgattgaatgtctgaaaaaatcaggattgacattgagtgaaatcaaaaattatattttcatggcaattcgcggcgatgaaaccattgaggatcggctgcagctatttctaaatcagaaagaagtgataactcaaaaaatcactgagcttcaggagacactgaaagttgtggaatacaaatgctggtactacgaaacagcaaaaaaggcgggaaccgtttccgttccgaaagagatgtcactggaagaaataccggaagaacataaaaatacacggttacggttaaaaagtattccaaatgaagactaaagttttacccagaagtccatattcggatacttccgggtattttttaatttctttcccttctatcgtccaaaatatgtttggattatctgcatccgttccgtctgccccacatgaaacggacagcgtaaatcgcagcgtccgcagccgacgcagtctccggctttcttttccagattcgcatagtgatttttcgccagctcatctcctgcccgcgtcagatcatagtatttattgatcaggcccacatccagtcctgccgggcatggctgacagtggttgcagtatacgcaaattcctttggcctcctgcggcgtaaaagttcctaaaacggaatagtccctttcttccggcgccgcatcagtatatttcaaaatgcgcttcagatcttttgtgtcccgcacgccggtcaaaaccgtcactacccccggcttatccagagcatactgaatgcattgcagttccgtcagcgcctgcccgaagggagaagttttagcgttcaaaagctgtcctccgctaaaagctttcattacggaaatggcaacaccttccgcttcacagtgctgatacagctctctccgttctgcaatccctcctattgcgtactcaccttctcctccattatcataaacaggattaatgctgaacatcagcatatctaaaattttcgcgtccagcgcctgatggaccacttccggtgtgtgagaagacaggccgatatggcgtaccacaccttctttcttcagctgctggatatatttcagaatgccgtcattcatgacatgccgcaggtctgcttcctcgtcaatacagtgaagaaatccgaaatcaatgtaatccgttttcagcgcagcaagctgccagtcaacggaacgtttcatcgtatccaaatccgtggtccatccgtattttcccccttcataatcggctccaaagtgaatctgaaaatatacatcttctcgcttgccggagagggcgcgcccaaaagccgggaatggttttgcgtcagccgaggccatgtcgaagtagttgattccattctccagagccaggcttatcgccgcttctatctctttttcttccgccataccgatagaactggtgccgactccaagcacactgattttttcctccccgcgaggtaatttacgatattccatgcatattctctctttctatactattttcttactatatcatttttatttcccgccattttccgcctttgtatctccagagaaatgctgccgaccgcgccagccagtccattcccatggcgatccagatccctataatccccatattcaggacaattccaaacaaaaatgctgcgcccagacggaatatcagcatagagccgacacctacaaacatggtgtagcccgcgtcccctgccgcccgaagactgtttgccagattaaaggatgtgggatgcagtgcgaaggcaaatacgttgtgcataataattaaaacagccgcataatgcagggtctctgcggaaagattgtaaaactgcagaatcagcggcagcagcgcacatacagcggctcccagtatgccggtggagacgtaggaaatcttcatcagctttctggtataatattctgcctgctcctgcatctgcgtacctatgcactgtcccaccacggtaatcatggctaaatttactgcatttacaaccacgatggcaatctggtcaatgctgtttgccactccgttggccgcaatctgcgctgtgccaaatagagccacgatgcttgtcacaagcacttttcccagtgcaaacagcccgttttcaatgccgcttggcactgcgatatgaagaattttcctcagtagttctcctctccagataaagatatctttcaaacgaagacagactgtattttttataaaaatatcccgccctcctgcgccacaggggggaattttattatctctgtttacttcgcaaaagcattattgttaagcaatggcgaactcgagttggagagcaaaaatgttataaacaatcccgattcactttggactgttacttcgatatatttacaacgtggaagctgtttgttctccttgtggcgtttgtctgaggaaccgtctttattcgcgtgttctcaaaccatgcctaatatttccgaatcggtagacactttttccgattcgacgaatgtaataggatgcacattgatacttaactcgtcataaccaattgctcgaaattttttattttgaaaaataaagagtttatctggcataacagcgatatattccttattgagttgaatggcgatatagtcaatattgctgtctaaaaatttgtacggttttcccctaaatatagtttttctttgtattcttttagaaactccaaagttattcttgaacaggttgcggatcggcgctaactcattctcaccttcggcggtgtcgatgttatcggataccgccatcaggcgaatgtcatgctctgggaaaaattcctcggtcagcctgccaacctcgatgtagttacggcccaggtgggaaaggtctttgacaaatactgcggcggcccgtccctgctcaagttgctggatcacctccacaaaaccagggcggtccatcgtgacgccagagataccgtcatccaggaaatggaccagattggtgtagcctttctctttcgccactttggtcagcagctttttctggttgccgatgctgtaactctcaccctccagattatcgtcatgggaaagccgctcatagaggaaagcggtcatgtcacgggattttttgtgattcgactatctcataagtcctcctttccggacagccgaacagtgcatatcttgtattcccaatacaattatacagccgccctctgcccgtgtcagccgggtatggagagtttatcatttctcatgttctgccttcatcaatcgaagaaggacgctgcccagggtatccgggctttcctctttgaaaacagactctacaacaaacgctctgttgccaaagcgataagtcatttgttcaagttgtacttggttttgcttcgagacatcccgggatgcaggtttctctttcatagattgtcgtcctttcctctcgtatcgaaaaatgaatccagcccaagttgtcgacgggcgtagaaaggggaaaccgtccgccgacacttgggctggtgcagttatttccgaacgacggcccgaatcagtcgggtttccaggcagcacttcatgtgggtatccacgcacacatgaggggttccgtccttgtcatagagggtgcgagtacacaggcggctcatatagtcgtcgtaataccgcagcacttgctccatggcctcgctgtcaccgccggaggccgcatggatcccccaaacgg

SEQ ID NO: 3272 - DNA, 32759 bp, Unknown
  16S sequences of unknown bacteria
tctggtgttcatcgccatgggcctgccctccaccgtgttcatcctctccggcttcatgcggaccattccgggggaactggagcaggccgcgcgcatcgacggttgcagcgatctgcgtatctacagccagatcgtcatgcccatcacggcgccctccatcgcgctggtgaccatttataatgccgtgccgatctggaacgacttctttttcccgctggtctttatccagtccgacaagttcaagaccctgcccgtgggcctgtccagcttcattggccagcactcgaccaagtgggacctgctctttacgggcctgtccatcgctatcgtacccatgctgctgttgtacctgttcatgtccaagtatttcatcaagggcatgacggccggtgccatcaaataaagcggctgaaagcagccaaccggcgcccggcgtcaggcaccgtcctgcgccgggcccgtctatacaggaggcgtttttcaaatggaaaccgcggagatcaaggcctatcatgaaatctaccggaaagagctgtttgactatgtggtgcccttctggctcagtcattcgctggaccgcgaatacggcggctacctgacgctgctggagcgcgacggcacggtgtttgataccgacaagtacgcctggatgcagggccgtgaaatctggatgttttccaagctgtgctccgtatacggtacccggccggaatgggtggacgctgccggcttgggcgttgcgttcatgcgcgcgcatggccgggccgaaaacggcgacttctactttgccatggaccggaaaggcaatgcgctgatccatccctataacatcttttccgactgctttatgtgcacggcgctggccgagtattcgcgcgtcacaggcgacgaacagtcgcataccgaggcgcttgagatttaccgccgcatccagcagcgcaaggatcatcccaaggggatatggaccaaggccgtagcgggggcgcgcaacctgtgcgcgatggcgatgcccatgatccagatgatgatggcgcgtgagctgcgaggctttgtcccagacgccgagcttaaccccatcgtgcaggaaaatctggacctgttcttccgtcgccatgtggaccgtgagcgcaagtgcgtgtttgaacgcgtgctgccggacggcgggcacctgtttgacgtgatggagggccgtctgctcaatcccgggcacgcgctggaaaacctgtggtttatcatggacgtggcaaacgacatgggccgtcgcgacatggtggatgatgtggcggagatcatgctctgggtcgtagaacgcggctgggacaaggaatatggcgggcttttctattatcaggactacatgggctatcccacggacaagctggaatcccagatgaagctgtggtgggtacatgccgaggccatcaacgcctttttgctggcgcacaagctgaccggacggcaggagcatctggactggttcaagcgcctgcacaactattccttcgagcatttttccgatcacgaatacggcgagtggtacggctacctggaccgtgagggccgtccggtctttggcctcaagggcggcaagtggaagggctttttccatctaccccgcatgctgatggtctgtgagcggtggctcaatgaaatggcggagcagtgacatccatgtgtgagatcggctttggaatcgacggtggcggcacgcgctcacggctgtgcctgtttcgtttggaggacggacgggaaatcagccggtttaccggtggatctaccaacatgtacagcgtaggccaggatgaggccatgcgaaacatcgagcagcttctccgctcctccggcgtttccctggaaaagctgaaagccggctgcctgggctcagcagggctgagccgtccggctgaaaaggaagccttttcctgctttttccgccgtttgctgcctcaatgcagcatgtacctgtgcaacgacggcgaaacgctgctggtaggcgcgctggaagccacggaaggctactgcctgatcgcgggaacgggttcgctggcgctggcgcgcaaccgggagggccataccgcgcgcgccgggggcctgggttacatgctgggcgacgagggaagcgcgctgtggatcgcgtggcaggccatccggcgtgccatgcgttcccgcgaggggcgcgatctggaaacgtcgctgctgccggatttggtgaagcatttttcgctttcctgcccggaggatttcgtagcgctgctgcaccaccattttgaaaaggcgctgatcgcgaccgcggcgggtctggtgctcgatcgtgcgcaggatgacccgcttgcggcggatatagcccgcgcggccatcaacgagctggtgcagctgttaggatcggtcatgcggcagataccgctttctcctccctgtgcggccctggcgggcggggtgatggaacacaatgcctggcttcgcagccgtctgatagatcggttggcgcttgactatcccggacttaaggtggtgctggggcctggcgatgctgtgcggggagcgtgcatgctcgcccgggcggcatggaggacataaaacccaatccctgtctgtgtatctcccggaccggcgttttccttgacaagcatcttcgcatctggcacaataatacccatacagcatctctgctacggagaaatccaggctcgccagcccaaccgtctggtcatgtttcatccacagcggcgcccaatcacggcgcgcatcggcaggcagctgtcatttcttttcaaaaagctggctggttttcagacggcttttttcacttcccagagatacaaaggtcatccatcaccagaggggaggccgcgcccatcgcgcgggaaatgccatgagctttgagtaccgtcgtttgaaggaccctgcctactttgcggaaaaccggcttgccgcgcactccgaccatatcgtctacgcccggatggaagagctgctgcgtggagagagcagcctgtattgtccgctggacggtctgtggaagttcttttgcgcccgcaacgagaatcagatcattcccggctttgagggcagcgactatgactgccatccgtgggcggatattcccgtgcccgcgcacattcagttggagggctacggcgcgccccagtatgtcaacgtgcagtacccctgggatggtgtagaggacgtgcccctcggtgacgtgccgcaggagcataacccggtggcctgctacgtccggtattttttcctgcccgaagccatgcgcggccagcgtgtgctggtgcgctttgagggggcggaaagctgcgtggccgtatggctgaatggccattatgtgggctttgcggcggattccttctctcccgccgagtttgaactgacaccctatttggctgagggcgagaacaagctcgcctgccgtgtgtatcgctggaacatcggcagctggctggaggatcaggatttcttccgtttctccggcctgttccgcagtgtttccctggtttgcattcccaaagcacatgtgtgggacatccggattcaaacgctgctggacgatgcgtataccgacgcaaccctggtgctggatacgtcgctcctgctgggtcagggtgcggaaggcgcaaccctgcacgcggcgctgatggatgggaaaaccgtactcgcgacggcacagggcggtggcgaaacgcaacacttcgagctttccgtccaccagccgcagctttggagcagcgaatctccccggctgtacgaccttctcatgaccgtatgcgaggaggacggcagcgtggtggaggtggtccgggagcgcgtgggctttcgccgttttgaaatgaaaaacggtgtgatgtgcctcaatggccaacgcatcgtcttaaagggagtgaaccggcacgatttctgtgccgaaacaggccgtgccgtacgacgggataccatccgccgcgacctgctcaccatgaagcgcaataacatcaacgccgtccgtaccagccactatcccaaccagcgcgccctctacgccctgtgcgatgaactgggcctgtacgtgatggacgaaaccaacctggaaacgcatggcgtgtgggaaacgatcatcaggggcaagcattctgtgtcctacgcccttccgggggaccgtatggaatatctgccccggctgacggaccgcgtggattccctctatgagcgggacaagaaccatccctgcgtgctgttctggagctgtggaaacgaggccttcggcggcagggtcatctacgagctgagccgccatctgcgcgcgctcgattccacccgtctcgtgcattacgagggcatttccaacgacccccgctatcctgaaaccagtgatatggtcagccggatgtatgcgcccgtttcggaaatccgcgcctatctggccaaacaccgcgaccggccgtttattctgtgcgaatattcgcatgcaatgggcaattccaacggcgccatgcacaaatacactgaatatgcctacgaggagcccctttatcagggcggatttgtgtgggatttcatcgatcagagccttctccacaaggaccgctacggtcaggcggcctatggctatggcggcgactttgacgaccgcccgtgcgattacaacttttcgggcaacggcatcgtttacggggacgggaccgaaagccccaagatgcaggagatcaagtacaactatcaaagcatcgtggcccgcgtgagcgcaacacgggctgtcatcaccaaccgaagcctcttcaccccgacctcggcctttgcctgtgtggcgacgcttgcgcgggacggcgttgtgatcgacacggcagcgctgcgcatcaacgtccccccgatgaagagtcaaagctgccatctgcccttcaaaaaacagacagaacccggagaatatgccgtcaccctgtccttccgtctcaaggaggatacgccatgggcctccagcggacacgaggttgcctttgctcagggcatttacaaggtgaagggaagcgcgacagcgccggtttgccggccgctccgcgtcatccgcggcgatttcaacaccggggtagagggcaacggtttccgcgttttgttcagcgacctctccggagggctggtctcctatgtgtatggcggtaaggaaatgctcaaatccattccatgtcccaacttctggcgtgctcccaccgataacgaccgcggcaacggcatgccccaacggtacgcgcaatggaaaatcgcctcgctgtacgcttctgtcaagggcacgccccagctggccaggaaaaatgcgcatcccgtgcccagggaaaacggggatggctctgtttccatcgactatacctacgcgctggctaccgtccccgccgcgcagtgctccttgcgctacacggtatacccctgtggaaccgtgcgcgttgccctgagctacgaccccgtatccggcctgggagacatgccggaattcggcgtaatgatgaagctggacgcggattatcaccgggtgcgctactatggtcttggtccggaagaaaactacagcgaccgttgtcggggggcacggctgggcatttttgaaacaacggcgcaggacaatctggcccgttatctcgtaccgcaggagtgcggcgcgcgcaccggcgtgcgctgggcggaagtcatggacgatcgcggccggggcttgcgcttccaggcggacggggatatgaccttttctgcgctgccctatactccgcatgagttggaaaacgctgcacacgcttacgagcttccgccggttcactacacggtggtgcgctgcgccatgcagcagatgggggttggcggggatgacagctggggtgcccgcacccatgaggaatacctcatcgatatatcccgccggcgtttcttcactttctgcttccgtggaattgtctgaggcaactccgattcgctctccattttgcgcatccggccatgaacacggctgttgctgcgcatcccgccgcctgcatccgtgctttgccatggcaaaggccgctcgcccatctaacagggcgagcggcctttggttttgactgccggagttctttgaccggcttggtcaggcactacagattagcatacttcggctgataacgagaccattcgtctgcttatgccaccacaagggaaaagtttcttgaaatttatacttgactatgtcaagaacacgtgtcatacttgactatgtcaagaaaagaaaggagggacatgatgttccaaaccttcgcttactgtctttccctgctgtataaggagttttacgcttatgcgggagcccggttgcaccccctgggcgtaaaaaacggtctggtattcttcgtcatctatgttggcaagcatcctggctgtactccgtccgaattgaccaagacgctgcgggtggactggggctattctcagcggtgtatcactaaattggtcgacgatgggctgatcaccaaggaaaaagcaggacgctcctatcaactcaagctgacggagcagggcgaggaggcattccgggtcagccatcagctgttttatgactgggatgaacagaagctgtgcaccctgacagaagaggaacgcgacactctgctgaccctgctgcgtaaaatcatacgaaaagaggatgaaaccccgcatgtatgaaaccattgccagtcctattgagtatggcgggattcgcctgaagaaccggattatcttcgcccccaccacaatgggactcaaacaggaggactattgcgaaaaaatccgtcaaatcgccgcgggtggatgtgctatggtgattttgggcgatgttccggttgcccggttcggctttgggcagagcctgttcacctccaagggcttcgctgcgtaccgcgagcttaccgatattctccatcgagaaaactgcctggcctgtgcccagcttcaccagagtgattccaatgtcaaggcgatgctgaaatatgtgccgggcgtgctgaccaaaaagatcagcatgcaggaccttcgccccctgctgaatcaggaagtcagcccttatatctgcggcctgtccacccaaaaaatcagacagatcacgagccatttcggccgcgcggccatccaggcgcgcaaggcgggatttgacatggttcagatccacggagacaggatgttgggcagcttcgcttccccggtattcaatcaccgcaccgatgaatacggcggttccattgaaaaccgtatccgctttgccgtggaagcggtgaaggcggtccgcctgcaggcgccggacctgcccattgatttcaagctggctgtccgtcaggagaacccgcactatggcaacgccggcgtgctgcccgaggaactgtccgtggtggtgccggcgctggagcgcgctggcgtgaccagcttccatgtagcgcttgccaaccactcatcgctggaagacaccattccccctgcctcgcacccgtattttggcggggaaggctgtttcctgccgtattgcgatctggtgcgccaatatacccgtctgcccatatgcggtgtaggcggcctgacccgaccggattttgtggaagagcagctggctcagggcaggatcgattgcgcggcgatgagccgtcagctgatcgccgatccctcctggcccaacaaggtgattggaaaccatccggagcaggtaatgcgctgcgtacgctgcaacaaaaaatgccttggaggcatgatgcgccatgagggcgtccattgcatctatgaaaggaggcacggaaagtgacctgcgccatcgtttacagcagcaggaccggaaacacgaaacagctggccgaggcggttcgggcatcgcttggggagcaaacatgtctgtatatggggcctccggatgaccgggctctggcggcggatcgcctctatgtcggcttctggacggacaaggggacctgcgatgcggcaaccgcgggctttctctccaaagtcagcggaaaggaagtgttcctgtttggcactgcgggctttgggggcgagccggcatactttgaaagcatcctgagccgcgtagcgcaatgtctgggacagggaaacacattgatcgggtcgttcatgtgccagggccgcatgcctatggcagtgcgggagcggtacgaaaaaatgtgctccgccccgtcttcgcccgggatgcccgatccgaaaaaaatgcttgaaaactttgatcgggctctgcagcatccggatgcggaggacctctcccatctgacgtccgccgtgacggccggctgcaagccggtctaactacacccgtttcacacgccatgaaagaattcccatactaaagagcgaaatgcaaggaggatatctgcatgaaaaaggtttgttcggtactgttggttatgatcctgatggtgtgttccgccgccttcgcggaagaaggaaaggttgagacgttttccgcagagtatgaaatggcaggaaccacgtcttccggccagcccaaaaacgacaccttcattttcgagggagaaaccacggatggcatcatcaccaagctcaactttgatatcatccgcaacaaaggaagcgaggatgagtattccaagaaggacatcatgggctatctgatgaacatttccgatgctacggtggaaaaaacggaagacgggtatcgccttgtcaccctgagtgcctacggctatgatcccgcttattcggacggcgatgcgtactatgcgcagtatatgctgaccgcctcgtgcgacaccctgacggaagataccctgttcagcgatctcaccttcagcgacctggcccaaccggacaatgtggtgaccgtggaaaaggcctgcatcgcctatgggtatctggcgcgtgaagccggcgtggatctgacgcccgaaacgcccgtgaaagacctgctggccctgcatggcctgtatgcggacggcacgtttgtcgagggctccaaccgtgtctcctttgcgggctacaatggcggccgcagctacggcgagcagatggaagccatcatcgactacattctggccaaccacatgaccctggaggacgtgtacgaaatgttccgcaccgtcaatcaggccagcactccgattcaggaccgcgacaccatcgccggcgctaccatcaccttcggcggagacttccagcgcatggtatatctggccattcacggcgagctgtttgagggcgttgttaccaccacagaaaacgaggatggaaccacggtttgcgaggtggtaacccagggctttggcggcgaaattgaaaccaacgtcacctttgacgccaatgacaggattacggctatttccgtgcgcgacgcccaggaaaccgacggtgtaggcggcgttctgacggcggatgattcggactatatcaacgcgctgatcgcggggcaggacgatctggacagcgtggatgccgtaagcggcgctacgattacgtccaacgccttgaagcaggccgtgcgctatgcccaggaggccatcgcccgctgacagaatggcccaggcgtttgaaaagaatcacgattcttttatccaagaacaggatcaccagtttttcccggtgatcctgttcttggtaaacggcttttcccattgttgatatacgacgttttttgcagacggatgtcggtgctttttccgctttacatccggccccgggaatgatacaatcgatttattgtaagcacagggaaaggagcattttgattcatgagtaaaaccgtcgtccatacctcctccgccccggctgccatcgggccctattcgcaggccgttcagggcggacggtttctgtttacctccggccagttgggcatcgatcccgcaaccggcgaactggctcatggcgttgaagcacagacagagcaggccatgcgcaacctgggtgccattttggagaaagccggcctcggctatgccgacatcgtgaaaaccactgtctttgtcgtggatcttggagacttcgccgctgtcaacgcggtatatgagcgcttttttgactctgagcctcccgcgcgcagctgcgtgcaggtatcggccctgcccaagggcgggctggtggaaatcgagtgtgtcgctgcagaaagggaatgaccggtatgtttgaaattctgtccaaagaggcactgaatccaacggtcgtgcgcattgccgtctcggcgccacgcatcgcccgcaaggccgagccggggcaatttgtcatcctgcgcgccaaggaacaaagcgagcgcatcccccttaccgtggccgactatgaccgcgaggcgggtaccgtcaccgtgatctaccagatcgtgggtgccggcaccatggagctgaacaccctgaacgcaggcgactgtctgcatgacctggtgggaccgctgggcacccccacgcgcacggaggggctcaaaaaggtttgcatcgtgggcggcggcgtggggtgcgccatcgcttatcccgtggctaagaagctgcatggcctgggctgcaccgtgcacagcgtggtaggcttccgcagccgtgacctggtgattctggaggatgaattccggggcgtgagtgaggagctgcgcctgatgaccgacgacggcagctacggcgaaaagggtctggtcaccaacgcgctggaaaagctcattcaggccggcaaccaatatgatcaggtaatcgccatcgggccactgatcatgatgaaattcgtctgtaagttgacggagaagtacggtattaaaaccgttgtcagcatgaatcccatcatgatcgacggaaccggcatgtgcggcggctgccggctgaccgtgggcggggaaaccaagttcgcctgtgtggatggtccggactttgacggccatctggtggactttgacgaggccatggcccgtggcgccatgtaccgcgattttgagcagcacgcccgtgaggaggcttgccgcctgttccagaaggaggccgagtccaatgcctgatatgagcccgaaaaaaacgccaatgccttctcaggcgccggatgtgcgcaacaaaaatttcagtgaagtggccctgggctatacccgtgagatggccgtgggtgaagccaaacgctgcctgaactgcaaaaacaagccctgcgtagccgcctgccccgtgcgcattgacattcctgcgtttatcgagcgggtggcccatgaggatttcgaaggggcatacgaggtgctttcccgctccacgtcgctgccggcggtatgcggtcgtgtgtgcccgcaggaaacccagtgcgagggaaagtgcgtgcgcggcatcaagggcgagccggtgggcatcggccgtctggagcgctttgtggcggactggcaccgcgctcagaaacgcgcccctgcggcaaaacccgcgcccaatgggcacaaggttgccgtgatcggcgcgggccccagcgggcttacctgtgcgggcgatctggccaagcttggatatgctgtgacgatttttgaggcgctgcacctgccgggcggcgtgctgagctacggcatccccgaattccgtctgcccaaacagatcgtgcaggaggaaatcgacggcctgcgtgagctgggcgtggagatcgaatgcaacactgtaatcggtaagacgcttactgtagatgatttgtttgagatgggctacgaggccctgttcatcggcagcggcgcaggcctgccccgcttcatgggcatccccggcgaaagcctcaagggcgtgtattcggccaacgaatacctgacccgcatcaacctgatgaaagcctacctgccggaaagcaccactcccatcaagcattcccgccgcgtggcagtggtgggcggcggcaacgtagccatggacgcggcgcgctgcgccaagcgtctgggcgcggaggaagtgttcatcgtctaccgccgcggactggaggagatgcccgcccgccgcgaggaggtcgagcacgcgcaggaggaaggcatcatcttccacaccctgtgcaatcccgtggaggtgctgggcgatgaaaacggcaacgtatgcggcatgcgctgcgtgcgcatgactttgggcgagccggatgaaagcggccgccgccgtcccatcgtccaggagggcagcgactttgtgctggacgtggacacgatgatcatgtccatcggcaccagccccaacccgctcatccgcttcaccacgccggggctggaggctgatcgccgcggctgcctcatcgtgcagggcgaaagcggcctgaccacgcgcgaaggcgtgtacgcgggcggcgatgccgtgaccggcgctgccaccgtgattctggccatgggtgcgggcaagaacgccgcgcaggccatcgacgagtatatccatcagaagggctgatatcaaaaaccagacggcccggcgcttccggaaagggagcgccgggccgttatttctgttgcttagttcacgcgctgcatatcgcttacggcgcagtagccaaagccgatgccgtccagactgtcgtcgctgaccacgcgggtttccgtgcgatagcaccagcccggctccaggcggtacgcctcgcgtcccacccagcaggggcgcaggtccgtcagcacctcgtagctgggataatgaacgatatcgccatacagcgtatttttctccacttcttcgtccaaagtgctcatgggccagaaagcgtttgcggcccagagctgaagcgtctccttccaggtgcgctgcggcaggaccatcagttccgcctcctccaccacgggcataccttccaccgccagggcggccaaagtgccgtcgtcgcgcaccacgcaggcaaagcctgattttgcgccgtagcggtcgccattctcctcccaataatactgatccatcacgggcagccccagcagctcatagcagccacggacgagcgttttgtcatccgcgccaccgttgagcgcatgttccttctcaatcaggctgtaaagctccggcgcacagctgttgccggtcaggctgaaagtgccggccagcttctccgggacggtatttcgccttgcgtaaaggaagtcctcgctgatttctgcgtccagccgctccatcagctcccgcgcaagcgcaatcgacgcctccatttcccgctgattgggatgcccggccaggtctcgcgcaaaccgctcatacacgctaaagttgcaatcctcgccgtcccggctgaaggaaacgtgccggttcagcggatcgtcattgtagtactgctccagctttccgcccttcacgctctgcccggccgccttgatggccgcggatagatcgccctttgtcaccttctgatagcgtaccgtcagtacggcctgctgctgcgccgtaaaaggctctggaacggggcaatccaccatcaggcggatatgccctgcactctccggcagagcaatctcgcccaccagccgcccattgatttcctgcactccggatacgtccacttcctccgggctgcacagctgccattcgtcctgcgcaagcgccgtaccgcccccaatcagacaaagggtcagcaggatggctaccgtgtgtttccaatgcttcatggctgttctttcctcccttgctcattgcggagcggcaaacgcaaacgttaccgtgctctgctcatttttctcgccgtagagatggctttgaatcaaaagcgtcgctttcatcatgccgtcgttttccttggacggggcctctcccaataggtcgagccttgcctcaaaactgaacgtttcgccctgatcctgcggcacccagtccaagctgaccggcaagcgcgtatcccctatctgcaataccgcatcggaaaccaccagcatctctttgccttcgggcagccattcgtcgaaggagagcaccttgccctgccaccatatccggtcaaaatgctcgccatccgtcccaatatctgtttcgctgagcagacggtatgcatccggttccctgggttcaatgtgcgcacagacggccagtttctcgccatccatgtagatgtcgcgcaccgcaacggacaggcgttcgctttcacactgctgccatacaacgggtgctatgcccgcttccgcctgctcggtggacatgccgccggcaacccgttccgtcaggaaatacaggatgcccagccgttccagcgcaaatgctgttgcgcccagcagtagagcaatcagcgccacgacaacggccgtccgcatcctgagacgccgcggctttggcgcaggctgagcctgcagcgacgccagcatgctctcaaatcttctgtgaaatctatccggcgtaggttcaaaagcgttgtccagccgatccagcagtccgttttcccatgccttcattccttcatagcctcccattccacgcgaagacgttttcttgcgtgatgcagccgggattttaccgtaccctgcggtatgcgcaggatctgcgccacctcggcgactgaaaacccttccagataatgcaatagcagcggcactttcagcttttccggcacagcggacagcgcctgcttcagcctgtcgtccggcggttcaaacgccggcgcaggctgctccacttcgtccacgagcaccacacgctgccgctttcgcccgatggtatggcactcattgatgacaatgcgcatcagccatggccggaagtatgccgcctccacccttccgcgccgggcccaggcgcgtgccagcgcttcctgcacggcgtcggcgcagtcctccggggatttcagcaggctgcggcttacacggtaaagcgcccgctccatcgcctccacttcatccataaaggtcgcttcgtcaatcaccgcttacaccttcttttttcgggctgttgcaacatgccttacaccctgataacgcgctcggaggccattcggttcaaaaatttcagaaaaaaaggcgcctcccaaacgggaagcgccttgagagtgctgaaatcagcgggtgagcaaagtggtctcggtttccttgtcgaagaagtgcaggtgattgacgtcgaacgcaatctgcaccttctggccggcacggctggtggtgcggggattgacgcgggcgatgatgttctcttccttgccgctggtggacaggtagaggtaggtctcggagcccatgagctcggtcacttcgacgttgcagtccaccaccgcgttgggagcggcctggatgaacacatcctcgtcgtggatgttctcgggacggatgcccatgtagacttccttgccgatgtagtcctcatccgcgaacttggccagcttgctgggcgggatgatgatcttgttgtcgccgaagacggcggccacgtcgttgccttccttgaccagcttgacggtgaagaagttcatctgcgggctgccgatgaagccggcaacgaacaggttggcgggatagtcgtacaggttctggggagtatcgacctgctgcacaaagccgtccttcataaccacgatacgggacgccatggtcatggcctcggtctggtcgtgggtcacgtagatgaaggtggtctgcaggcgctgatgcagcttggtgatctcggtacgcatggcaacgcgcagcttggcgtccaggttggacagcggttcgtcaaagaggaacaccttcggctcacggacgatggcacggcccagagcaacgcgctggcgctggccgccggacagagccttgggcttgcggttgagcaggtgggaaatatcgaggatcttggcagcctcttccacgcgctgcttgatctccgccttgggggtcttgcgcagcttgaggccgaaggccatgttgtcaaacacggtcatgtgaggatacagggcgtagttctggaacaccatggcgatgtcgcggtccttgggggccacgtcgttgaccagacggtcgccgatataaagctcgccgctggagatttcctccagaccggccaccatgcgcagcgtggtggacttgccgcagccggaaggtccgaccagcacgatgaactccttgtcctcaatgtccaggcagaaatcgctgacagcggtcacattgccggaataaaccttatagatgtgattgagcgatacgcttgccattctcaagcagcctcctttttctgaatgccggcagtccatcattgcaacgcatggaacagccacatttcaatgtctgtattatatcggaatcggcaaaaaaaaggaatcggctgaatccactaagatttttgaaggcatttgtacaggatgtacacgacggataaatttataccacatccttgcacattctgctcattcgtcacgcaaggcatccacaggcttcatgcgtgatgcgcgcgaagcgggcgatacgccaaagatcagtcccaccgccagtgctgccaaaaacaccgctacacagtctcccagccggataacgggcgtaagtccgatgctccgtccagccgtttcaatcagacctaccccgatgaccagtcccatgcatccgcccaccagtgcgtagaccagcgcctccagcaaaaacaacaggcaaatctggccttccgtggttcccagagatttcataatgccgatctcccgccttcgctcccgaacgctcaccagcaaaatgttcattactccgatgccgcccaccagaatgcagatcgccgccacccatttgagtacgtccacaaagatgctcatcacgctgttggccgcctcaatctgtacctgcatggtgaccgtatcaaccgccaggtcccgcttaacccgcatcacatcctgcgccatggcggccgccgcctgcggcgtaacgccttccgggacgctgaggatgatctcgtgcacgctctgccccatccattcgcagaaaaccgcgatgggcaaaaaaaccgcaccggacgcatccacctgcgacagctcgttgctctgcgtgatgacgccgcgtacccaaaacggcacgcctgaaacgctgagcagttcgccgggctccacctccagcttctcggccagcgtcgcccccagcagcacgctgcgcgcccccggctgccactcggccgcatacaggtcgcgtcctctcagcacgctggtgcccatcatatccatatactcacgggaacacccaaccagtacgcagctttcctcactgcggcccgcgcgtgcttcaaccggcgcgtaaacctgctcggttgcggaagcgtccagcgccgaggacagcagttgagcgtctccatggcgcaaggtctgtccctccgaagcggtcaaccatacccggtcgatgccaagacgcgccatctcgctttttacctgagcccggccggcgtcgcccagcgtgatcacggccagaatcgcgccaatgccgatggccattcccagcaccgttagcacagagcgggcgggcgcggcaaaaatattgaggaggctcagtttccagaaatcgtatcgtttcaccgcgccctggcctccttgacggcacagcccggatagagcgagccggtttccggcaacagcacaacacgcttgcccgcccattcctgcgggacggccacatacgcatcgttgcgcagtgtaaggtcaatctccaccggtgtggcgattccatcctccacaaaccagacccggttacgactgtccaccgcgctgatcggtaccagcgcctgatcctcgagcgcctcctgcaccaattccaccaccacgcggtctccggcaccgactcccatccatgcgccgtcatccatgggcaaaaaagaaagcgactgcatcgcctgtccggtgctgctgtccagttccggtgctcccgactgccccagaacggcggcgcccagcgcttttccttccgcgctggtcaccatcgcagccgctccgggcgctacgtttgccagttcctccgcgcgtccggcggcgacgacccgcagcccggttccatgaatcgatcccagaaggccgccctctccggcgatagcgccttcggccacgtaaagggcccccacgacgccgtcggcttctgcgcgaatctgcgcggaggcgatggaggcgcgcagttccgcctgccgcgtgcgcgcctgcagggcggtttgagcagcggacaaagccgcttcgcccgcctgaccaaaggctgccagcgccgtttcctgctcataaagcatctggttcacggcagccagctcctgctccagcacacccgtatccatgctgatcagcagctcacccgcacgcaccgtctgcccttggcacacatacaccttccccacccggcccgcctgcagggcgatgaggggctgttcatccgcgtaggcgacaaccccctccagcaaagtggagcagatcagttccccccgctccaccaccgcggtgcgcacggctgtcctgggtgtgaacggcagcaaaaacagcgtgaccacggttgccgccgtggccgcaattaccagcagggacgccttggttttcggcatgcgtgcgtttcctccttgcccgcccctcacggggcgctcaaggggtattgtggcctcttcgccgggtgcgaaccgtggcaagtgcatgcagcgtgggcatcatttaacaagcgccgccgtgcacggggcacggcggcgcttgttctgcttaccgcatggacatgctctggtcaatctgctggcgtgtcatgcggatatcggtcagtttttcgctgatggagcggtccagctgggccaggacctcatcgatatgacgatacacgtcgttatagagcttttcgatctcctcgtgcgtgttctgacgcagctcctcggcctccatattggcgcgcgcggtgatctcctgctcgctgaccagctgacgggcccggttctccgcgtccttgaccatattggacgcctgttcctgtgcctcgcgcaccatgccggccgcctgttgctgcgctttcttgagcatttcctgcgcctgctgctgggcctgggcagtcatctgctgggcctgattcttggcgtcggtcacgtactgattggcgcgcatggtggcgttctgcttggtctgctcagcgcgctcgttggcctcggaaatgatggtgatctgattctgcaccacgccctcgcattcggcaaacaccgtgggcagatcggttgtaatggcgtttgccaggcccagaatgcgctcgcggtccaccatgcacatattgctcagcggcacgcgtttggcctgcatcacaatttcctcaaggtcattgagattcttccggaaagcggaaatggcatcctgttgcatggttctttttcctcccgtcaaaatatggtcaacgttgtaaggcgcgccgtacatcctccacgatggacgccggcacaaacggggcaatatcccccccaaacaggccgatttcccgcacagcgctggaactgagataggcgtgctccggcgcggtcatcatgaagagggtttccacgtcgggcgccatctggtggttgagctgggccatttgaaattcgctttcaaaatccgttacagccctcaggccgcgcaggacgatcccggcatccagctttctcatatagtccaccagcagtccgtcaaactgatcaaagcgcacgttgggcagatgagcgcatgcgcgggagagcagctccaaccgctgcgcgatgggaaagcacccctccttggccgggttgtgcagcactgccaccaccacttcggggaagatgtccgcgccgcgctcaatcagatccagatggccgatggtcacggggtcaaagctgccgggatatacgcacaggccctttttcacgtccgtttcctcctgacctacacgctctcgcggtagtgaaaaaaatgaattgcagtgtcgccataggcgcggtctttccatagcgcaaaacgcccgtccggcgaaggaaccgcgtccagccggtgctccagcaccaatagcgcgtccgcctccagcagtcccagatccgcaagtgccgcacagcattcttccaataccggcatgcggtaaggcgggtccagaaacaccaggtcaaaccggcgttcctcccccttcatctgcgaaagcgcctgccgccagtcgcccgcgtagatccgcatggcgtccatgaagcgcagcttttccccattccggcgaatgcatgagaccgcttcccggtcgcggtccgccagggcggcaaagtccgcgccccggctgagcgcctccagcgccagcgcgccgctgcccgcaaacagatccagcacccgcgctccgggcacataggcctgaatgatgctgaacagggattccttcaccttgtcctgcgtgggacgtgtgtccatcccgcgcggcgcataaagctgtgagccgccgcattgcccggcgataatgcgcatcagatcagcctttccggcgacttgctgcgctggcgctgcttgcgcgccttgcgctcacggcgcttcttgcggtcgtcgcccattttaatgccggtgttgattttgtcgcgcagtttccggccctgggtatagcccaggccatagcccagaggagccaacagcacaaacaggggactcaggcgctcggccagcagcgccacgtcgttgccggtataggaaaatacgttgacaaatggcaaaatcatcgcgcggtctatcacgcgaaggatgtccatcacgcccatggagccgacattttcatagtagcgcagcgcgtcgccgaattcgctctggcgcatgagcgcctccgtccaggacgggagcacgcccagcgtataggtgatcggacgcgtaagcaccgcgtagacgacggcaaacgccacaaacggagccgcgcccaccagagcggcaaacatgcccttgaacggatgaaagcagcgcgcacggtcgtccttttcgacgaaacgtccgccctcctggcgggtatacatgatttccgcaaaggcggcgtcgttttctccgcgcaccattccctgatagtactgatagtaaatcaccagtccggcaacagcgatgcacgacagcaggcgtccccacaggctttcaaagctgagcagcataccggcgatcagatagatcaccgtaacggcaagcatgctcagcatgcgcttgagcgccagcttccaggcatcctttccatgccatgatcccttcagaatcggctttttcacctgggctaccggcttttttgaatttcctttggcactttgcatctgtgtatcctttccacctccccgcccggccggcaggggttattgtggcaaaacgcctgttgcttcatacatgcaggtacacccgcggcacccgtgcggtgacggccagaagcacctcgtaactgatggtgcccgcccacgaggcaagctccaccgcatcaatgcgctctccgccctgacagcccagaatcaccgtttcgtctcccacctgcacgccggggatgtccgtcacatccaacatggtctggtccatgcatacgcgccccacgatgggtgcgcgccggccatgcaccagcattgcgccccggttggacaccgcgcgatgatacccgtcaccatagcccacggcggcggtggccacgagcatgtcgcgcggggctatgaaggtacaaccatacccgatgctctcccccgcgttgatgcgcttgacatgcacgatctcggtataccagctcaaggcgggtgtgaagggcaaattggtgggcacgggcggataaccgtagagcgaaatgccctcgcgaatcatgttgaagtacgcttcgggcgccagcagactcatggcgctgttggccacatgcgccgggatgtcagggttaaagtgcgcacggagctcgcaaaagcgcttgagctgcgcacgggtgaacgggttcatcccgccgtccggcagcggattgtccgcatcggcaaagtgggtatagatgcccgtggcgcgcacatggggggccgacgccagcgcagcggccaaggcgtccgcttcctcctcggtgcgcagtccgatgcggttcatgccggtatccagcttgatatgcaccagcgcttcgcggctttgggcagcagcctcccggtccagcgccgcgaccatctccggggtaaagaccgtctgcgtaaggccgtagcgcacgcagtccgccgccgcgcggggcatagccgcgcccagcaccagcacctcgccctccaccccggccaggcgcagttcgatgccctcctcgggcagcgccacagcgaagtgtgaagcgcccatgccggagagggcatccgccgtttccagcattccgtgcccataggcgttggccttgatgacgggcatcacttccacgtccgcgggcacctgatcgcgcaatatccgataattgttcctgattgcgtccatgtcgatctcgacacggttttgcctgagcatgttccaaccttcccgcctgcgcgcaaacgcgcgcgtgttgtcctgcggcttacaggccgcgcacctcgtcctgcgacagcaggcgcacgcccgcctcggtcaggaccttttccgcctcagccagcttatccacacggaagatgatgagcgcatgatcgcccgcgttgcgcacgaagctgtagaggtactccaccacgatgtcgtggccggagagggtctccagcacctcagccagtccgccgggatgatcgggtacactgacggccagcacatccgtgagcttaacggtataaccgttatcggaaatcagcttgaccgccttttcgtagtccgccacaatgccgcgcagaatgccaaaatgcgtggtatccgccacagagagggataccaggtcgatgttattgtccccaaggagcttggtaaaatgcgccagacggccgggagtgttttcgatgaaaacggaaatctgctttacgtacatggctgactcctccttaactctggatgggattcggactgacgacgcccttgcgggcgcagcgtattttattgcagatggcgccggtcggtcacgcgcacggccttgccttcgctgcggggcagcgtgccgggctggcagagcttgacgctggcgtgaatcagcgcatggctggccagggaattgacgatctttcgttcgagcgtttccagatcacgcacggtatcgctcatcacagagggagagagttccacctgcacctcaatggtatccagcgtgcctacgcggtcaaccacgatgtgatagtgaggctcgatgcccggcacctgaagcagcgcatgctcgatctgcgaggggaacacgttgaccccgcggatgatgagcatgtcatccgtgcggcccatcacgcggcccatgcgcacatgggtgcggccgcaggggcagggctcgtcggtgagggtgcacaggtcatgggtacgataacggatgaggggcatgccgtgcttggtgagcgtggtgaaggtaaggtcaccctgttcgccgtagggcaggctctggccgtccggtccgatgacttcgggcaggaagtgatcctcccagatgtgcatgccgtttttggccatgcattccatggcgacgcccgggcccatcacctcgctgaggccgtagacgttgagcgcatcaatgcccatcttctcctcgatgcggcggcgcatgtcctcggtccagggctcggcgccgaagatgccgctctttaagcggatgcgatccagcgtgatgccttcgcgctccatggcatcggccaggttgagcgcataggaaggcgtgcagcacagcgccgttgagccgaagtcctccatcagcatgagctggcgcacggtattgccgccgctcatgggaatcacgctcgcgcctacgcgctccgcgccgtagtgcgcgcccagcccgccggtaaacaggccgtagccataggccacctgcacgatatcgttcttgccgacgttggcgcagtacatggcacgtgccatgagctccgcccagcggtcgatatcgccgctggtataaccggccacgctgggcttgccggtggtaccgctggaggcgtggatgcgcacgatttcactctggggcacggcgaagaggccgaagggatagttgttgcgcagatccttcttctcggtgaagggcagaaggtgcagatcctccacgccgtggatatcgttgggcgtgatgcccagctgctgcatcttgttgcggtagaagggtacatgctcgtatacgcggcgcaccacgtcgcgcagccgctcgtcctgcagggcgcgcagctgttcgcgcggcatggtttccatggtgggattccagtagacatgctccatgggtgctctctctccttcacagcggttgtatatcagcccatcagggcgcggccacgctcgaaggccgcaaggttgacttccaaagttctgggaggcacacaggcggcgatggcgtcccgccaggcctcctcctcaaagggcagatgccggctgaacatgccgagcagcaccaggttcagcgccttttggctgccgcactccacggcgatgcccagcgcgtcggcgctctcgacgcggtagggcgcgagggacgccagcggatcgtcgggataggcggtcgcgccggtgataacgggcatgggcaaaatacgctgagtattgacgatgaccgttccgcccggcttcaaataacacgccgcacgggcggcttccagcgcctcaaagctgatcaggtaatccgctccacccaacgccaccatgggcgaatgcacgctgtcgcccacgcgcacatgcgtgatcacgctgccgccgcgctggctcatgccgtgcacttcgctgaccttcacgccgcagttttcgctgagggccagccggcccaggatcttgctggccaacagtgtaccctgtccgccaacgcccacgatgaccagatcaaatgccgccttgctcatacgttttcctccctgccgctcttgatggccttaaaggggcatacctgcgcgcacatgccgcagccgctgcacagtgcgggattgatttccacgagcttgccatgccgctcgatggccgggcagctcaatttcatgcatgcgccgcacccacggcacccgtcgatcacaaaggcgggccgcaccgtcttgtccagcagcgcacagggacggcgcgcgatgaccacgctcacctgctcgctggcggcggcctcacggatggcctgctcggtggccttgaggtcaaaggggtccaccacgcgcacgtcggtcacgccgcagctttccaccagcttttccagattgagctggggcgcgggctggttgtggatatcaaagccggtcgcggggttttgctgatggcccgtcatgccggtgatgcggttgtccagaatgaccacggtgatggtctcgcggttatataccgcgtcgaccagcgaggtaatgccgctgtggataaaggtgctgtcgcccagcaccgccacggtgccgcgcgagaaatccttgccctgcgcacgttccgcaccgcctgccatgccgatgctcgcacccatgcacagacaggcatccatggcgctcagcggcggcagcgcggccagcgtgtagcagccgatgtcgcccatcacgcgcatacccagcttattgagcacatagaacacgccgcgatgcgggcagccgggacacagcaccggcggccttgccgggatggatgcgtcctcgcccttgggcatttccgcacccaaaaggacgctgcgcagcttctccacactcagctcgccctgaatgccggtgaggtttttgccctcgcaggggatgcccgcagccagaacctcgcgctcgatcagcccttccagctcctccaccacgatcaggcggtccaccttctgggaaaattcgcggatcagcttcatgggcaggggatagaccatgcccaacttgagggtgctggcatggggcatggcatcgcgcacatattcgtagcacacgccgctggtgatgatgccaatggacgtatcccgcattttgatgacgttgatgggcagacggttggctgcctcggccaggaacgcctcgcgcgcctccaccttgaggtggcgcttgcgcgccatgcccggcatcatcacgtatttcatggcgtccttctggtagggacgcaggggcacatccgcacgctccccgatggccaccacgctgcgggcatgcgccacgcgggtggtcaggcgcagaaacaccggggtgtccagctcctcgctcatagtgaaagccagacgggtgaaggcatggcactcgcggctgtccgacggctccagcatggggatgtgggccgcgcgggcatagtagcggctgtcctgctcgttctggctggaatgcatggccgggtcatcggcacacaccaccaccagacccgcgtttacgcccgtataggctgcggtgaagatggggtccgcggccacattcacacccacatgcttcatgcaggtcatggcacgcgcgcccgccatggccgcgccgaaagccacttccgtagctactttttcattgggcgcccactggcagtccacttccggaaagcgcgccacgcattcggtaatttcagtgctgggggtgccggggtagctggccaccacacgcaggcccgcttcccacgcgccctgcgccacggcctcattgcccagcatcagcctttcttccacgggatcggccacgaatacgtcatccgtgagcattttctcatccattgtgtcgttcctcctcagcgcaggtccgtgacccgctttgcctttccttcaaaccgtttcagggtgttgggtgacaccagcgtcacctcgacatccaattgcagcacggttctcagctgcgcgcgaatgcggtcgcgcaccttttccagctcgctgtatttttcaagcagcgaggcatccaccagctccaccttgacctgcaaatggtcggtgaaatgctcgcgggtgaccacgatttcgtaatgcggaccgatacccggctgccccaccagcacgctttcgatctgcgaggggaagacattcaccccgcggatgatgagcatgtcgtcgctgcggcccttgatcttctccatgcgaagctgggtacggccgcaggcgcagggctcctcgatgaggcgggtaatgtcgcgcgtacggtagcgaagggcgggctgcgcctccttggcaagcgtggtgagcaccagctcgccctgctcgcccatgggcagcacctcgccggtatccgggtcgatgatctcggccaggaagcagtcctcgttgatgtgcatgccgcacttgtattcgcactcgccgctcacgccaggccccatcacctcggtcagaccatagttttcggtggccagaatgccatagcggcgctccagctccgcgcgcatctcctcggtgctggcctccgcgccgaacaggcccacgcgcaggcggatgtccttaagtgcgtccatgcgctcggcgacctcggccatatacagcgcatagctgggcgtggcgatgagcacggtggagccgaaatcgcgcatgatgttgatctgacgctcggtattgccgctagagatgggaatgatggcgcacccgattttctccagtccgccgtgcagcccgaacgcgcctgtaaacagggtgtatccgaagctgacctgagcgatatcgtccgccgtggccccgcctgcggtagcgatgcgcgcgatgcattccgcccaggtatccaggtcccgccgggtgtacccggcggtgatgggctggccggtggtgccgctggatgcgtggatacgcaccacctcgcgcatgggcacggccagcagcttgaaggggtactgctcccgcagctcggttttggttgtcagggggatttttgaaatgtccttcagtgtgcgaatatccgatggctttacgcccgccttgaccatcttgtcatgatacatgggcacatggtcgtaggcatgctgtacgctccatttcaggcgttccagctggattgcttcgatttcgcttctctttgcgcattcgatcttcgggttccagaccgccatggcaaaacgctccttccgtactgcctttttccgcgccgccgccccttcctgcttggctacctcgctacgcttgcggagcggcgcgccgttgttttatgaaatagtatatcacaagcgtgacggaaagccaagacccgccagacgcgttgatttgctttagcagattctgcggtcccaccgtggtgcgcccggtgttctccacgcatgcttttgcccgttcggggcatactagccatcacttccataagacgaagggatgcgtgtgtatgtcgatcggaatggtccttttgaccgttgtggcggtcctggtgtttttcggcgtggcccagcgcgtgctggacaagctgtatttgagcgaccgtgcggcgctgatcctgattgcgttgatgttctttggaacgctcattcccaatgtcacgattggcaatgtgtccatcagcatcggtggggccgtgattcccttcggtgtgtgcgtttacctgctggcgcgggcgggcactgccaaggaacgcgtgcgcgccatactgggatcgctgattacggcggggatcatctatgcgctttcccactttctgcccgacgagccggaacgcatgctgattgatcccatgtacctctacggactcgcggggggcgtggtggcctatgtgctgggccggtcgcggcggggcgctttcttctgcggcgtggtgggcgtgatgctggcggacattgccgtagcggtggtcaactggtcccgaggcatggaccagcctctcgtgctgggcggcgcgggcgtgtttgacgccatgatcatcagcggtattctgggcgtgctgctttcggagctcgtgggcgaggtgctggagcgcatggcgcgcggtacccagcgtcccagggagagcgccattgagaatcctgtgcgtcaaaaggagaaatgagccatgaaaaaaacgctgttttctgcgcttgccgccctagccctgtgcctgattgccctgcccgccactgcggaggaagacgtctatactttgctggacgaaaacggaaccgccctgacccagtatctgggagaatgcgaagccggcgacgagtacatcagcggggacaacctgcactaccgcgtggtttccgtggacgaggcggccaaaacggcgcggctggagctattgggcgaggccgacatgccggatgtgagctggctggaaatggaacagagccttgctgtaagcgccacaaacaacaggaagatcgccctctactgcactcacagcgacgaaagctacatcgagggcgacggcaccgaaagcgacgaggaacgcggcggcatctacgacgtggcggcggcgttcggcgacgcgctggaggaacggggggtatccgtcaccttgagcgacgccacccaccatccgcatgacgcgggcgcttaccgccgcagccgccagaccgccgtggaactgctcaaggatggacccagcgccatcttcgacatccaccgcgacggcattcccgatccggacgaatatgcaaccaccatcggcaacgaaaagatgagcaaggtgcgcctgctggtgggcaagggcaatcagaacaaggatgcgaacctcagctttgccaagcagatcaaggccgtagccgacaagatgtaccccggcctcatcaaggatatctatatgggcaagggggcctataaccaggacctggctccacgcagcgtgcttttggagtttggcacacacacgttgcccaaggagcgcgtgctcgcctccaccggtcccatgagcgaagtggtctacaaggcgctctacggcggggtaaccgggtcggccggcgccagcgacgcgtcccgtgcgcccgcttccgaaatggcggagggcgcagatcaggacaataccggcgcgggatgggctgtatggctggtcgtggcgctggtggtggggctgggagtgtttgcgtttctctccaccggcggccggggcggcatgagcaagtggggccggagcctcagcgaaatgaccggcggtctgttcggcaaaaagccgccccgcgagtgagccccgcggcatatccgtttttggctttccttcttttctcaaatgtgctataatggtatcaggcaaagttttgcactgtttgagcggaggattgcgaccgtgtttacaccacgttaccacaacgagcagacggacctgctgatggacgcgctgcttcagctgaaaacctcagaagaggcctaccgttttctggaggatgtcctgacggtgcaggagctcaaaagcatcacccagcggctggaggtggccgtgatgctgcgccggaaggtaacctatcaggaaatcgcccaccagaccggcgcgtccaccgccaccatcagccgcgtcaaccgggccctgcaatacggggcggacggctacaccttggtgctggaccggcttgaagcacaacagaagtgaagattgaggatagcatagcatgaatttggaaggattgaaccgggagcagcgccaggccgcagaaaccctggaagggccggtgcttattctggcaggcgcgggcagcggcaaaacacgcgcgctcacttatcgcattgccaatctgatcgaccacggcgtggcgccgtggaatattctggccattacctttaccaacaaggccgccaaagagatgcgtcagcgcgtgagcgccctggtgggtgaacgcggcggcgaggtatgggtcagcaccttccatgccatgtgcgcccgcattttgcggcgggacatcgaaaaactgggctacacccgctcctttaccatctacgacgatgacgatcagtccagcgtgctcaaggagttgttcaagcagttcggtatcgacgataaatccctgaccttgcgcgaggtcaaggccaaaatcagcgacgccaaggaccatctgctcagtcccgacgaatggttccaggcctccgctaaggattttcgaagccagcagattcatgacctttatgatgcctacgagcgccggctgcgccatggcaacgccctggattttgacgatttgctggttcggacgctggagctgttcgccgaccatccgcccgtgctggagagttaccgcgagcgctttcgctatgtgcacgtggacgaataccaggataccaactttgcccagtattcgctggtaaagctccttacgcagaagagccgcaacctttgcgtcgtgggcgatgacgatcagagcatctacggctggcgcggtgcggatatccgcaacattctcgattttgaaaaggattttcccgacgccgccgtcatcaagctggagcagaactaccgcagcaccgccaacatccttgatgcggcgaatcaggtaatcgcccacaacgaaggccgcatggaaaaggccctgtggaccgagcagcccgccggcgaacccatcaagctcttctgcgccggcgacgagcgggaagaggccgcctggatatgcgaccgcatgcagcagatgcagcttgccggcaagagctatggcgacatggctgtgctctaccgttccaacgcgcaaagccgcgtgttggaggaaatgctggtgcgcgcgggtatcccctaccgcatctacggcgggctgcgcttctatgaccgtaaggaggtcaaggacatcgtggcctacctgcgctgcattgtcaatcctgccgacgacgtaagcctgcgccgcatcatcaatcagcccaagcgctccattggcgacagcaccatcaccgagctggtgcgctacgccgccgaaaaggaaatgcccctttacagcgccctgatggacgtgcccgaaacgctttcggcacgcccgcgcaagtgcgtcagcgagtttggcgatctgatgaatgaattggtcatggcgcgcgaagatatgggcgtgagcgattttgtcaagtacgtgatagaccgcaccgggctcaaggcacagtatgagcgcgacctgtccgacgaaggcaaaaaccgtctggaaaacatcgaggagttcctgggtgcggtcagcgaatacgaacagggcgccgagacccccacgctggaagattatctggaaaacgtagcgctggtaagcgatctggacggtgcggagcttgggggcaaggtcgtcacgctgatgaccgtgcacagcgccaaggggctggaattccccatcgtattcatcgccggactggaggaaggcgtatttcccaccggcagaagcctgcaggacgaaaagcgcatggaggaagagcgccgtctgtgctacgtggccatcacccgcgcgcaacagcagcttttcctcagctacgccgcccagcgcatgctctataatcaggtcaattacaacacgcccagccgcttcctcaaggagattcccaagcgtttgatcgacgatcagtggatcagcaagcgcgagcgcaacttccccggcgtcatggaaagctatcagcatcccacgcccaagcgcacgccgcgctacggcggcgaatccggacgaggactgggagcaggccgcagcgcgctgggcattccgggtgtgcaaaagggctttaccccatccgcggcctccagcgtgcccgccagtgccgtagccgcattgttcaaaaccggcgaccgtgtgatgcaccgcaaatttggcgaaggaaacgtgctggaaattcgcggaagcggcagcgatgcgcgcattgtgatcggcttcgcagcctatggacagaaggaatttgtgctctccatcgccccgattgtgaaggtgaacgactgatatgcagacctcacgcatgcgcgagctggtcgaccagctcaaccgggcctccgtgctgtattacacacagggcaccagccccatgagcgacgcggaatgggaccagaaatacaacgaactgagcagactggaaaaggagtcgggcatcgttttgcccgactcccctactgtgcgcgtcggcgcggagccactcagttccttcgcctctcacaggcatatcaaccgcctgtggagcatggacaaggttcagagcaaggaagagc

SEQ ID NO: 3273 - DNA, 31417 bp, Unknown
  16S sequences of unknown bacteria
ccaagaataaagagctatctgatttctgttagagaagtcagatagctctttttgtctggtttcttaacttttacccttcaactttgcagtttcccgcataggtgaacgcaatgtaggacttaccgcgattgagctgcaactcgttgccgttcgcgtcaaagaacttcagcgggtcatacataccggccttagaccaagtaatcggcaccattttgccctcggaaatataatagccctttgcattttcgccgccttcccagttgataagcttgtggccatcaacatcgttcggacgcagggaaatgtccgcttccaaaacgataacattctcaaattgcagctgctcgtttgttttgcagtccatatgcggcttattctggtagtttttcatgtacacatgcttgtctgcatcatagctgaatgtactgtaattcgcgccaaagtcaacacggatattttttgcatcctctccgctcggagcagcatttttgtccatctcaacgaacttaaacgctgtgcccatcttatcttccttcaaatcggtacgaacattgctatcttccagcatttccggcacctttgtaccgtagaacacaccggtatgctcccaggcgtagcccgcattgatacgatccttatcacggccaaaatacttgcctgtaccgtaatagtctgcatcgaaatgatcaatctccatgctattgattgtctccgtcgcaatggtcgggtcaattccccaatgcacgtaaaccgcatcaaacccgaccgccaaaatcggataatagtatcggcagctgcgcactgaacacacgtccggcacctgcgtgtagtcgccgtacaccgccatcaaacgggtcagatcgtattccaccggtaactcaaaaataaggtctgcggcggagatgccatattgcggcagggcagcgtctacgttattcaccattacggcgacaggacgtttgccgatggcgccgtccgtcaaggtcggcaggccggtgagcaggttcacattcgccggttccatggaaggtgcttccgtgggttctgcggcgctctctgctgcggaagattccgcctctgccgtcggagcagccgttgcggtcgcttccggctcgcttgcggcgctctcctccgtcggttttgatccgcagcccgcgaacacagtcaggctgagcagcaaggcgctgcacaacgcaaatattctctttttcaattttatcaacctccatttgttgatttctgctatttattatagtccgaaacgcaccgaattgcaacaaaaaatgcacgaaaattgtccggcagcgccaaaatgccgataccaagctgcacaacgagcgcaaagttgaaaatgtgaagagcttacatagcaaaatatcccccgctctgtacagaacggaggatactttaaactttcatgtgtttagtcttcaaacaggtctttgatcttgccgaagaagcttttacgcttctgatagttcttttcatcggcattctgttcaaattcctgcaaaagctctttttggcgcttgctcaggtttttcggcacttcaacggtcacgcgcacgtactggtcaccgcgtcctctgccgttgatgctctgaatacccttgcccttgagcttgaacacgtcgcccggctgcgtgccctcgtgtacggtgtagctcaccttaccgtcgagcgtcggcaccgtgacttccgcgccgagtgcagcctgcgtgaacgtgattggcatatcgcaccaaacgtcgttgccgcggcgcgtgaaaatggcatgcggacgaactgtaatgtatacgtgcaggtcgccgttcggaccgccgttggagccggcattgcccttgccgccgacattcagaatctgatcgtcatcgatacccgccggaacggaaatctcgatcgtcttctggcggcgaatcttacccttgccgtcgcacgttttgcacggggtatcgacaatctggcctctgccgtggcagcggtcgcacgtgcttgtggactgcaccacgccgaacggtgtgcgctggttgatgcgcacctggccggagccgccgcagttcgggcaagtcttggggcttgtgcccttggccgcgccggagccgttgcaatccgggcaattttcgatctggtggtaggtcacatttttcttgcagccctttgccgcttcctcaaacgaaagggtgacgcttgcctctacgtcactgccgcggcgcggtgcgttcgggttcgcacggcgtccgccgcccccgaaaccgccgccgaagaagctgtcgaaaatatcggtaaaatcaaaaccgcctgcgccgccggcatacggatttccgccgcccgcgccgccgccgaagttcgggtctacgcccgcaaagccgaactggtcgtagcgcgccttcttgtctttatcagaaagtacctcatacgcttcgttgacttccttaaacttcgcttccgcatttttatctccgggattcaagtccgggtggtattgctttgcaagcttgcggtatgcctttttaatcacatcgtctgatgcgctcttatcgaccccaagcacttcataataatctcttttgttgtccgccatccgctgtcatctcctcgcaaactccaaaaggcaagggacgcctttcggctccccttgcgcttttgaacgtgtcatttatagaacttaatcgacgtccttgtagtctgcgtcgtagacgtcaccgttcgggttctggccgccctgctgcgggtttgcgcccggggctgcctgctcgccctgctgcggtgcacttgccttatacagcttctcgctgaccgcgtaaattgccttctgcagctcatccatgccggacttgatctcctcgaccgtgccgttctgcatggtggtcttcagagctgcaaccttgttgttcacttcggtcttgtccgcctcttccagcttgtcgccactctcgtttacgagcttctccgcttggtagcagaggttctctgcgttgttcttcgtctcaacctcttcacggcgcttcttgtcttcctctgcgaactgctcagccgccttaacagccttatcgatgtcttccttgctcatgttggaggaagaagaaatcgtgatgtgctgttccttaccggtgccgagatccttagcggaaacatttacgatgccgtttgcgtcgatgtcaaatgtaacttcaatctgggggatgccgcgcggagccggagcgataccgtcaagcttaaagagacccaactgcttgttatcgcgtgcaaattcacgctcgccctgcagaacgttgacttcaacctgcgtctgaccatcagccgccgtggagaaaatctggctcttcttggtcgggatcgtggtgtttctgtcgataatcttcgtcatcacgccgcccatggtctcaacaccgagagaaagcggagtaacatcaagcaacagcaagccctgaacttcgccgccgagaacgcctgcctgaagtgcggcgccgattgcaacgcattcgtccgggttgatgcccttgaacggctctttgccgatgagcttcttaactgcttcctgaacagccggaattctggaggaaccgccgaccatgagaaccttgttgatctcaccgatagagaggccggagtcgctcagtgcctgacgaaccgggcccatggtcttctcaacgaggtctgcggtgagctcattgaactttgctctggagagcgtgaggtcaaggtgcttcgggccggtcgcatccgccgtgatgaacggcaggttgatggaagcgctcgtcatgccggaaagctcaatttttgccttctctgccgcttccttaatacgctgcatagccatcttatcgccggaaaggtcgatgccatcggaaaccttgaagctgttgatgatccaatccatgacgcgcttatcaaagtcgtcgccgccaaggcggttattgccggccgtagccagaacctcctgcacgccgtcgcccatctcaatgatggaaacatcgaacgtaccgccgccgaggtcataaaccatgatcttctggtcgtcttccttatcgataccgtaggacagtgctgctgccgtcggctcgttgatgatacgctttacatcgaggcccgcgatcttgcccgcgtccttcgttgcctgacgctgtgcgtccgtgaagtacgccggaacggtgataactgcgctcgtaacgctctcgccgaggtaagcttccgcgtcgcccttcagcttctggaggatcattgcggagatttcctgcggggtgtagctcttaccgtcgatcgtcaccttgtggtctgtgcccatctctctcttaatagaggagatcgtgcggtccgggttcgtaatcgcctgacgctttgcgacctgaccgaccatgcgctcgcctgtcttggagaatgccacgacagacggggtggttcttgcgccttctgcgtttgcgataacgaccggctcgccgccttcaataaccgctacgcaagagtttgttgtaccaaggtcaataccaattgtctttgccatatcaattaccttcctttaactcaaatgagtgtgtgaattctgaattactatataaatggatatttgctgatttagtttgctacctgtaccatggcgtgtcttacgaccttatcgcccagcatgtagcccttctgaaacaccgccgaaatgacgttttcgccaagctcgtcgctttcaatgtgcgccaccgcgttgtgcagcgccgggtcaaacggctcgccaacctgaccgacttctcggatgccaagcttttcaaagctcgccttaaattggcttgcaatcatctcaacgccttttttcatatcctctgcggagacattttcctgtgccagtgcacggtcgatattatcggccaccggcaaaatcgcgttgattgtatcggaaacggcgttattgtaaacggcgttcttttcatttgcggaacgcttgcggaagttatcgtactcggcaagcacgcgcaggtgctgctgcttgtggctgtcgaactccgcctgcaagcggtcgtaatcctctttcggaatcttctcgctcttctttttctttttctccttttccgcagcctttgcagattcctctgccggctcggtattcgcttcctgctcgggttcctgaacaggcttcttttcctctgccatctggcaacgctcctttctctattcttcccgcatgatgcgcgtaagcatttcgcctacacgatctgcgacatatgctgtttgtgccgcgacgtgtgcgtactgcatccgcatcgggccaatcacggcgaccgcgccggcatctctgccgttcacgctgtaccgtgagcaaatgaccgacgattccgccaaggcgttctgcccggtctctgtgccgatcttgatctgcgtgcggttctgcttgcctgcgagaagttctgtcaaaagctcccgtctttccagaatatccatcacccggcgtgcaccaccaagcttgtattccgggtagaacagcaggttcatctgaccgcttacggaaatttccgtctgcatcgtttcaagcgccacttccaaaagcgccgccagcgccggcgacatcaaaattgccatatcccccagcgagatcgcaaggttttgcacaaatgcccggttgatctccgccacgtcgcgccctgtcacgcgctcgttgagcacgcggaagaaaatgcgcataatctcgtttgaaagatcaaagtcgcagtgaaacaccttgtttttcatggtacctgcgctgctcatcataatgagcattgcggtgcggcggctcgtctgcacgaactgcaccgccttgatctttgcatccgcgccgctcggcgtggtgctcaacgcaaggtaccgtgtagaagccgccagcgttttcgccgcgccacgcaataatcgttccgggtcaaacgcgctttttgcaagcatcgcgtctatcgtaagcttttcggcttccgttaacgtttccggctgcatcagcgcatctacgaactcgcggtagccctcctgtgaaggcacacgccccgcggaggtgtgcggctgttccaaaagccccagctccgtaagctctgccatctcgttgcgcaccgttgcggaagaaacacctgctttttccgcaatggacttggagcccaccggctcgcccgtgcgaatgtatccgtctacgatcgaggcaagtatattttgtttgcgttttgtcagttccatacttgcacctctcaggttttagcactctatgtccccgagtgctaacccttgtctatactatactgcaaaggtcaggaaatgtcaacaccaaaatttgtaaatactttgtgaatgtgcgaatttttcccggtcggcatccgttttgaagcttcttttagcatttccggctccacagtgccaaattcctgtttatatataaagataccgaaaaaaagcgtcttcgccataacttcactttttgtaatagaatttcaggattttttgtgcaaattattgacattttataaaaattgtattaaactgatagctcgtgtttcagtttctgtgttcgctttagcccgaaagtccgtaccgttaacggaaaagaggagtataccatgattcaggcagaacatttacaaaagaccttccgcgtgcgaaaacgaaacgcaggctttaaaaacgccgcaaaagcatttttcagccgcgagtacgaagaaattcacgccctaaacgatgtttcgttccgtattgaagacggcgaggccgtgggctatattggcccgaacggcgccggaaaaagcagcaccatcaaaattctctccggcattttaacgccggacagcggcacctgcgtcatcgacgggcgcgtgccgtggaaagaccgccgcgcgcatgtttcgcagatcggcgttgtgttcgggcagcgcagtcaattatggtgggacgtgcccgtcattgattcattcgagcttatccgcgacatttacgccgtgaccgaagatgtttacaagcgaaatttacgggatttaaccgaccttctgaatttatcggagatcttaaagaccccggcgcgcagtctgtcgctcgggcagcgtatgcggtgcgagatcgccgcctccctgctgcacgacccgcgcatcttgtttttggatgaacctaccatcgggctcgacgcggtatcgaagatcgccgttcgcgaattcatgcttgatatgaacaagcgccgcggcaccacggtcattttaacgacgcatgacatgcaggacgtggaagccttggcgcagcgtgtcctgctcatcggcaaagggcgcattttattagacggcacactcgacgatattcggcacggcggcagcgggcagattgacgaaacgctcgcggcgctctacaaacagtttgatatttgaggtgcgccgtgaaacttaaaaaatacatttcgtttttccgtctgcgctgtgtgacgggcttgcagtaccgcgcagcggcattggcaggcatctccacgcaatttgcgtggggctttttgatcatcttcgcctaccacgcgttttaccgcagtgaccccaccgcttttccgatgaccttgcaggcgaccgtcaactacacatggatacagcaggcgtttttagctatgttcgcctcgtgggtcttggacggcgacattttggaggaaatcacctccggcagcatctcgtattcgctgtgccgccccgtcgacctctacgccatgtggtacacgaaatctctctccggtcgtatttccaaggttgcattgcgtgccgtgccaatcttagtcgttgcggcgcttctgcccgcaggctataacttgaccgcgccgacagatttacccacattctttctatttttgctcaccatggtgctgggcgcattgaacagcacggcgttcacgctgctcatctatgtcctcaccatgtataccctttcttccaccgggttgcgctccctgctgctcacactggcagattttctctgcggcggcgtagtaccgctgccgttcttcccgcctacgctgcgcagaatctgcgagctgacccccttcgctgccacaagtaacgtgccgtaccgcgtgtacagcggcgacattgccggcacgaacgccgctttcgccgtaggcttacaaatcttctggctgctcgtcctggtgcttggcggtcacaccctcatgaaaaatgcgctgaagcgggtagtgattcagggaggataaacggaacgacaagtcgttccgctgccctgcaaatcgttcgtgttttgcagtatacaaagaaaggagtcatctatgaaactatactttgaatttctgtctatccacatcaagaaagcaatgcagtacaaggcttcgttcttgctttccgtactggcgcagctatttataccgctcacatgcttttggggcgtgcagttcatgttcatgcgatttaagcaggtggacggcttcacgtacaccgaggtttcgctctgctacgccatcgtactgttatcattctcgctcgcggagctgttcttccgtgggtttgatacgtttaaccgcatgatcgggaacggcgagttcgaccgcgttctggtgcgcccgcgcaacgaggttttcctcgtcctgtgcagccgcatggatttagagcgcttcggcaagggcattatggcgattttcctgctgatctgggcgcttcaaaactgcccaatcgattggtgcgccgcgcgcattatgacgctcattttcatgattttaggcggcatcgtgctttttgcaggcgtgtatttgatcttcgccgggctatgctttttcacattagagggactcgagttcatcaatattttaacagacggtatgcgcgagcacgggcgctacccgctttccatctacggcaaaggcgtactgacgttctgcacctacatcgtgccctacgcgctcgtgcagtattatccgctgatgtacctcatcggccgccacaacgatgcccgcgcgatgcttctgcccatcatcgcctgcgtgtttatcgtgccgtgctatctcttctggaaattcggcgtgcgccattaccgctccaccgggtcgtaacaacattatgaaatgaggttttcccatgccctttgattttaagaaagaatacaaagaattctacatgccgaaaaacaagccggagatcgtcactgtgccgcctgcaaactacattgcagtgcgcggcaccggcgacccaaacgagccggacggcgcgtatcagcaggccatcagcgttttgtacgcgatcgcctacacgcttaaaatgagctacaagaccgaccaccgcatcgagggctttttcgagtatgtcgtgccgccgcttgagggcttttggtggcaggagaatacggacagcatcgattatgccgataaatctgctttccactgggtctccgtcatccgcctgccggatttcatcacgccggatgatttcgcctgggccgtgcagaccaccgaaaagaagaaaaagcttgattgcagcaaagcggagtttttgacgatcgacgagggcctttgcgtgcagatcatgcaccacggcgcgtttgacgatgagcccgtatctgtggcgctgatggacacgtttctcgccgaaaacggctatataaacgacttcaccgccgcgcgcctgcaccacgagatctacctcagcaatgcccgtaaggtcgcgccggaaaagtggaaaacggtcattcgccatcccatcaaagaagcgtaaaggagcacaccccatgaaaaaactcatcaccctgcgcggcaacagtggcagcggcaaaacgaccatcgcaagagctttacaggaaaagtttggcaaaaacaccatgctactgtcccaagatgtcatccgccgcgacatcttaaagacgaacgacggcgcgggcacccgcgcaaacgacgtgctcatcatgctgcttgagtacggccacgcgcacaacgagctcgtcattttagaaggcattttgaacagccgatggtacaccccgcttttcgatgccgcaaaagcgctctacggcgaaaacatctgcgcgtactattttgacctcccgtttgaggagacgctccgccgccaccaaacgaaggacaagcgcacggagttcggcgaaaaggaaatgcgcagatggtggaacgaaaaggactacgcccccgcattaaacgagcagaccctcacgcccgacatgatgcaggacgagatcatcgaccgcatctgcgctgatttagagcgcctcgatacataaaccatccatataaattcggaaagagcgaggttctccccgctcttttttgtatattgtgttatattctgcccgaatttctatcgatgcaaaaataattttatagcattttgttcgtatctatgataaaatagacacagtgataatttttgtaaagcttagaggggcacaatggacaaagaggagtgcataattttcctcccctttacaaaccgacatcacggatttaacagggcggcgctacaatgtaagaccgaaagcacgcacctgattttaaaaagaaagtaaggtcttcacatgaaatcaatttttcacgcactcaaccggctcaaggtcttccgcgggctgacggaacaggaattcgcatgggtgctctacgacgtgggcaactccgcgttcaccatgctctcttgctcgctcatccctatctggttcaagagcctcgccatcggcactgcgccgggacagatcaactcgcatcaggcaacggcgtattattccatcgccgtggcggtcgtcaccgttatcgtggcgcttttagggccgatcttcggcgtgctcgccgaccacaaagataagaaaaaggtgctgttcaccaccgcggcagcgctcggcattttcggctgcattttaaacggcttcatcaccggctggctgctgttcctcatcctttttgtgttcacgaagatttgttacagcgcgtcgctgaccatctatgattccatgctgaacgacatcaccagcgaagaacgcatggacgaggtttcgtcctacggctttgcatggggatacatcggctcgtgcatcccgttcctcatcgcgctcatcgcctatgtgcttgggcccgatatggtcggcgtgctgccggatatgctctctaaaggcatcggcttcacggtgactgccgtgtggtggctgcttgtcaccattccgctcattcgcggctttaagcagcgcaactatgtggaaaccgaggggcatgatatccgcaaggcgttcgcggaaatcttccacaccctcaaaaacatcgcgacgcacgacaaaaaggtgctgttcttcctcatcgcattcttcctgtacatagacggcgtgggcaccatcatcgataacgccatcaatatcggcacagacctgaacctcaacacggtcggtcaggtcgtcttcctgctcgcaacgcaggtcgttgcgttcggcggctcgctcgtcttcgcaaagctctcgaaaaaatacaacaccgtcacgctcattctcgtttgtattgcgggctatttcggcatcgcgctgtacgcgctcatgctcagcagtctcctgcacttcgcgattctggcatttttcatcggctgcttccagggctccatccagtcgctctcgcgctcgtattactccaagatcatcccggcggaaaactccggcgaatacttcggtatctacgatattttctcaaaaggcgcgtccttcctcggctctgcggtcatcgcagccgtaaagcttgcaggcggcaccatcaacgtggcggtggcatgtctcgcagtgttctttgcgctcggcttcctcttcctgcgcattgcagataagcaaaaagccattcggtaaggaagcaccgggctttacaccgttcgctcttcacactcgtaaaatatcgctgtaaatcttaataggacatgcaaaaaggaacggcgtacaaaccgttcctttttcctttactcttcataaaccggctcaaaatcatccgttccgtgcccgcacaacggacatgcgtagtcctccggcagcgcgctgccctcatacacatacccgcaaattttgcaccgccagccgacgatcttctgctctcgctcgaccttctccgacttcggcttcagcttattctggtaatccgcataggtcagcggagcgcggtcgctgcacacctcggcttccgtcacctctgcaatgaacagcgtatgcgtgccaaggtcaacactgtgcgtcaccttgccgctgaaccgcgcgcaggtgctccagttcagatacggtacgccactttcgtctgtcggcatcggcaggctgtccagcttatcgacgtcgcgaccgctctgcataccgaagtgcttaatggtctcaaacgagcagctgtcatccaacgcgctcaacgtaaaccgcccgctttccttaataagcgcgcaggtgtaattcgtattcagcacggaaaccgccacgcgcacagggctccccgcgacctgcacgccggtattcacaatgcaggcgttcgccttttcctccgcttttgccgccaacaaaaacacgccgtatgtcaaattataaaacgctttgttattcattttgctcctcccattaaaataataataattattgtttttataataacggatagaaagcaaaaagtcaagcgttattttcggtgtatgcaaaaaggaacggtgtacaaaccgttccttttttagctttatattctatttctaaaggctggcgaaaacttttagccacgcttcccggcagaacggtgttacttcacgctttccgaatcgctcacatacggtgcggcatattctctttcgagcctgcggaacattctcacaagcacgacaacggcaatggtaccgaggatcagctctgcgacgaactgcgcatacgcgaggccgtacagcgggaacagccaattcagcacaaacaacgcgggaatctccagcacgatcttgcgcacaacagcgaatatgaacgatttcatacccataccgcacgactggaacacgcccagcgcgaggaaatcgatgcacaagaatggcagcgcaaagcagaagccacgcaggaacgccgcgccgtacgcgacgatgctctcgttcttcatgaacatggagataatcggctccgccgcaaccacgaacgtcagcatcacggccagaataaagccaagcgaaattttcgccgtaaatgtaaacgtttttttcatgcgcttgatattgccgctcgcgtagttataactgatcagcggcataatgccctgcgaaaagcccattgcaatctggaacggcaccatgttgacgcgctgcgcgatgcccatggccgccaccgggtcagagccatacgcggacgtaaagttgttgagaatggtcatgccggtcacattcaaaaggttctggatggaagccgggatgcccacgccgcacacgcccttgacaatctgtttcgatgggcggaacatggagggcttgatgcacacgtacgtcttgccgcgcttcacgaacagcagcacgaagaagtagagacacgccacggtgttggaaaggcaggtcgcgcagcctgcgcccgctgcgccgaggttcaggccccacggcagaatgaaaatcgggtccagcacaatgttcagcaggcagccgcacatggtgccgatgctcgcgtgcagcgaagagccctccgcgcgcacaaggtacgccagcacgacattcaaaatggacggcgcggagccgagcagcacagtccagaacaaataatccgccgttgcctgcatcgtttcggcattcgcgccgagcatcaccaagatcggcgactgcaatacgccgtacagcaaagaaaacagcagactgcaaatcaaagacgcgtaaaatccgaacgccgagctgcggtacacggtatcgtagtctttacgtccgagtgcgcggctcatcatgctggagctgccgatgccgaacaggttgttgacggcattaaacgccagcagaagcggtgccgccagcgtaacagcggcgttctgcaccgggtcgttcatcatgccgacaaagaacgtatcggcaaggctgtaaatgaccatcacaagcgagctgatgaccgatggcaccgaaagcgttatgaccgccttcgggatcggcatcgattcaaatagctctgttttggaattatccatttctccctatcctttccgttcttatcacgcaaggctgtccaaaagcagcttgcagcagccgtaaatgccggcgtcgttgccgagcacggccaagttgaaccgaacatcggtgctcgggtaaaatacatatttcaagaagcctttcttcgcgccttctacgagcacttcgcccgctttcgagacaccgccgccgatgacgacgacctcggggtctgccaccgtgcacacggcagagatggcgtagccgaacgcatcgtacacattctctaagattgcgtttgcagcgccgtctccgtttttagcggcatcgaacacgtcttttgttgtgagcttcttgacactccgcaaaacgcttgctccctcgtgttcggcaaggtattttcgtgccagtctcgcaatgcctgaggccgaaacgtactgctgcacgcagccgcggcggccgcacgcgcacgtctccgtctccgcggggttgatcgtcatgtggccgaactcacccgccgcgccgtttgcgcctgccaccatgcgtccatccgaaatgaccgcgccgccgacacccgtgccgagcgtgatgaataccacgttctcgctgccacggccgccgcctttccaggcttcacccatcgccgcagcattcgcgtcgttcacgaccacaaccggaagccctacggtctcttccagcgccgtgcgcacatcaaatacgccccagccgaggttcacgcagcggtgcaccacaccgtccgccgtcaccggcccggggatgcccgcgcccacgcccaaaataccgtctgcgggaatgttgtgcttttctctgcacttttgaatttccgccgcaatatcacgcagcaccgccgtgccgtcgccctcaatcacggtcggaatctcccacttttcaagcaaagtgccgtcttcctcaaataaaccaagcttcaccgtcgtgccgccgatgtcagcgccgatgacatactttttgttttccatttttataactcctctccgcgcgcggtttcccacgcatttaacacgcgtccgtataaattccctttcggtctaaaccgtaaattgcttagtaatatagtataccatatttcgtcgccgattgcaaaggaaactatggaaaactccgtctttttgcaaccgccttgcaaacaggggaaatttgtggtattctttaacgcgtaacccaaacggccgcctgccgatgtaccgccattacgcggtcgctgtgaccaaatagcccgggaatcccccggcggcgcagcgttcttccgaaaacggacagaggcagacggcaacatagtcaatatagattctttctcgcgtattctgcgcagcgcatgtttgcgtaaaacccaggagcgccggagaacctttcgcgctccgtaaaaagaaaggattgaacaaaaatggagggaacttcttccaaaaaagaaagcaaagtcaaggtgtatctgcaccgctactttatcgatgccatgagcgccatggcacaggggctttttgcttccctgctcatcggcaccatcatttccacgctcggcacacagcttaacattccgctgctcgatgagatcggcgggtatgcaaagtccgcagccggtcccgctatggcggtcgccatcggctacgcgctgcaggcgcccccgctcgtactgttctcgctcgtcgcagtcggcggcgcggcaaacacgctcggcggcgcaggcggtcctctcgcggtgctcgtgctcgccatcatcgcggcagagctcggtaagctcgtcagcaaaaagacgaaggtagacatcatcgtcacgccgctcgtcactattttttcgggctgcggccttgcgtacttattcgcgccgtacatcggcacggcggcttccagcgtgggcaaccttatcatgtgggcaaccacccagcagccgttcctcatgggcattctcgtttccgtcatcgtcggcgttgcattgacgctgccaatctccagcgcggccatctgcgcggcgctcggtttaacgggccttgcgggcggcgcggccgttgcaggctgctgtgcgcagatgatcggctttgcggtcatcagcttccgcgataacggctggggcggcttctttgcgcagggcatcggcacttccatgctgcaggtgccgaacatcatcaagaacccgcgcatctggcttgcgcctacgcttgcttccgctgtgacgggccccatcgcgacatgcattttcggcatgcagatgaacggcgcaccgatctccagcggcatgggtacctgcggccttgtggggcagatcggcgtttataccggctggctgaacgacatcgctgccggtgccaaaacagccgtcaccgctatggactggctgggccttgtgctcatctgcttcgtgctcccggctgtgctttcttttgtctttgacctcatcttccgcaagatcggctgggtcaaggacggcgacatgaagatcgacgcataaaaatctccgttttccggcaaacgcctaaggctgaaacgctttaggcgtttttcattgtgctaagtgcggtactgcacgacgtttttcttgtacggaattacccttgtttttccgtcctttcgcccgtataatcaaatagaaaagtctattctcgatttgggaggtacaaaatgcagtttcaatatcttggcaccgccgccgcagagggctggcctgccgtattctgccgctgcaaatattgcttagaggcgcagcgcctcggcggcaaaaacatccgcacacgctcgcaggctatcgtcaacgacgatcttctgctcgacctgccgccggatacctacatgcacaagctcatgaataatctcgatctcagccgtgtgaagtatctgtttgtcacacactttcacatggatcatttctacccgcaggagctcaccgtgcgcggctccgtttacagccttgagatgatcagccccgagcttgaaatctactgcgcacaggaaacctacgattatttccgccgctgtgccgattgggaaattgatgaaaaaagcgacagcgccatgcactggcacatcttaaaaccgtttgagaccgtagaagccggtccctaccgtgtaacgccgctgcccgcaaaccacatgaacccctcgcaccagccgttcgtgtaccacattgtcgatacacgcgaggataaatctatcttctatatgcacgacagcggctactattttccagaggtgtgggattacctcaaggcgcagaaaaagcccgccgatcttttcagcttcgacactacgctcggctatgaagactgcggctttaaaagcacgcacatgggcgcgccggaggtcatccgcctcaaggaggagctcgaagcgctcggtattgttgacaaacacacgcactgcgtgatgaaccacttctcacacaacggtcatcttctgtatgacgagctcgtggagcttgccgcgccgcacgacatcgaaatatcctacgacggcatgaaactgacactttaaactctacttgcatgcaaaaagcggagacgccccggtttttaagggcatctccgcttctttctttatgacaataacaggaaaaagtaatataaaaactcactgattgtacttttgtggcaataactattgccctttttaaaaatccgttccgtcaatttcgcttctcattatatcaaatttgcatacaattatataattctgtatattcaggcgctttccggtcgaatttcttgtaaaaaagaaaaacggcagagcaacccctgccgtcttcatagcgcatgttgttttccgtttacttgcagcggcgcacagcttcttcaatcttcgggagaagctcttccttatccgcgtccttcgtgtacttaaagatagcggcaacaatctccggaatatcggaagccttgtagtgctcagtcgtagcaatctgcaaaccggcatattcattgcgggtcagcaaaggcgcaaagcggcgggcattctttctgccggggccgtcattgatgaaagctgcaatgaactggtaaccgatcagattgttgatgatgacgtggaaggagttcttcgcaaacagcggattctccgggtcacgcagcgcaatctccatgatctctgcgcggttcaacggacggccggcctcccaaaggagctgcatcatcgcaaattcggaattcgttaaacggatatatggtttttttcttttcatgctatatcctcctgacaattttcatatcccatattgtttcaactaatcctgtcgaaagtaatatcagtatatttttatttttgcaatttgtcaagggatttggaataaaaaaactactgatgaggcagttttttcaaaaaattcacattttagaaataaaaagaagaccggcagcgcattttacctaccgaccttctgtattttacgcctttttacgcatcgttttcaataaacagcgtcttaaaatacggcagttcctctgcccatgcgcagaacacgtgccactcgtccagtttgtggtggcggcgcgcaaaatacatgttcgcaatgttctcgtagttcatggtacaggtgcgcatctggttgtagctcgaaggcaaaagctgaatgaggctgtaccaaaggtctttgtccttcgtctccacaaattccacgcgcagcttttccagcacaccaatggtctgcatcaggctctcctttgccgcgggcaccatacggtcacagctgaagtccgcttcttcaaacgtcttcgcctgaattttgtgcatcgtgctcgtggaattcgccacggtgcccaccttatacgtgtcgaattccttccaccagtagatcggcgcagtgaggtcgaccgaaacgaagatctgtcggataaatttgcggtgatccgtacccgccttgcacagacgttttgcaaggctcaggtcgttttcgccgaaaacgaacgtgccgtccggctcggtgtggctgtccatgcggccccagctgttcatggggttgcgtgcgcctctgatggcgttttcaaagttcatgacgcttgtacgttcgatcttaatcatgtcgttcaacctttcgtattcaaattatttgtggtactttgtgcccgcgttgatggaaaacgcgcggtacagctgctcacacagcataacgcgtgccagctggtgcggaaacgtcatcggtgacatggaaatgcgcttcgagccctgcttcacgctgtcgtccagcccgtgtgacgaaccgatgacgaacgctaagctgctctccccgttcacggccgccgcatcgatctgctgcgcgagctgcgtggaggagacaagcttgccctcaatgcacagcgtgtaaagcgcgctgcgccccgccgccgccaaaatcgctttcgcttcctcgccgagcgcctttgcaatctccgccgcattcgggtcctgcggcagacgcgcttcgttcagttcgatgatctggaaccgacagaatgcggaaagccgctttgcgtattcctgcacggcgtcacgccaatatttttctttgagcttaccgatgcaaatcagctttacctccagcatattgtctccctatgttaaaatgtaatggcgccgccggtcaggttttcaatcggcgcgacctgcaatatgtagtcctccgcgttctccacgcccgccatctgcataccgcagacggcggtctgccgcgcaatgtccggcgtgttgttctcgcggctcaaatgcgccagcaaaaagtgctttgtgccgtcttcaaaaagctccggcagcaggtcggcgcacgcggtgtttgaaagatgcccgaagtccgataaaatgcgccgctttaagctgtacgggtacggccccgtgcgcagcataccgatatcgtggttcgattcaatgaccgcgagatctgtgccgtgcaggttctcttccacctccggcgtgatgtgtccaatgtccgtcgcgaccgtgacggtgtgtccgtcttcggcttctatgcggtagccgaagctctccgcgcagtcatgcggcgtgcggaacgcgtttacgtgcattccggcgagctctaacgtgtcttcaatcgtgtaggcgggatatttgtcgtttaaaacccccatcgattccaaggcccccagcgtgcccttagaggcaaacacgggaatatggtatttggaagcgaacacacgcagaccgctgatgtggtcgctgtgctcgtgcgtaatgaggatgccttgcacggaaagcgggtctataccgcagcgctgcatgacagtcgtcacttgcttgcaactgcgtccgatatccaccaaaatgcccgaagattttgaaccgatataataactgtttcccgtgctgccgctgaacagcgggcaaagctctgccatttgcaccctccctgttttcataaaaaacgccctgacaaggttttgtcggggcgaaacggtctgtatacggttttaaccgatctttgcggtatcgctgtttgtgggatcgagcatcaaatacatgtccgcgccaaggccgacaaacttctccacaatgtcctcatagccgcgctgaatgtgctcaatgtcctcaatcttcgtcacgccatgcgcagcaagaccggcaatgatcatcgccgcgcccgcacgcaggtcagtcgcacgcaccggtgcacccttcaggtattccacgccctcaataatggcgctcttgccctctacggtgatctgtgcgcccatgcgcttcaactcttccacatagcggaaacggttttcccacacgctctcgtttaaaatactcgtgccctgcgcaatggagagcagcgccgcgatctgcggctgcatgtccgtcgggaagcccgggtgcggcatcgttttcacgttgcacttactcagcgggccgtcgcagcgcacgcgcaccgcgtcgtcatattccacgaccgtcacacccatctccatcagcttcgccgtgatggattccaggtgcttcggcgtcacgttttttacaagcacatcgccgcgcgttgcagccgcagccgccatgtacgtgccggcttcaatctgatccggaataatcgaatacgtaatgcccttcaaatgctccacgccgcgaatcttgatgacgtccgtaccggcgccgctgatgttcgcacccatggagtttaagaagttcgcaagatcaaccacgtgcggttcgcgcgcggcattttcaataaccgtaaggccctttgcctttacggctgcaaggataatattcatcgttgcaccgacggtgaccatgtcaaggtaaatgtgcgcaccgcgcagctcctttgcggagacctcgatcatgccgtcgttgaggctgtacgtgcaacccagcgccttaaagcccttgatgtgctggtcaatggggcgcacgccgaaatcgcagccgccgggaagcggcacaatagccttggagcagcggccgagcaaagcgccgatattgtagtaagagccacgcattttgcggcccaactcgctcggcaccacgttcgtgtggatggtggtcgggtcgatctccacggtgttcttgccgagccagcgcacagtcgcgcccatctcggtcaggatgcgtgcactgagcttcacatcggaaatgttcggtacgttctctatacggcagggagattccgccatggctacggccggaatgatcgccacagccgcgtttttcgcgccgctgatgacaacctcaccgtgcaggcgctttccgcccttgatgataaatttatccactgtaattttcctttctgcgggcgcggcatatcctcggcagtcaaaggcacactgcctgccgccacacagcgccgcaacgcgctgcacgaagtaggatctttcgttatgcccgccggtccgtgaccgactgatttattcctgaaacgggctgccgccgattgggcagctacacagcgcgggtacgaaaaaagcccaatgccgtgcgcaaaaaactaaggcagtctaaaacaaaacatacactgccgcatctatttaaagaaaaagtgatcgcaaaatatagtatgaccagtaaacataataatacacaatggaaaaattgtcaagaagccacaggctatttggaaggtttttccaagattatgtaaacgaaaagcgccaaacccggccgtttgcgcacctttttctgtataggtactgcgctttacacttactttttcttaaaggagatcgtagattccgtgccgtttcggatgcgcttaatattcgcgcggtgcttgatgataacggtagcgccgatcagtgccgccacaagtgttgccattacaacgtaaagcaccggcagcccgcccacgcagcagtccacaaaatacgtcatgcagaacgtcacaacgggatagatcgccgccgccgtaatagacgaaagcgagaccatgcgctttttcaggaacaccagaagaaacaccgcaaagcaaatgaggaatacgcgccagtcgagcaaaagcatcatcgcagccgtggtcacaacgcccttgccgccgcggaagccgaagtacagcgggtacatgtggccgatcatgcagcaaaagcccgccgcatacatgccaaggcgcgccatttcggggtctacaccgtttgcaacgcacgcgtgctttacaagaaaatagccgaccaaaacgctcgcaacacacttgcagaaatcgagcagaaacgtcagcgcagaggcttttttgcccgccacgcgcagcacgttcgttgcacctgcgttaccgctgccgtgcgcgcgcacatcttcgtgcgcaaacgctttggtcagcaaaatggcaaagctgatactgccaagcagataccccacaagcgctgaaagcagcagcggcaaaattaaagaaccgaaattttccatgtagctcaagtccttccccgtcagtctgccttatcgccgcgctcgcgcacgatcatgcgcaccggcgtgccctctaagctgaagatctcgcggatgcggttctccagatagcgctggtacgagaagtggaaaagctctttggaattgacaaagcaaatgaacgtaggcggtctggtagaagcctgcgtcatgtagtagatcttcagacgcttgcccttatcggtcggcggctgtacgcgtgccgttgcctgtgccagaatgtcgttcaaggtgccggtcgtaatgcgcatcgcgttgctggaagcaaccttgtggatgagttcaaacaagcggtcaagtcgctggccggtctgcgcggagatgaagatgatcggcgcgtaggacataaaggaaaagtccttttcaagcttcgtcttatattcctgcatggttttgtcgtctttttcaacggcgtcccacttgttgaccgcaatgatgcagcccttgcccgcttcgtgcgcgatgccggcaaccttggagtcctgctccgtaaaaccgaccgtggcatcgatgaggatgacgcacacgtctgccctgtccaccgccatttcggcgcgcaggttgctgtaatgctcaatggaatcctccaccttgctcttgcggcgcaggccggcagtatcgatgaacgtaaatacgccgtacttgttttcgatggtggtatccaccgcgtcgcgcgttgtacccgcaatgttggaaacgatgcagcggttttcgccggaaacgcggttcacaagggaagatttgccgacgttcggcttgccgatgacggcgaccttgatgatctcgccctcgtcctcctcttccttttcctccggcaaatgctcgaggacggcatccaacagatcgcccgtgccgtgtccgtgcacggaagacacctgaatggggtcgccgaggccgaggttataaaactcataaaaatccgccggcgggtctcccagcgtatcgcacttattgacgcacacgatgaccggcacattgctgcgctggagcatttgtgcgatgttgaggtccgttgcgaccatgccggtgcgcacatcggtcacgaaaataatgcagtccgcagaatcaatggcaatctgcgcctgtgtgcgcatctgggacaaaataatatccttcgattccggctcgatgccgcccgtatctaccagtgaaaactttctgtttttccattcacactcgccgaaaatgcggtcacgcgtcacgcccggcgtgtcctccacgatggaaaggcgctgcccgatcagcttgttgaacagcgtggatttaccgacgttcggtcggcccacgatggctacaataggtcttgacatacggttttcctccttcttttttccttactccgcagtgcccaaaatgtccttgagctcgcctgcggcgtctttatgcattctgtaagccggcacacccagcttttcgctgagctgctgcacggtcatatcgtctaagaaaatatcttcgtccgccataagcatggacggtgcaagcaaaattgcgtcgccaaggttttcgcggctcaagcggttcacaaggtcacgccccgtgagcagcccggtcacgttgaccgtaccgccaaagaaatcgttgtgcacaggcacaaggttgatctcgagccccgggaatttttcgcgcgcaaagtccatcacatgctccataaacgcatacacgccttcgcccgtcgggatcgtcacgcggcgctttatgtcgcgctccggctcgtcttcaaccgcccaggaaaattcttcttctaagtcgcgcagcatacccacgccgttttcaatctgcgggaagtcctcgtagaattcatacggcggcagctcgcgctttgcaatgaggtagaactcgtcgctcgggaacacggttctcgagccgcgctctgccttaaatttatcgccccaccgctccaaaatctcgatcgccgcgcgcgccgtatccttgttaaacgtctccagcggatacagcccctcgcggtagcgcgtcacgccgaccggcacgcaggcgacgctctgtaagctctcgccgagcgcgtacatttcggaaagcgtaaattccagctcctcgccgtcattcagccccgggcacagcacaatctggcaattcagcttgatgttgtgctccgccagcttgcgcacaaaacgcagcgcgtcgcccgcaaagcggttgtgcatcatcttgcagcgcagcgtgggattcatcgtatgcacggaaatattaatggggctgatgcgcatttcaatgatacggtcgatctcacgctcatcaatgttcgtcagcgtgatgtagttgccgaacaaaaacgaaaggcggtcatcatcatccttaaaatagagcgtttcgcgcataccgggcggcagctggtcaatgaagcagaacacacacttgttgcggcaggagcgctgcctgtccataagatacgtttcaaacgcaaggcccagtgcgccgtactgcggctttacgaatttctcttcgcgccgctcgccctccgccgtttcgtataccacatgcagatgggtgttcgtctcgtaaaaacggaaatcgagaatatccgtgatgtcatgcccattgattgaaataagcttatcgtgcggctttatgccggcccgctcggcaaggctgtttttatccacgccgaaaatttcaactgccacagcttttctcccttccgttttgaggtagtatgcgcgaaatttgccgctgttttacggctcggcaccaaaaaatgccgacaaaacaatagagaaggagcacgcaaatgccccttctctatctggcacaattattgtttcaggcaaaattatgcttccttcttaacaacttctctgccgttgtagtaaccgcagttaccgcaaaccctgtgaggtgtcttatactctccgcactgcgggcatttcataagggcaggagcgctaagcttccacacgttagaacgtctcttattctgtctggcactggacacttttctcttgggtaccgccatcgtcagcacctccttatattaaactaaaactttggttatctggaattattgtagcagctgccgcagagcctccagacggggatctgtctgctgctttgcacaggcgcagtcgccttcgttcaggtttttgccgcaagtggggcaaagccctttgcagtcttccttacaaaggaatttcgtcggcgtcaaaaggatgatatcggaataaatcagctcgtccaaatccagctcatcgccttcaatcacgatataatcttcaaaatcctcttcatcattcagcttgttcacaatcacgtgagaaatgttgtgacaaaactctttacgcgtcaacgtcaagcacctgttgcacggcatcgaatacgcatagcgcacctccacgttcagctccgcactggaagcgaacgaacggatgctgcccttgacctgaaccggcgtgacaaacggcttacagccgtcaatctccacctccgacagatcgaccgtataatcgatcgcctgtgaaatatcctctcccgagaaatattttttcaaatcgataagcatagtttttcctcataccgtacttgatatattataaataccacgcgcggttttgtcaagaaaaatttgaaaattcggcattatgccgcgaaaaaaaagtgttcggcgggtcgtttccgccgaaacactgttgcttttttcgtttttgcacggcttttcgttactgtttcgggcggtgcaaaggctttttgaggccgaaattacttcgcgacaaattcccgaacggaagccggcagttcctctgcgtcagcagaaatgagcaggcagatgttcacgttggaagattcgctgagcgtcttgagcttcgcggtgagcggctcaacttcctcaacgcccttgccggtgatcttcagggtggagtcaacgaaaacgtccgtcacatcgtagtttgcagcgcagatgccgctgacaaagcctacaagtgcgtccaggccctcaatgccgtaagcgtcggagtcaacaagacgtgccttgtgggaaatatcgtaagtaagcttaaggcccttttcgataacaacaacgttgccgttggagttctgaaccgcttcgtttgcaagctcgatgagcttcttggttttgccggagccttttttgccgattaaaagagtgatcatagtgaagtcctcctgtgtattttttccgcaggtgcggatttacgcctttttatttggaaagtcttgcttccagtgcttctttttcgccttcgtaacccggcttgccgagcagagcaaacatgttcttcttatagctttcaacgcccggctggttgaacgggttcacgccgaggagatagccggagatggcgcaggccttctcgaagaagtagatgatctggccgagggtatcctcggagaaatcgggagcggagatcacaacgttcggcacgccgccgtcgttgtgtgccagcacggtgccctcaaacgccttgcggttgatatacgccatgctcttgccctcgaggaaattgaggccatctacgtttgccgggtcgttgccgatgacaacttcgcgcttcggcttctcaaacagcatcacggtctcaaagaggctgcgtctgccgtcctgaatgtactgacccatggagtgcaggtctgtggagaagacaacggatgccgggaacaggcccttgccgtccttgccttcgctctcgccatacagctgcttccaccactcgttcatgagcgtgtagcacggctcgtagctgaccatcacttcggtcgtcttgcccttattgtaaagaatgttgcgaatggcagcatacttgtagcaatcgttttcttccatgttcgggttgttgtaggcagcctgtgccttctgtgcgcccgccatgagtgcgtcgatatccgcaccggccacagcgatgggcagcagacccacagcggtgagaacggagtaacggccgccgacatcatccggtacaacgaaggtctcgtagccttcttcgtccgcaaggtgcttcaacgtgccgcgcgccttatcggtcgtgcagaaaatacgcttctttgcttcttccttgccgtacttcttctcgaggatctcgcggaaaacacggaacgcgatagccggctccgtggtggtgccggacttggaaatcatgttgatggaaatatccttgccctcgcagatctcaaccagctccgccagcgcggtggaagaaatactgttgccggtaaaatagatgtccggcgtatctttcttcagtgcattgtagtgctcgctcttgaggaactcgattgctgcgcgtgcaccgaggtaggagccgccgatgccgatgacgataaacacatccgtgttcttcttgatgcgctccgcagccgccttgatgcgtgcaaattcctctttatcgtaattggtgggcaggtccacccagccgaggaaatcatttcccggacccttgccggatgccagaagcgcatgtgcattctcaacctgagaagccattgcagcgtattcgtgctcgccgataaagcccttcaagtatccgcattccaatttcaatgccatttctattgcctcctatttgcatgatgatgcttttgcacgtgtgaaaccgttttcacagccccactttatgcaaggtacaccacaagtcaaatctatgtgctttcatcatacaataatttgacgcattttgcaagtgcacaacgcggatttcatgaaaagttaacgaaggttttttttgaaaatcagatttcacgccgcttctgctgcgaaaaaacaagccaaaaaatattgcaatgcagaagaaaatgtgatggcgggcgcttcggttttcgccgtgattttgagcgactgcaccgtatcgccgttcagcgcgacctccgccgtaccgagcacatcccccggttctaccggcgcaggaacgttttccggcaaaatgagctttatcccgatctccgcgccgcccgaggctgttaaaacgccgcgtggggcttcacacgcaagcgaaacggcgctcaccatgccgcccgtaacgggcaactcgggcagttccgggagctccggtgtcgtcagcttccagtttgcaaaaccgtagtcgagcagcgaagacgcggccgaaaagcggtctttcgtattttccgcaccgagcactaccgcaatgagccgcataccgtttcgctctgccgcagccgaaatgcagctgcccgccgcacttgtcgtgccggttttcagccccaaaatgccgtcatacgtgcgcacgagcttatttgtgttcacaagctgcgtctgcccgtcacgcacataatcaatccagatgagcgtgtaatcaaatattttctcgtgctgcatcaacgcgcggctcatcaccgccacatcataggcgctcgtaatgtgcccatcttcgtcaagaccgttgcagtttttaaaaacggtgtcgttcatgcctaactccgccgcgcgggcgttcatgcgctccacaaatgcgtcctcgctgcccgcgactgcctccgccaaaacgaccgccgcgtcgttcgcgctcatcaccacgcacgctttgatgaggtcgtctacggtcatctgctcgccctccttgagccaaatgtccgagccgcccatgcccgccgcgtgcgccgaggccgtgagcacatcgtccagatgcagcgtgcctgcatcaattgcctcaaatacgagcaaaagcgtcatcaccttcgtgatggacgcacaaggtcgctgcacatgggcagacttttcgtataacacctgacccgtggaggcttccatcagcaccaaagcctgcgcggggaaatccggcgtctcggcacgcgcaagcggacagaacacaccgatcagcaatacagcagccaaacagaagccaagaaaatgtcttttcataagtaaacacccccgcaccaaaagatatgcgggagtgtccttcaatcattctattaaatttcaccggcgcaccgggataccgttttccgcaaggtaacccttgagctccggtatgccgatctcgcggaagtggaaaagtgatgccgccaaaaccgcgtccgccttaccctttgtaaacgcgtccttaaagtgctccaacttgcccgcaccgccggatgcaatgaccgggatgcccacgctttcggaaaccgcgcgggtcagctccaggtcatacccggccttcgtgccgtcgcaatccatgctcgtcagcagaatttcacccgcgccgagtttctccgcgcgctttgcccattctacggcgtcaatgcccgtgtccacgcgaccgccatttaaatacagcgtccagcctgcaccgttcgggcggcgcttcgcgtccatcgccatcacaacgcactggctgccgaatttatacgccgcgtccgcaatgagctgtgggtttttcagcgcggcggagtttaccgaaaccttatccgcgcccgcgcgcagcagcgccgtgaaatcctctaccgtgcggatgccgccgcccaccgtaaacgggataaatatgctgttcgccacgcgggaaacgatatccagcatgataccgcgcgcatcggaggacgcggtgatgtcgagcaaaacaagctcgtccgcgccctgccggtcgtattcgacggcggcctccacagggtcgcccgcatcgcgcaaattcacgaaatttgtgcccttgacgaccctgccgtttttaaggtcaaggcacgggataatgcgtttggcgtacattacacgcccccctttccctgcgtcatggcggcgaagttttcgagcagcttcagtcccagcgcgccgcttttttccgggtgaaactgacatgccatgaggttatttttctgcaccgccgcatgaatttccacaccgtactgcgccgtagcggtcacaacatcctcttcggcctttaaataatacgagtgcacaaagtacacatacggctcgcccgtaatgcttcggaacaacccgccgtcctttttgatttcaagcgaattccacccgatatgcggaattttcagccccggagcagcaggaatacgcagcaccttaccttttaaaagcgacaggccggagacgcccggggattcctcgctgctctcaaacagaatttgcagccctaaacaaatgcccaaaaacggcttgccggaggcgacgaacgctttaatcggcgcttccagttctctcccgcgcagctcgtgcatggcgtcgccaaacgaaccgacgcccggcagcacggcgccgtcggctttcacgagaacgctcgggtcctgtgtgacttcgacctcgcagccgatatgcataagcgctttttccacgctgcggatattgcccgcgccgtaatctataattgcgatcatcccgtcgcctccctattgctttgatttaacgcgataatatagtatcacatattgttttatccgtcaacaggtttttcgcttcccgcaatcaaaacagcttccttcgattttgggcaaaaagaaagcacgcagaaaattggcttaacagtgataaggaactaatttacttatcaactgttagctgacggttt

SEQ ID NO: 3274 - DNA, 1892 bp, Unknown
  16S sequences of unknown bacteria
cagagccccgccggtaaaatggcgtgcagcgcgtcatagaacgtgcagtagtagcgctggcggagaaacgccgccaggtgcagcatcttttcggagaggaccggtgtatcgtccagccgggcgatgatttccttcagcccgccccgttcaccggggatgatttggaggaccatgccctcgcagacccggttgcccttgccaaaggggagcttgacccgcatccccggtgccagctgcagcgcctccggcgcccagtagtcatagggcttgtcaatggcaaacacagctgccgaaacagcgacctttgcgatcaaactcagccccccttttaacgcgcaaggcgtaggcccatatcgcctgcgccttgcaatttctctttacaccaggtattcgtccttgatttttgccttcaaaagcccatcggccacttcgtggatggccagcgtgacgggcttttcctccaggggctgatgatattcctcggcctcgatggagatttgccgcgcccggtgggcgacgacgttgaccagcagatagcggctgttgatgtgcgtaagcagctcagacatggggggatataacataggaaagcgcctcctttaaaatttcgtcgttatatttgcgccggcagccctcggcggttaggatcgccaaaagcttttggacacagcggtcgatatcgtcgttggcgacgatataatcgtagaaatttgcctgctcatactcccggcgggcagtctgcaagcgcaggcggacggcgtcctccgccgtgtcgccccgggcgcggagccggtactccagctcgccgaaggacggcgcggcgatgaagatcagcaccgcgtcggggtaagaacgcttgacctggagcgcaccctggacctcgatatccagcagcacgtcccgcccggcctccagctgggcgaggatcggggcggccggggtcccataagagtgggcggcgtaggtcgcatgctctaaaaattcgttctgcgccaccatgcggtcaaattccgcctgggtgatgaagtgataattgacatggtcgatctcgccggggcgcatcttgcgtgtcgtcgcggagacggagaaaaacggctgccgctgcagctttgccgtcaggctgcggatcagcgtgcttttgccgacgcccgacgggcctgagatcacgatcagctgccccttagccattgacggcctcctcctccgcggcccgttcctgggcgcggctggcgatcgtctccggcaggatggccgagaggatgacatggtccgtatccataatgagcacggcccgggtccggcggccataggtcgcgtcgatgagcatggagcgctcccgggactcctggatgattcgtttgatcggcgcggattcggggctgacgatggccaggagccgcgccgcgcagaccatattgccaaagccgatattgatgagtttcatcgcaagctgcctccgttactcgatattctgcatctgctcccggatcttctccagctccgccttgatctccacgacagtctgggcctgctgcagatcgctggccttggagccgatggtgttggcctcgcggttcatctcctgcatcaggaaatccagctttcggccgatggccccgccgccctcgatcattttgcgcagctgggaaaggtggctgcgcaggcggaccgtctcctcatcaacggcgaccttatcggcgaatatggcggcctccgttaggatgcggctctcgtcgatcgtcgtcgaggagagaacctcgcgcatttttgcctccaggcgggcgcggtattcccggacggtctccggactgcgctgctcgacctggccgaccagcgtttcgatgcgggcggcgtgggtgcaaaggtcctccgccagggcggcgccctctgtc

SEQ ID NO: 3275 - DNA, 11346 bp, Unknown
  16S sequences of unknown bacteria
ggcagccgccgcacgcgtgaagttgacgacggcgcctttggaggcatggtaggcgatggtcgggatcgcggtgttgcccaccaggccgtagatggaggcgatgttgatgatgcggccgtaggcctgcttgccggcctcgatgttcttttgcatgtagccgccgaccttcttgcacatggtgaagatggaggtcagatcgaggttcatcgtgaagtcccaatcggaacgctcgaagtcgacgagcttggtgcccgtgcccttctcgccgccggcagagttgacgaggacctcgatgtggccgaagcgctcgtcggcagccgcgagggccgcgtcgatggacgcctcgtcggtgacatcgcacttgacgggcaggacctcgatgccgtacttctcgctcagctccgcggcgctcgcctcgagacgctcgatgcggcgggcgagcagaacgaggttggcgccctgctgggcctagccttcggccatctgcttgccgaggcccgaagaggcgccgctgacggccacggtctttccggtgtagtcgaacatgtgtatctcctcaattcgcattggagcccttgggcgcacgagtcgccggtcgggctgttcgggtgttacgctcacgcgaccatggtagagtggacgtgaccatgcgcatatattcagatttgaattattttttatggtcagttgcagatggcatcgccccaggacatgccgccgagaaaggacctcatgctcacttacgacctgtcgaaacggggcaagacgcccacctatctctacctgtaccagtgcatacgcgacgacatcatgagcggcgtcatcgcccccgaggaaaagattccctcgaagcgcgcgctcgccacgcacctgggcacgagcgtgatcacggtcgagaacgcgtacaatctgctgctcgtcgagggctacgtgcgctcgagggagcgcgtggggttctttgccgaggacctcggcacacgggcgcaggtgcgccaccgcaggcagcgcgttatcgcactgggagccgacgagcacgtctactttgcggacttctcctcgaacaaggtgcagaccgccctctacccctcgtcgtcgatggcaaagctcacgcgcgagatgctctcgctgaacgactctaacctgctgaggacggtccccttcaacgggatacccctcgtgcgccatgcgatctccgagcatttggcgcgctaccgagggatggacgtcgaccccgaccagatcatcgttggcagcggcatcgagtacctgtacagccggctcatgcagctcttcgacgagcgcaccgtgctcggactcgaagaccccggcaaccacaagttctcgcgcatagccgcgcgcaaccgcatacgcagcgagttcatccccatcgacagcgacggcgtgcagctcgaccgcctcgcgcaaagcggcgtcagcctcatgcacgtctcccccgccaactcgtttccacttggctctgtcatgcccatcaggaggaggctcgacctgctctcatggctcgatcaagacagcagccgctatttgatcgaggacgatttcgactcggagctgaactcgtacggcaacccgacgacgccgatatttgcggcagaccccggggagcggacgatctacctcaactcgttttcaaagacgctcgtcccctcgctgcgcatctcgtacatggtgctgccgcccgcgctcatcgaacgctacctcgcgacgatgacgttctactcgtgcactgtctcgggctcggaccagtacgtgctcgcccgcttcatccaggaaggctacttcgaacggcatctgaatcatctgaacaccgtgttcaagcacgagcgcgcgcaggtcgtgcatgagatgcacgagacagggctcgatgagctgggctcggtgttcgtcccgcctgcggggacgcatgtgatcgtgcgcctcggcgacatgggcgcaacgcgcgcgcagctcaagcgccgcgccgagaagctcgatattcgcttcgcatttgtggcggactacgcctccgagccgacagaggagatgcaccgtgagctcgtggtgaactacgcgtctgtgcctcccgagcggttgcgcgagggactgctgcggctcaaggactgcatcgcgcccaaatctggaggctcagcgcacacctgagacgcgcagcaactagaatacgaagcgacagcacatcgaaaaaggcgcggcccgcgaaggagaggcacacgcccgcgaaggagacgccatgaccgcacgcaccgttctgctcgtccgccacgcaaaagccaagtcgagagacgaaggcctcgacgacctgcaacgcccgctcaccaaagccggccgcaaggcgctggaggcaacgcttgtgcccgtcgcgaagctggcgaaggagctcgtgcgcgatgcgacagcggacgcgccagagggcgtcgccgccgttgccgcatggtcgagcgaggccgtacgcgcctgcgagaccgctgagcaggtgaccaaaaggctcatgaagaacgccgagccggagctgcggccatgcctgaccgagcagaacctcgagcgctttgccgcagacctggacgcgagcgattccccgttggtcatcgccgtcggtcacaaccccttcatggagcgagccctggcagaactgaccggctgccagctggcattgggggtcggctcaatcgccgcagtacagctccccgcagccaaacagagctggtctcggcagctcaggggctccaccagtatcgccgtcgcccccgagaaccgcgcgcgcctgctgtggctggtcgagggcatccccgcccgtcccttcaaggttgccttgtccgttgaggagacggttgccaaagcggcaaagacagtcgcagagcgtttgcagggctttctcgatgaccccgacgacgtcgagacgctgcacaagctgcgcgtctcgatccgaacgctccggagcctggtgggcttcctcgagcccttcctcgagaagaagcaggccaaggggatgcagcgcgagctccgcggaatcgtgttgcagacctccgacctgcgggagtacgacgtgctgctcgagcaggtcgagacgctcgacaccgacgccggcgagctgtacagcgcgatttgcgagctgcgcgggcaggaacgagacgcggtgctcgaagcgctttccggcgaggaaaccgcacgggcgcttgccgccgtgcgcaaggaagcagagcacttgacatggaaagagcgcgtcgagcgtgcggggcttgcgcccgagcgcctcactgcgcgtttcgacgagctcgccgatggcgtcaccgcgggactggcgacgctcgactacgccgacgaggaggcagtccacacgctgcgcaaagacgccaagcgggtacgctacgtcgccgagaacttcggtgcgctcatgtcgccttcggtcgcagagcgcgcgcacgagatgaccgcggtgcaagaccagctcggggcgctgtgcgatgcgcgcgtgaacgtccagctcatctgcggttttcccgcagcggggctttcccccgaagcgcaccgcggccttggctcgcttctcgagaagaacatgtccttcctcgattccgccctctgactgtcctgtccctccgcgccaaactgacacgatacccacggcccctcgtgtcaaaatgaaccgatacccacggcccctcggaccacatacgactggagactgcatgaagacgatcaccctgggaacgaccggcattgtcacgccgcaaaacggatttggggcactgccgatccagcgcgtctcagatgacgaggccgtctcgctcctgcgccaggcatggcatggcggcatgacgttcttcgacaccgcacgcgcctactccgacagcgaacacaagctcggcctggccttcggggattggggccacaatgacccatcgctaccccgccgcgaggacatcttcatagcgtcgaagaccggcgccaccacacccgacgccttctgggctgacctcgagacctcgctttcgaacttgcggaccgattacctcgatatctaccagttccacaatcccgacgtcgtcttcgagcccggtgacggcaccggcatgcacgagtgcatgctcgccgcaagggagcagggcaaaatccgccatatcggcatcacggcgcacaagatcgcgaatgccgagaaagcagttgcaacagggctctacgagaccctccaataccccttcaactacctggcgatagagcgcgaagtcgagctcgtgcgcgcgacggaagcggcaaacatgggcttcatcggcatgaagggcatgtcgggtggcctcatcaccaacgccagcgctgcgatggcctgggatgcgcaattcgacaacgtcgtgcccatctggggaatccagcgccaaagagagctcgacgagtggctgtcgttcatggatggcccaaccggtcagggcacgcccacgctcgacgacgggatgcgtgccttcatcgacggggaacgagaagagctcaaaggcgacttttgccgcagctgcggatattgcatgccctgcccgcaggggatacagatcttccagtgcgcgcgcatgtcgcagctcttgcgccgcatgccctcgaaggactggctgacgccgtactggcaagatgagatggcccgcatcacgacttgcaccaactgccgccagtgtgcctcgaagtgcccctacgacttggacaccccagagctgctcaagctcaactatgccgattaccagcgcgtcctttcgggcgaggtgtccgtggagtagctactcgcgaggtccgtgggcatcctcggcgtcttgggccttcatgcgctcgcgcgtctcatcggcaatatcctgcagcgtcaccgaggcgagcctggcctccatcgcccggtgcgcctcgtcgagcttaccgccgagcacggcatgcacgtttcgcccaaccgggcactggatgttcgggtgctcgtggaagcggaacagctcgccttcgtcctcgaccgcgcgaaacacgtcgagaagcgtgatgtctgttggcgccttcgcaagcgtcgctcccccaacgcccggctcaacgtgcacgagaccggcggatttgagcatcccgagcacgttgcgcacgacgacgggattgacgcccacgctgtctgccagcaggttcgaggtgaacttgcgctcatcgcccaacacggcgaggcagagcaggatatgagaggccacgggcagcctggtcgaaaacttcacaaccgcagacctcctccccgaatcgtcttttgcacgcacggcatcgtcgtttgcgtcgtcacgcaatacagaataaaggggaaatgagccaagacgcgcaacggatgcgtaacagagtctcgagcgaagtgtgcagcgaatgccatcttctcgtgcgtcgatgacttcgtcacccctcatttgcatttatttccgatgactcattgcggtattccgatcctgctggttccatccaaaaggtgagagtcgcccaaaaagcattatcgaggtgaacgatgcttaacgaactttccagcaatgacctattttgtaattactacaaggagtggatttccgtatacaaggagaacgcagtaaggcaagtgacgctaaacaagtaccatcttgcgcttgcctggatagagagacacgcgccagatatgaagctgtcggatcttgaccgaatctcctaccagaaaatccttaacgagtacgcaaaagatcacgaacgtcagacaacgatggactttcaccatttactaaagggcgccgtactcgatgcagtcgatgatggactcgttccgagagatccaacaaggaaggcaattgttaaggggaagccaccacggcccaagaaaaaccgctaccttaaccagttcgagcttcatcggctgctcgccagccttgatcttgggtcagagatcagctgggagtggttcatccttctagtcgcaaagaccggcttgcggttttccgaggcgctagcgataaccccctccgacttcgacttcactaggcagacgctggccgtgaacaaaacgtgggactacaagaacggaggaggtttcgtgccaacaaagaacaggtcctccgtgaggaaggttcagattgactggcagctgatagtgcagttctcagttctggtgaaggatctaccaaaggaaagccccgtgtttgtcggggagaatgagaaggtttacaactcgacggcaaataatgtcctcgccagattatgcaagcaagcggaagtgccggtaatcacgatacacgggctgcggcacacgcacgcctctctgcttctcttcgcaggggtatcgatagcgagtgtcgcgaagagactcggccatgccagtatgaacaccacagagaaaacctatcttcatatcatccaagaattggaaaacaaagacgtagacctggtgatgcgttccctcactagcctcgtctgattatcagcgtaagtcaacagggcgactctcgctaataccagttcggccccatgagggctgccacgaaatccggttcatctgcatgagcgcaaagcatgaaaccaccatgaaccgttttcccagttaaaccgcgtatgacagcccgttttccaacaagtcggggggaaccgtttgcagccgtgataagtatctcgccctcttgtaccggccttatgctcacagcgtcctcgtcaacgaatacatcttcgtcgttgagagcaaacgcgtccccgtcaatattcgatgacctgagcacgcgaacgccttgtcctcgtgggcggatatcagcgggcgaataggtcagccccccttcgcaaagggactagctcagagaacttacgcttgttcccaaagctatcatcctaaatatcaaaaccgccctgaataacaaactctcgcaggagtttgtccaaccgcatgttcactttgaacggcggtatcggcttaccttccttcccagcaaagtagtctcgcgcctttccgaggtccaccgtttccttcaacgcatcgaagcgcccgtactcgttgatgttgtcctcggtcacatggcgcgccatgaggtcccgcagcctcccctcgtcaacgccgatagccgtcaccagtgcatctacctgcgagtccttgcctcgtttctgaaaatcgttgatgtagtccatgagcgtcttgccagaaacgacctcaagatcgccacgctgtgcggcgtggatgacaagctcggccgcagcctgctgctcttgggtaaggctcgcgaaggagctgtgcagcagctctagggctgccttggcctcttcaccctcgtcaatcttcttgagccacttggcaaagttctcgttcatgtagtcggtgtcgatgcgcccggtgtcgatttccgtgaggtagccgtcgatgtcgaacggcacgtcatccgacccgtcgccagattttcgctcgaagagctccttgtagcgcaatgcgaggacaaggtatgcctgtaaatcgagcgccactgctacctcggcttcctccccgttttcgtggaggaactcgtaagtggtcttctcccaagtgaacccctgtactttggccgcctcgatgaggtctgatagctgtttgaagagctttgcaaaccgtgcacatgccgcatccgagccaggaagcttctcgaagttctgcactccatagccctcgaacacgttcctgatgtcctcaaagcacatgttgatgtgctccaggttgctctcgagcttgtccacgaacaagccaaacgggcggtccccggagtagagccttacggcatcgtccacgtttcgccgcatcgtgtgcggtctgcggtagtagcgaatcacgccgaagggcttctcggggccgaatagcctgttcgtccggctgaacgcctgaatgatgccctcgtactcgagcaccttgtcgaggtagagtgtgttgacccacttggagtcgaaacccgtcagcatctggttgacgacgatgaggaggtctagctgctcttcggggtggcgctcaattccgacatagggcttcttgtgcgcgagacgcgccgatacatcccgcttgaaggcagcatgcgtggggatggcgtagtccttgccggggtaaagcttcgagtagccctcaaggatctcgacgagaccgtcctccttgaagagcgtccccgtcgggttgtccgggttgtcattgccgatgttggggtcgaagagcgccgtcaccttgagctggggcgccccgtcgcgaaacatccggtagtaggtgatggcctcggggatgctagatgcggcaaggatcgcatggaacttcccgccgtgcgagagggccgtccatccgtccatgacgtcctcgaagaccatcctgaagtggtcgcagggagtcccgccgatgcagccgtcgctgtctgtgccacggtactggctctctggcaggtaatcctctattccctttgaccaggagccgtcggcctccctgcgtcccgccataggaacctgtgaggggtccatgtacctgaggtatgtcttgcgcttctttgggtccgcaagggcagaagactcgctgtccgcgcgcgccttctccaacgccacctcgcgccggacgtcacgatccttgtacgtgcagaccatataggggtcgaaggccaggacgttatggtcgcgaattccgtcggcgatgctgtagcgatgcagctcgtctccgaacacgtcggtggtggtgttctgcttcttctggttctcgtcctgtataggtgtcccggtaaagccgaacagcatcgccgtggggaacgtcctcctgattgtctgcatcatgtcaccgaaggtggagcggtggcactcgtccacgatgaagacaacacgtttttcgcgtatatgctcgaggtctcgttccgtgagcccgccgtcgtgctcgtggatgttgctcatcttttggatggaggtcactatgagcgtgtcggcagggtcatcgctcttgagcttcgccctgagcacgtctgtgtcctcggtcgcctgcacgctcatcgagtcatccgcgaagttgcggtactcgtcgagcgactgagtgcccagctcgattctgtctacaagaaagaccactttatccgcatcgtgtgagtcggcaatgagctgggcgctcttgaaactcgtcatcgtcttgcccgaacccgtggtgtgccacacgtagccacctcttgcgctcgccttgtcccacctcgactttctcaccctgtcggagatagccgcagccgcatagtactgatagctgcgcataaccttgagcgtcgcgtccttttcatcggccaccgaataaaagcctatgagctggtgagccatggggatggagagcaggtacctcaccacgtcgttccagtcgttgataggctcgttgttgaagtcggcccagtggaagcggaagagcgagaagtcgcccgtggcacctgggttggcgaagtaaaccgtctcggcgggttccatggcaacgaaaatctgcacgagcgaaaacagtcccgagaagacgccctcatgcgcgtacttctggatttggttgcacgcctgcgacacgggtacgccgttacgcttgagctcgatgtggatcagcggcatgccgttgataagcagcattacatcaccgcgacggtcgttgagacgggcagacgccgctttaaagcgcggctgctcggctatctggtacacgctcctgcctgctgcgatgtcgagtcggtcatagatgtagaggctcacctccttgccaaagtgcgcggcatcgtcagggttgtcacgtttgatggatacagtcttcccgttgatgaacccgttgagtctcattggggttcgcagtgcagcgatctgctcgagaatctgctgcatctccccctgggtgagcgggcagccgttgagcctgtcgatgcctggattattctcgtaaaggatatgagcccagttatcgaggagagcctgctcgtcgggctgatggagcacgccacccgtccatccgaaatctttaagacgattaacgagggcggtttcgaactctgcctcgctcttgaatgtgtcagccatacgtggtttatcctcctaaacgaacatcttctcgaggagcgacttcttcagagtcgcgagctggtcgtgcttacgctgatgaagggtgatgaggttgtcgaggcgggcgaagaacccaccgatcgctctctgttcatctggcgtggggagcataagtgacattgacttcatcttcgcgaaatcgacgctctcgacggtcgtgccagttttaccgtattcaacaagaagctcttttgaatgcgccttgaaatgttgcatcagccataaggacgagcaatcttcgttggagattatcgttcgtatgtcttggttaaccgtcgaaggtttccgcagcatagagacgggaagcgtgtgtcgaaggataccacttctcgttaccatcaataacgttcctgggggatacagcttcagctcggaggcgcctttttcggacaatttggttgtcgtatcagaaaggtaatccacctttacatcttgcgaagtcacccatagtattttgccgtcggcatagttcgattcatcgttcatcgagggcgtatgaccaccaccgaaagtggctacatcccccagcttacgctgttcccaagtttgcttacagacgcagactctagttattcgcattacccaagtcttcggttttgtagacgttatatccttcgtagtggtagcttgcatcgatgcccttcatgaacacctttcggtcatcaatcgcagtggtaagcgcagacttcaggacatgcttaatctcgatggctcgaatcggactcctctccatggcgagcagatagtcttccttgtcgaccttgctccagtcgatgacctctcccagctccgccttgagaatgtggtcgagccagattcgcatacttctgccgttcccctccctaaagggatgggcaacattcatctcaacgtacttgtctatgatttcatcgaacgtggattggggcatcttctcaattgattccaaactcggctctaggtacataagcggagcgaagcggaaatcccctttagcgatattgaccttccgaattttccccgcaaatggatagacatcctggaacagatacctgtgaatctcaaataagcttgctacggtaccagccgcaagcttatcaagcacaccctcctcgaagagttcgagtgcacgcaatttgctgaggcgttcctcctcgcgcgcgagttccgcttgatctgtgatgcccagtttgttttcaagcgtcatgttttctcctaaacaaacatcttctcgaggagcgacttcttcagagtcgcgagctggtcgtgcttacgctgatgaagggtgatgaggttgtcgaggcg

SEQ ID NO: 3276 - DNA, 32759 bp, Unknown
  16S sequences of unknown bacteria
gctggcatggcctgtatagctttcatttttttcatagcagtccttatcacaaaagcctaaacataaaattaaaaaaatgtgtcatttctattcaccattatatatgatgtctcgctgaaatgcaacataattttcaaaaaaaacgctcattattctcactgaaacggaataattgacgaaataacattcgcatctgcgtcaaaaagcacacaatacgatggaatagcgcgaaaataactgtagaaaaactaataaatcacttgacacggcatacaaaatacgatataatatttacaaataatacgtctgtttgagtgaaataaacgtcaaaaatcagaataaaacttacgactttaactaaatcaagacaacgggaggtatgggatgtataagctgacgatggtgctaaacggaatctatcggcacaagcggaggaatatcatctcatgcctcctgctcattgccgtactttctgtgacgttctgcggttttttctacaaaagctttgccgaagagcagaaagaggcggtggcggagcggtatgagaatcggtatcgtgtggctttccaaaatgaactgcaattcgattctgcccacccgaaactgtccgcattggatgcaagactgaacggaacctcacagacagacggagtgccggacgtgtatttcgacgcagacgcgatggaagcgtataaccatccgtacccggcgactgcggaaatgtttgcttccctcggtgcggcggcggaatgtcgtgactactccctcgcatacgcagagacggcatatggcttctcaggtgacgtgccggagcatatacaaaatatgcttgacgcgatatattccatgcaggaggacaatggtgtaccgacaaaaatcatgacggagcatatcgtagtcggcggggatttgtctgcgttttgcggggtggcacgagatattacatcaggaaacctgtatgatttcattctgacggcgggagaagagccgaaaaaaggcgaatgtgtcattacggatttttacgccgcggtatacggaaaagatgtcggtgacagaattactttgtgcgatatatatggtaagcctgtcactgagcttacaatctcaggcatatacagcgtttacaggacagggatttatgagtttgtgaatccgaaggtgacgcaaagcggaaaaagactgacaggaactgatgtgttcgaggattacagcggcgcaccggatgtcggcactccatttgaccgcctttgtgaagatacggacgcgcaggcatatatgctcgaacactatcgctcgtattggcgggtctccggtgcaatgctcggggtgatccacacagaccttgagacggcatataacctttacggtacggcggaaaccgacacgatatttaacacccgccaccacatcaacaactttttcgcgtattacaatctcaccgacggcgcacagacagcgtttgaagaggaaatacaccgtattctcccgcagagctacagcgcggagtttaccgtatatccgttttccaattcttacgaaacgttcatgcgtctgccggagagtctgctcgccacggcgaatgtactgctgcaaatctccgtgatactgactgcgcttcttttctgcattgtgacggcggtgcttgtccatgaaaacggcagagaaatcggcatctaccttagcctcggcatatcggagaaggatatccgcatgaaaacggcgggagaaaacgcgattctcatgaccgtttctttgatgctcgctgcgatttgcagtatctttgtccataggtatctggcaaaagggtatacatatctcgacatatacgaggtgcggtacagtgcaacaaatgcaggcgtggtatttgccatatgtgccgtggtactgagctttcttgtgacggcgctgtatattgcggtgtacatccaggcgcattccccaatacgattgatacggcaggatgagacttaacgggggaggggtacatcgcaatgtttttgctacagaatgcgcttaaaaacatatggcggcagcgcagacggtaccgggttcttttgccgctgattttggtctgtgcactgcttacaggtgtgttcatgaccgtcgctgtcccgtgccgtcagtattccgataggataattacagtcgcatatgactttacggaagaggaagcggcggcagtggaggagatgagcagtcatgcacgggagctgggagagggcgcgtcgctgatccagttcggcgttctgcttgtcggtgcgattgccatattgtacgtgtcctcgctgatgatcggggagcggatgcgggaggtcggtatattctacgccatcggactatcgcgcggacagatatttgtcaccatgttcgtggagctgttcacggtatgcacggcggcgcttctctgcggactgaccttcggacgtattctggctgtgtcgtatctgcaaaatgaaatcacagcgtcgcgtctgccggaggagattctgtcatacatggggaacggtacggctgagtcgctttgtatcatcgcggcggtggggatactgcttttacccatactgcgccttgctgtgaagctgctgcggactgacccgaatggatttttgacagttagaaagtgagggagaatatgatacggctatgcgacatacgaaaaacctacaagacccgtcacggcagtgtagaggtgctgaacgggatctcgctgacagtaccggatcatacgctcgtgatgcttctcggggaatccggcagcggcaaaagcacgctctgcaatattctcggactgctcgacacgccgaccgcgggagaatactatctcgacgatacgccgatacacacgctgtcccaaaaggaacggaccgatttgcggcgggagaaggtcagctttgtgttccagagcttcaatctcatcacgacaatgacggcgtgggagaatatcgaattgccgctcgggtaccgccattttccgaaagcggaacgagacgcgcgtgtggagacggtactgcgctctgtgggactcataggaagggcagatcactatccgtcagaattgtcgggaggggaacagcagcgtatcgccatcgcgcgggcactggttatggagccgtctctcctcatcgcggacgaaccgacaggcaatttggataaaaacacaacggggacgatcatggagacgttactggaagcaggacgcggcaagacgatatttatggtcacacacaatgaggaactgactgcctatgccgatgtggtgctgcatctgagacggggcgtgcttgagtgacgggcggcattttgcgaattataaagtagttattatataacgttttgtcaactaaaaaatacgctgattcattcaaccacacgagtcagcgtattttcatttttcattcagccgcaatcctgacaacatcggcaaattcaagagcgctgtcaggctggatgacaatattgtcgtttccgctcacgtttctgccgcccatcaccgcgtattcttcattttcggcgttcaccgttatctctgccgtcacaatgtagaattcatttccgaacaacccattacgctcgcgaaccgcatatacgtatttcctgccttcgcttccgacgaaaaccgcgcttttgggtatcaccttattgtagtacatttctccgtttatctccatgcttgccggcttgacgacgcttacgacgggagtgcgcatatcaaaaatatactttgatataaatgtgcagctcaccaaagctataacgacggcgacggtgaatatattcagaattctttttgctacagtcattttgtctctcatttcagattagtgttttcaattcccgatatcagcgagtctttcaggtataggaagagcagtaataccggaagtatggcgagaattccgcacacaaaggatatgctcaggttttcacggcttacgttcgcgagaaaaacggaaagcggatattttgtcgaatccttcaggaagataagcggctgttcaaccatgttccacgtgtcgatgaaattgagaatgcacagggaagcaacaccggatttcgcgtacggcacgatgattctgcacagtatctgaatctggttagcaccgtcgagctttgccgcttcaataatgctgttcggaatggaggaaaagaactgcgttagcagaaatactccgaatgtggaaaaaactcctgggagtatgaccgacgcgtatgagccgataagtccgagacgctcgaaaacaatgtagttcggcacaagcgtgacttgaagcggcatcatcatcagtattatcacgaaaaagaatatgacgttctttcccctaaagctaaattttgcgaatccgtagccgccgagacatgatataacaagctgtcccgcaagtatcacggtggacaggagcatggacttccagaatttcataagataagcaggcgtgtacaggaaaacttcaagatatccattcaaggagaagctgcgcgggataatatgaaagtccatctctcccgatacatagctgcgaatgacctcgctttcatccatcagcgacgaggcggcgataaagatgacagggaacaatgcggcggcgccaaacagtatcaaaaccgcgtaaacgattatgtcaatgcactttgactttttcttcataattccgtgtcccccgattttacgcgaagcctgaacatgatgagtatgagcaggaatattgcgataaatatcatgatagcgccgaccgcgagcctgatgtaattcagattctggaaattgttgttcatgaagtgctggagcatatatatgcttttattcgggtgtgagccaaacaaaaggaacgcttctcggaaggatttgaatgaattgattatcgaaattacggtgatgaagaacgtgtacggcatgatgagcggaaatgtgattttgaaaaactgtatggatttgccggctccatctatgtcagccgcttcgtaatagcttttcggaatggcattgagagcggacaggaacagaataatgttatatccgctgtttttccatatgtagaggattacgagcacataaaacgcgttcggtgaattaatccactcagtcggagctatgcctaaaaattccagtacgtggttgagcagtcccgtttccgcgaatatgatttggaaaaacagaacgaccgacgcggtaggaagcacaagaggaaacacaaacagagttcggaaaaagtgataacccctcagctttttgtacaggagcagtgcgataaacagcgaaaccaaaatgattgccggaaccgcgataactataaatttcagcgtatttcctgccgccaaacggaacgccgcgcttttcagcacctccgcgtagtttttcagtcccacaaatcttacgcttccagagctttcagtaaaggacatatacaggcagaggcagaacggaatgacaaaaaacacgagcattccgattattgacgggagacagaacaaaaatcctgtcagcgattccttcctcgcgagcttacttgctttcattttattcatccttatacagctcgagcatgcttacaagacttgcgcagcactcgtcatacgacttcttaccatcccagaacggagacattgcttcctcgacaaagccttctacagtgtcgggagtgccaagagacgcgtgactgacgccaattaccaagtcaatatacgagtcgatgtatttctcgtcctcgcttccgattatatcgctctctccgaagtcctttttcatctgcgccctgagactgctttcaagaacgggatgaccgtagcgaagataagttatgccgtcgctgttgccgccctgaatctcctcagacagcagaattttgagaaaacggtacgcgttgacctgattttccgaggctttcggtatagcggcggcatttatgacctctgcggttactccgttgtctgcgtttttccacatgaacgtgagcggagtctgaccgctgttttgtactcgcgctatttccgatatgaacgccgttttcatcgagaaaagcgaattgtcgaatagattgcggcgggagataagtcctgcgcccatgctgtccgtgaagtccggcggatcgtttttcggagcgtcctttatgaattccatcacttctctaaagctcgtctcgtcaatggaaaccgagttcttttcgtaatcaatgagacggaagctgccgtatatcaaaaagttgcgcaggagcatggatgaggtgtcgcctgcactgagcgcacttttgtcgccggcgtcagcgtgcctttcattgtactgccgagccgcgtcaagaaatcctttgtatgtctgcacactgtccgtggaaaagccttcttcgtcgagaatttcttcggtggtaacaagcggtagaagtccgtattcgatgggcattatgtaccgcttgcctttgtatatccccgcgttcattacgttttctatgtattcgtcaagtgaaaactcgtcgtcacgcagaatgagctgattcaggtctacaaatagatttgagttcatggtcttgtaaacgtctccgccgaaatcatccgtgggagaaagtatcaaatccggaccttttcccgcgggaagctcagccaaaagcagattcacatattctttgtcgctcaaactcaccacatctaccgatacatcggggtacatctcgctgaaaatattgacggcaggagttatcatatccgaattcatcgtgtaggaataaagcgtcagtttgtcggtcgcttcctgcatgacaaagctctcgtctaatctcgcctaggttgaataagtctccgcttggtcggtatcgtcactcgcaggtacagcgcaagagccgagcgacataacaataggaatcatcagtaccgaaattattcttatggtcagtgttttgcttttcatatgctgctccttgacgtatgtttgtaatgtctgtaagttttgagttaattaatcgattttgcgacttttttacaattatgtgtatattatagcatgaaatttttgttttgtcaaacttgaattgtctgttttacgaaaaatatgcaccgccaaaagtgttaaactttagcagtgcatattaaatcaatgtaacttcacttgatcttgtacaggagcacactatcgctgtcatcgggcattacgacaatttcgctttagttgttcccgtcaggagacagcaaaatatccccgctcgatgttcttgcgccgtaaagagttcccacagagcgactctcctccgctgctaatatctatcacgaattaaaaacatgatagcaaatataaattagtttgtcaatatattttggtgaaattgatatatcggcatgctcggcattttttataaaacctattgcattaagccggcttttactatacactaacagtatcaacggactaacagcacaggagcggcacatgaaaataagcatagcaaatcacgaattcacggaactgtgggacggcgtattttataaagcactgtccgactatccgagggtgagcgacaacgagatgaaggatatcattgactttgtgaattatgagaaggcaaacggcaggcagtgcgagatagaagcggacagggaggatatattaaagtacgtcctcgacgaaatgcggaatcccgacaaatacaaaaatgtgcacagaccgaagataatacgggagtgtacggcttgtgcggctcgcggcggatgcatgacggatctggtgtgccataccgctccgcttgacaacgcgatttcaatcctgaagtgcggttctcttctgtctgcggtaaacgcgagaggacttcccgacacagtcttgcagaaggaagagcggaacgcggcaaaggatccggcagacttctttcactatgtcatgttttcgtgggggaattgtcaggcgggggacagacttgtgatggagcgcaagcttggaagaagtcccacaccggacgaaatgggcataggctttacaccgggcgtgcggttttattttagatatgacgagcttgagaagcatccgaaggcagttcacgacggatttctgccgataaaggtgcgcgacgaggtgaaactggaggactacgtgtatatgataatcattccgagcgaatatgtggagcggatatccgaagtcatgccggaaaagctgtcggacagggcgtattatctaagtcacgataagctcgacgtgtggcagtggtcggaaaaagcatattcctttgtccatgagaggttaagaaataattaaaaaacaattaatcctattgagacatgcgagagaaagctttataataatacgaacgaccattagttagtcggacactggttagcgtaagaatttataaaactgattaacgcgcctacttcaaaggaaggtgattgtatatgaaaaaaacactaacacaaaagctcggactgctcggcatagtcagctttctctcgtacaccgcggctgtagtattcgctccgcttgcttatcccggatataactggatggcgcaggctgtcagcgatctgagcgcatcaaacgccccgtctcttacactgtggaatcagctcaccgctttgtacaatgtctgcgaagtcgtatgcgttacgatagtgtgcattggaattcaggggcagaagacaaagctcctccgcagcggaatatacctttttgcggctatggaatggctctctgctgtaggctatcgtatgttcccactctcggacagcggatatgcgggagagtttcaggacgtcatgcatatggcagtaactgcgcttgtcgtgcttctctcgatagcgtcgctcactgtcataataatcgccggagcaaaaagcaaaaactgccgctcctacggaatctgtgcgggaatcgcgctcggtatgatgctcgtgggggctgtctgcatgaaaattgttccggctgactgcttcggcatagtcgagagattcagcgtatttgccgcgacgggatttaacatggtgctcggcatacatctgttttgcatgaagccggagaaatagtttttttgaaaaatctcttgacaaatctgctcgagcggcttataataacaaagcgttatacataacaacatgttatttgaaggggcgtgatattatgccggcagtaaaaaaggtgtcaagggaagagattatagacgcggcgggggatgtgcttcgtgacggagggttttcttctgtcaatgcaagaagcgtcgcgaaaaagctcggttgttccactcagcctatttatttttcgttcaagaatatggatgaactaaaaaccgcgctgacagaacgggcgattcagatgcatacaaaacgggtcaacgactctttgcaggctcatgaaggaaacgacagccgttacagcagctatggcatgggatttgtaaagtttgcctcggaggaaaagcagctgttccgttggctttatcttgacggggagcagctcggtccgtatcgcaacgacgtccttttcccagaggcaattgaggtaattgttgaagaattcggatacagtgaggaaacggcaagactatttcatcaggacatggtgtattactcatacggacttgccatccttgcaaacacagagcacctaaatctgactgaggcggagctgcgtgaagcatttcgacgtgagtttcgcgcgctgacagcaatttacggaaaaccgactaagctgccggatttcgcggtgaaagcaggtgtggtactgtgaacatgaagctgtctttctcatggattggtatagcggtgtttgccctgcctatgctcataaacatagcttatgcggtatttcctcccgctttagagtatgcttcggcaaaaagtaccgcgcggtggcttgaaacagtcgaaagcatcagcagaattttgtaccttgtactgctgacatttttagtaagcgaaaaaacgctcgatgtgcgaagtatctggtttgcggcggcggtcgtgtttttgattctgtactacatagtctggattcgctattttttcggcgggagagacgtcgcactgctcggaaagccgtttctctttgtaccgattccgctcgcgatttttcccgtgctgtactatctgttcgccgctgtctggatggacaatattcccgcagtgataaccatgctgatattcggagcggcacatgttacagtgtctgttcagtcgtttcagtgacagcaataaagaaaaggaggattatagtgttcaatacatatccccgaccgcatgataagcagacggtctacttaaaggatgtcgtcaagggagagaatatcgaagtcggcgactacaccatatataacgacttcgtaaacgatccgcgcgatttcgagaagaacaacgtcttataccattacccgataaacggagacaagctgaaaataggaaaattctgctcgattgcctgcggtgcgaagttcatgttcacaagcggcaaccactcaatgaaatcgctgtccacgtacacttttccgatattcttcgacgagtgggagcttgacgcgaaaaacataacggacgcgtgggacaacaaaggagatattgttatcggcaacgacgtttggataggctacgaggcggttattatgtcgggtgtgaaaataggagacggcgcgataatcggtactcgtgctgttgtgactaaggatgtgccggcgtataccattgtcggaggtgtccccgcaaaaccgatacgcagacgctttgacgacgagaccatagaaaagctcgagaagctgcgctggtgggactgggacagagagaagattaagcagagcatttccgctattcagtcgggagatatcgcggcactggagagggaaatatgaagccgatttcagtagacccgaaaacaacaacccgtgcggaagcttatgagctatggatgaatgcgccgaacccaatggtaacgtttttcaagacatttgacgtcacacctctcgtaaagctcagccgcaggagagggatgaaattcaatatgctcatggattactgcataggcaaagcggcgagtgatgtcaaggagttctatatgctccccgtgggggacaagctgataaagtacgacagcatcgcggtgaacaccatagtgaaaaacaaaaacggagaggtgctcaggtgacgtgccgttttccgaaagccttgcgcagtttaacggcgactacctgcgtctgacaatgctgactgccaaaagctgcgaaaacaacgatattacagacagcatggtcatatgaacatccgctataattgacaagggaattgacggcgcggtaggcatgaacagcggaattttcaacaatccctttataatctggggcagatatcataaaggtctgtttaaaacaacgcttaagctgtccctccagttccaccacacgcagatggacggagcgcacgcgggaaaattcttgcagcttttgcaggaaaacatatataacataaaatcacaaacatagaaaaaacgaggatttaatatatagaatgaatgaaatacacgcgagagttatctctcaggaaaaaggactttatagaatacaatacggaacagaaataaaatccgcggctgtgtcgggcagattcaggtatgaggcaatgacggtatcggattatcctgccgtaggggattacgttgtcgcggattggtcggacgaaaacagcaacgccgtgattacagagctgcttccgcgaaagagctgctttatcagaaaatcggcaggtccggtaaagcaggagcaggtagttgccgcgaatatagacactgtgttcatctgtatgtcgctcaacaacaacttcaatctgaggagactcgagagatatctttcaatcacatatgacagcggcgccattcctgttgttatcctgacaaaatcagatttgtgcagtgaagtggagagcaaaatcgcggaagtggaaaatactgcccccggagcggatataatagctgtttcgtcgctcgaggaagactatgacgcagtgatgaagtacattcttcccggaaaaacggtagcgttcatcggctcatccggcgtcggcaagtctacgctgataaataagctcatcggagaggacgagattgccacgggagcgataggaaacggagaccgtggacgtcacactactacgcacagggagcttgtcactcttgaaaacggagcttttgttattgatacgcccggtatgcgtgagcttggaatgtgggacagcggaagcggtattgatactgcctttcacgatatagaggagcttgcgcaaaaatgcaggttttccgactgcacacatacctccgagcctgattgcgctgtccgtaaggctttggaagagggagagcttgacgcagaccgcttggaatcgtatcgaaagctgaaaaaggaaaacaaatacgcggcggacaacagcaaatacctcgaagcaaaacggacgaagtttaaagagatatcgaagctgaataaatcaaagagaaaacgctgacaaaaggaaagtgcagattatgaaatatccgatagaagagcatatgccgtattttgcgcttgctctcgtggttctggtgttgttttacacggtttatttcgtgaaaatgctgattcagcacaagcacggcataaaaacacgtcagataggtcgcagaaaagaaaaagacatacatatggtcgagcttctcatgagcattgcaactctcgcggctccggcagcacagcttctctcgatagcattcggttggagctgtatgccctcgggcgcgagattcacaggttttttaataggaatgctcggggacattatttttctcatctccgtcgtgtgcatgaaggacagctggcgtgcaggcattcccgacaaggacaaaaccgaacttgtgacaaacggcatctacaaattcagtcgtaatcccgcgtttttaggctttgatttcatgtatgcaggcgtacttttgatgtattttaatccgctgacggcagtattttcgctttttgccgctgtcacgctacacttgcagattttgcaggaagaaaagtacctgacctcagtgttcggctcgtcatataccgcatataaaagccgtgtgttccgctatctcggcagaaggtaaacccgaaaattttaagagaaaaaatgtcaaaaccctattgactctcacactgtggcaggcattataataaacacgagctcaaaaaagaacagcaaacaggaggtaccgacgtgctgaaaataggagaattttcaaaactgtccagagtcagcgtaagaatgctgcgccactacgatgagatagggctcttaaaacctgccgaaatcgactgcttcaccgaatatcgttactacagagaggatcagctccccacagtctgtcgaatcaccgcactgaaggatatgggattctcgctcgccgatattgtcagaattcttgagatatacgacgacaaggagaagctggatgagtatttcgcggagaggcagagagagcttgaaaaactgtcgcaggacaccgcatacaagctgacacttctggacgcagcccgaaagagactgagaaaggaagcaaccatgaattataatgtaacaatcaaaacaatccccgcccgctatgccgcaacagtacatactaccatcccgcgctacgaggaagagggaacagtttggagcactcttatatccgaaaccgcacatatgaagctcgttgaagctgacccgtgcctttgcgccgtaacattcctcgacggtgagtacaaggaaaaagacgtggaggtcatggcgtggaaaaccgtaaagggagactatcctgacaccgatcacgtaaagttcaaaacgctccccgaagtgacagtcgcaagctgcacgttcaagggaggataccaccttatcacggaagtctatgccgctgttgtagcatggctcgacgcaaacggatacgaaagcgcaggtccgatgttcaatatctaccacgtcagcccgcacgagacaaagaaccccgatgaattcgtcaccgaggtctgctaccctgtgaaaaagaagtaagcgcaagtatctgttaaccgatattttatataattccgttagaattaacagcataaacaaagcaaccgaaagtgagcgttaaaactcatatccggctgcttttttgttatattcccgaataattgccgcttcttatctcggcgataactcggtctaaaaattccttgtttgtctcacatacgcctgctaaatacggctctttttcggcgagatagctcccgaccgcttcgtcgtccttctgctgcaaaaggagcttgtacgctgaatacaccaaaagcgcgaacttgttcttcattacgccgtagccgttcgtttcgggtgagactatcgcgttcatctcactgaatttgtcgtaccatcccgagtacatatcgcacaaaagcacaagctgttcacatgaaaatccgctttttgagagggaagtccgcgcgtcgttcggaagcctgtaaacataggtacacgcgtcaattcccataacagagcgcgccgctgagagagtcttgaatttgaaatccatgtcctcggaggttttcagctttgtgtcaaagtaaatctcgttctcacgcaaaaactcccgcctgaacagctgataccatatcgcgtagttaatcctcagcttgccgaacagcgcgtcataaacaagacttcggtcgtcctcgttttcaatgcgccaaactcccctcatgcagtctgaatacttgtagctgaatgagtggtaatagttgtgctgatcctcataccccttgcagtcgcagaaaataatgtccggcggaacagtgtctttcagcgcgtcgagaatgctgcaaaatgcgtgttcttctaccatgtcgtccgcgtcaacaaaccatatgtagtctccgcttgccgaattgataccgttgttcctcgccttggcaactccgccgttatcctgtgaaatcactttgactaatggaaacttctcggagaactcatcaagcaaagccgcgtagtcatccgttgagccgtcgtttacaaaaacaaattcaaatgaatgcctgtcgtcaatttcagccatatttcggcatatcgagtctgtcaggtcacgaagcaaaggcatcgcgttgtagaagggaataactaaagatattctcatatgcaagtctccggtgaagatgtatttttggcgtttgcacacatatttgtgtacaagaacagtatatcatcgccgcgaaaatttgtcaatatgtattatgaattgttatcttcccacaccaatttgcagcacgctcacggaatgaggcggcagagttacattgaggcttccctgatacatacctaaactttgctttgttatgccgacttcattgcgtccgatatcgttgtatgaatcctttgttggaccgttcagagtgaagataaccgcgtctccttgtgcctcaggcattgatacagtaatagtctgagcctcgtcggggtgcttgttcactaacgcaagagcatatccctctttgttcgtccactttgtcgcaagcagatcaagggtgtccactgtaacaggcgcgccgtacttgtgatttaccgtaagctccggcatttcttcacaccagctgtcgagaacggtgtcgcccagataatttacgtataagtcaaaaacatggtatgtgctgcgcagaacaatttccttttccgttgtgaaaatgcatccgcgtgtgttgattataggcgcgaagtttgccatgcctacgatgtcgcagttgcggttcattgcgctcaggaagcaagccgtaaacacagcgtccgccatagtgtactgactgttgtcgtcatttttgtctcgcggagtaacatagctgtccttgccgataccctgtttgatggtatgcacattgggatggtgccacgagcgcaggttccattcgtcaaacgcgatttttatcttcttctcgagccgcagagcagtcagcagacctcgaacttccgctacagcatggtcaactctgtccgtgtaagccatgcactgctcgtagtttgcaagctcgtttacctgcggaaccatgtcccagtattcgtgcagggagatccagtccaaaaattgtccgcagtgctttaacaggttcatgttccagtccacatcagcaagagccgccgcggaaagctgtatcgtggggtcgacatgcttgagcatcttagcggattcgagaaccagacgtccccattcctccgcggattttgctccgatttcccaccatccgtagttttcgtttcctatggaccagaattttacgtcgtgcggcttttcataaccgtttgcaatgcgcattttggaataatagccttcgttgtcgaggttgcagtattccgcccagttgctcatttcctcgggagttcctgttccggcattcgtgcatatgtaaggctcgcatccgattttcctgcacagctttatgtattcgtcagtgccgaagctgttgggatcttccactctccacgccttgtcaaacatgggcttgcggttcggaccaacgccgttttcccagtgataggatgagacaaagcatccgccgggccagcgaagtatgggtgtcttgatttttttcatagcctcgattacatccgtgcggaagccgtcctcgtcagccagaggggaagcgcggtcatatactcctccgtagatctgcctgtgaaagtgctcgataaagtgaccgtacagctttatgtctcgtatgccgaatactctgttcgcgtttacgttgaatttcatgtgaatcctccttggtttgcgctttacttgattttaggcgtaatcatagaattattgtgcttttattatattataaccgacaaaatgttgcaagtgattaataagataaattattgtgatattgtatcaaaaaattgcaaaattctgcatatcctcaccgtcggcttgagatgcagctacgtattttatgtaattattcacatgaaagcataaattaatcaacaaacgccttgacaatacttccgcgttatgatagtatctgtttggtgaattctgttaaacaagcaaaaatcagcgcataaattttaagcaaaaaaggaaaaaatgaggacaatacatgaaaattgacatttcaaaaaaagtcacatattttaaggcgcttcttatgccttttcacgtaacgccgcttataacagcacttagcatagtcgattctctcctcaagctcggacttgttccactgggagtgctcgcaacggcgaattttattgactcatcactgcttgccatacaaaacaggagcgcggaaagccgtacctctgctattctatggctgtcggtgattctattcataaagctgtactattacatagaagagccgctcatgaaccttatctcaagaaaaaagcaggaaaaggaatggcggctcattgactatcccgcgatgaagctgcaagcgagcatagacctaaagcattttgaaaacagcgaaacgagcgacctcatcagcagaatgtgcagacctgccggagcgctgtgcggtatgctcggtcacttgcttagcttcatcgtttttgtcggcggaatactcagctacattgtcatactgcttataaatgctccgctgacaggctgtattatccttgccgcttctgttcccatcgttatcatagcgcgtatcagtgcgttagcgcagtataagataaagcaggacatcacggaaatggaacgtcgcggttcgaccttgcgcggatatatggaaagccgtgattcagccgcggagcgcagtttgttttcatatttcgactttgtcagcagaaagttcagcgaggtgttttttacttcaagaaaatttgtcgtgcaggctgaggtagactggagcgtcaaaaaaggagtcgcaggaattgtcctgactctgctgtgcgccctctcaatttttgcgcttcttccgtccgtatccgcgggaacgcttgctgtaggtatgttcatttccttggtgcagtcgattttcaaaggagcggaggacattgcctacaacctctcccctcatcttgaaaccttctacaccgattctacattcttaaaggaatacgagacctacaccgaactgtcaagaactcccgacgcgacctccccattgtccgataaagtttgtccgtttgagaagctggagtttgagaatgtatcttttgcttaccccggcacggaaacactcatcttaaaagacgtatcattcaagctcacagcgggaaagcattattctttagttggactgaacggaagcggcaagagcactattatcaagctgattttgaagttctacgacaattacacgggaaatattctcctaaacggacgctcaatacgcgagtggtctctcagtgatatcaaaggcatgatgggctcggtgttccggatttctgtcggtacgatatatccgtgaaggataatattgcaatcggaagcggattcacggcgggagaggacgaaataaacgaagctgtccgtgcgaccggtctcgagcgttttgtgtccgagcttcccgacggtattaatacagagcttggcaagatatacgacgacggcgagaacttatcgggcggtcagtggcagaaaatcgcaatcgcgcgtattatggtgagccactccactctccgcattttcgacgaaccgactgcgtctcttgacccgatagccgagcgggagctgtatagctattttgacagcttgagcaaagatgtgacatccatcaccataagtcaccgacttgcaagctgtctccacacggacgagatactgctcctcgacgacggtgtgataaaagagcggggaagtcataatgagcttatggcaatggacggaaaatataaagaaatgtttgaaagtcagagggagtggtacatatgaaaaaagagagaaaactgtctccgtttcgcgcggtgttacggattctgccgcttgtcgtgaagcattctccgctttgggtaacaatagagatgcttttgcgactgattgtagctgctttgtctgcggtgactgtctactgcaaccggttcttctacgacgctctgcttaatttagtgaacggcaacgttgagctttcacgtgcgatactgggagctgcagctgttttgtcagtcatgctcgcggagcagttattcggcaagctgtacggatgcgtatatgaacagctgtcaaaccgcatggagtattcgcttgcgtatgaatatatgaagaaaatctcccactgttccgcgcagtcatttgaaaatcccgcgtttttggaggaatcagcaaaggcgtcagacggtgtgtacggcgctatgggtatgtactccgttgcaggcgagcttgttctctatttcggagtatattttgtcataacgggcgtgtatctctttagcatttcgccgattctattgtgcgtgctcctgctcgtctttgtcccgaccgcgctcacgatgaagctgcaatcaaaactgtatgctgagcaggcggatgaagctgttcccgttcagcgcaagatcgacagcttttccggcgcggctttaaactatcgtgaaacaagaatgttcggcgcgttcggatatttctatcgtctcgttaggaaattgcaggaggatattttcgcgataagcctggggacggaaaagaaaaactgccgaattacactgctactaaacatgacgaaattcgtgggttggtgcgccgtcctcggtctgatgatagcggagatgctgcgcggcaatattacagtaggtgcatttgcggcggtgtatcagtcactgagcacgatgttttctaactgcgaatccctgttcagccgcctgaaaaacgacgtcgcagaaaatctcagtatgattgaggactatatttcctttcttgatatgccggagaagcagtgctcggcagaagaagttgatttcggcaaaggcataaatgtccaaaacgtgtcgttttcctaccccggaagcgaaagaaaagcacttgacaacgtcagcttatcaattgcaagcggcgagactgtagcgatagtcggagctaacggaagcggcaagacgacactgtcaaagctgctctgcggactgtacacccctgatgaaagaagtataactatcggcggagcggattcatcatgcacgtcccctgaaaagctgtacgccaaaacctccgctgtatttcaggattatatgcgctacggcggtcttacactaagagaaaacgtcgagataagcgatattctccataaaaaagacgcggaaacattcatgaaacagacgggatgctcggaatctctgcttgagagcgacaaaatggactcgctgatgggaagggaatttgacggtctggagctgtctggcggtcagtggcagaggatagctatggcgcgcgggctttatcgtgacagtaatttcattcttctcgatgaaccgacagcggcgatagatccacttgaagaatcgcgcatatataaaatgttcgcgtctgtcgcaaaggataaaacctgcgtgctcgtcacccatcgtctcggctcggcaaggatagcggaccgcataatagtaatggacgcgggtcatatcgtcgaaacgggaacacacgaagagctgctgcaaaagaaggggctgtatcacgaaatgtggacaagcgccgcggagcagtatgtttgttaggtgaaaggaataataatacatctttatcggcttcacagtgtaacgatgtaactcggcttcctcttcgactaaacaaaataactcccatgcgatagtgtgacatggcatcacatcaaagcataggagtttttgttatttcagaaaatattcagcttttcagaccttccatcccgcggcttgttttctctcgactacaaatctgcggtagagtccgtccactgccacaagctcatcgtgcgtaccctgctgaactatctcgcctcggtctaccacgaagattctgtcggcacttcgtacagtcttaagcctgtgagcaatcattataaccgtcttgttgtgtgtaagctcagcgacagcttccataagctccttctcgttctccgggtcaacgtttgccgtagcttcatcgagaataataatcggcgcgtccttcattatggctcttgcaatggagattcgctgtctttcaccgccggagagtgttgcgccgccctcgcctatcacagtgtcaaatccgtcgggaagagccatgatgaagtcgtagcagcgtgctttttttgcggcggctttaacttcatccatagaagcattcggctttccgaaacggatgttgttcgcgatggtgtcggagaagaggtacgtcctctggaacacgaatgagaagtttttgataaggctgccgtagctgtattcacgcacatcatgtccgccgagggttacactgccgctctgcacatcccagaatcgagccatgagattgcacagcgtggtttttcccgagcctgacggaccgactatggcgactgtggttttctcgggaattttcagcgatacgtcgcggaggatgggcttgctgtcgtaggaaaagtcaacgtggctgagcgcaatgtcttcactttcggaagagatttcttcgccgtcaatgtccattgcttcaacgttgaggatggagttcgccttgtcaacaccgatgtcgatagagcggaagagggaagagtagcttcctgcggagtcaagctgttcaaagaggatgaacgagcagatgagcatcaaaaggcagtttgcaagctccatagtcccgccgaaatagaatgctatagccgcagtgcagactgcaattcccgtgagcttgtttacgatgaactgcgccaacatgaacagcacagagggcagctccataccgaacgacgcctttcgagcttcttcaaccgcggcgtgtacctgtgtggtggagtcgcctgtcagatcgaaattcttgacctcggctatgccctgaacatattcgagaacctttgtgacaaggcgttcgtcggcgttgaattttctctgcgcgagagactgttcctttttctgcatggcggagtttacggcaaagaacagtataagtcctgcaagagtgataagacccatgcgccaatcgaaaacgaacatcataacggcgatgattccggaagtcagaaaaccgcgcgttgttatcattaccacacgagttgcgacgtttgccatgttctccattgtgttggtggtgacgcttgtgacctctccgaggctgttgtcgttgaaccaacccatgggcaggtagcgcagatgctccgcaatttcgatacgcttgtttgcgcaggcacgatatccggcacgagtctggagcatagtggacttcatgttgatggctatcgtgatgatgagcgagacaacaataactccgagacttgaccagagcgtcgccattgtcacgtttccgctgagcagcgcctgaattacaattgctgcggcgggaatacgcatggctgagcatatcgcgctgattacaccgagccaaatagatgaaacaaacattttgcggttgtcgtcaccacagaatgcgaagaattttttcagtgtctgaaacattacatagcctccccgtcttttacgctgatgtgagcttcccacatggttttgtagagcgggcaggatttaagaagctcttcctgtgttcccgcggcttcaatctctccgtgatttaccacgattatctggtcggcgtcagctatggttgaaagtcggtgagcaattacgagaactgttttgccctgtacgagctttgccagtgccgactgaatgacagcttcgttttcggggtcggtgtacgaggtggcttcgtcgaggattacaatgggcgcgtccttcagcatagctctcgcgatggatatgcgctgtctctctccacccgaaagatgaccgccggaggagccgcagacagtctgatacccgttttcaagacccatgatgaactcgtgacagccgcatttctcagcagccgccataacttcctcgtcgctcgcacccttctttcccatgcggatgttgtccaggacggaaagatcgaagaggtagttgtcctgcgatacgtaagcaatgcgcgaggtgcagtccttcagcgggagagttcttatgtccacaccgccgagttctatagaaccgtcctttacatcccaaagagaagcgacaagacgtgcgattgtggattttccgctgccggaaggacctacaagagcgtttaccgtgccaggcttgatttttaagttaattccgtggagcacttccttgtcgtgataagcaaaacgcacgtttttcagctcaatcgagttgtcagccggtagtttttccgctttttcgggacggcgcatatcctctccagagagaacatcggctacttctcccacgattgtcgttacctgagcgatgtcgtcggtgtaggaaaaagctgtgataagcggctgcatgacaccgaaagagagcactatgacggtaaggaaagtctcagccgagagagagccgcgcatataaagcaggcatccgacggggagaataccgagcagtgtggaagggaatatcgccatacccgcaacctgaccgaagaggcttccgcgcatccagtcgataaagcagtctgcaccttcctttgcggcggacacaaactttgcgtagcttgttttcgactgaccgaaggcttttataacctcaattcccccgatgtattcaacagcagtgtcgttgagagcttttgttgatgtgacggtgcgctgaaacttctcgttatatccgctgaacattgacatgaagcagattataccgagcggcactactataagcatggaaagccccatacgccagtcaagcacaaacagcagtatcagcacagcagccgctccgacaatgttcgacgtcatttccggcagaagatgcgcaagggtggtttcaattgaatcaacgcgctccacaatgatgttcttgtacgagccggaagagcggtcaagcacagtgccgagcggaagagtagctaatttgtcgagcagtcgaattcgcgtgttcgcaagcacctgaaatgtcgcgtgatgtgagagggaggtggagacgctgtgcagcacatatctcagaatccagcagagcgccatccatacgcagagagtaaggcagtgtgaaagctcagccgtgccgtttatcagtgcggttatgattttaatgattatgaaatacggaatgagcgagcagacaacgccgagaagtgcagtcactatgctgagagcgtattcaccgcgttttccttccgcaagctccataagccaggaagccgtggagcgcttttgttcggtggatttgttcattggtttttctcctgtatgtattatttaaataagagatgaaggcgtaatttattccgaagagcagaggatatatgttgtatttagctttgatacagccataaaggagcctcctttgattaatatttaagtctgtcgaatattgaatatgaagttagtatagtctaactgaacgccgtaagaaacgggcagaaatactacccgaaatttatttaagtgaatcgcaaagctgacgccatcccgcgttggaaaagtcaagcagtgcgtgaaggcaggatatgaccctttcttcgtcgtgacgttcgttcagcagctgacggaaataccagaactgcgcccccatgatgagcctgacagcgtccgcgttcggtgcttttccgtaaactccggtgaaaaactcaacggtctgctcggtctttgtgtccatcagcctgctcaccatcttttcaacggagcttccgtcgcttcggctgaaaaacagcgtgcattcgtcgtagtagtcgctgagcagtcgaaagtatatcctctcctcatagtttatggcgttaagcagagcttccgttgtgcctatttgtccggctttttcgtattcggcggcggcaggcgtgaaaatctcaccgagcttgtctataaatccgctcagcagactgacaaacagcgcgtccttgttcttgtatctggtgtagattgctcccgtggtgactccggctttctccgcgattttgtgcagagacgcgttttgaaagccgtgcgcaagaaactcttcatatgccgctcgaataattccgtcgtcgagtgaatggtcacggttcgccatatttccgcctcccccataatcaataatgccgttatcaataacgcagttattatagcaccttcgaggattaaatgtcaatacggagcgaagaaaaaacggataatatatttgcgccactttgtttgatatttgtgccgttaaccgaaacgaaataataattacaactgtatatttatatattgacgaaaccaaggcgggtatggtataatacatttgaacaatattttcgagaggcggactaaatcatgttatacctgttgcttataaaaaattgcctgcgtcagcataaaaccgcgtatatttgcgtgttcgccgttttgttcctgtctgttttttcgcttgcgtttttcagcgcttatgcggattcactggcatacggcgagctgctgcaaacacttgaagagacaaacggcgctaatattaaggtcagcaacgcgacaaaagaagatgtttccatgttcgactcccttgaaaatgtcacgatttggtatgaagacggcacaatatatattgcctgtgatattcattcctcggaagacgtcgctgttaagactgccgagataataaggaacagcaaaaaggacctcggaatgctgttatactcaccgtcaatgttcatgccgtattttgaagaagggttcgttacagttataaaattcattatgagcgccgtctccttggtatcaatatactacatttttaatgtttttattgaacgccagcataaagattttgcgatttataagtccgtcggaatgagtagggaacagtttacggttatagtcggcattgaattctttgcggtgtttgttttagctgtattattggcgcttcccgccgcgggactggctttgagactgctcgtttcgctctattttaaagtgaaaattaccatgtcgttgataggatacgctgtatatcgctttcagacgaaaaagcagatatttgtcctcgcgctcgcgcttctgacgactatgcttgcgtactttataacattatataagtacttcggctcgcatacactcgaaaaaacactgaaccgcacgggaaacttcaaacggacagcttcttcaatgaagaaaaaatcaatattcgcgcttcttccgttcttgaaatttgcgagaaaccgaacgctcacggtgattgcggtaatgctcatcctgcctgttttcggatatgccgtttacgaaatgaactacggatatgaaccatacgtcaaaagaaacggctgcgattttattatatccgaccggtatatcgcggatgtgtctacgctgcggcaggaggatatagacgagctgctcggcttttcatacgtagacaaagtaggatacacatattacaataataatttcaaggtaaaaggagcaaaaacagtaagtcagaatactgtactcgcaatgtttcagatagtgtatgacgacccttccgtgaaagagggagaggtctacatagacgaaatattcagcgaccaatacaaagcaggggacactatagagattgtttctatacagacaaatcgggagcttgacattaaaatatccggcacatataaaaccgacaggtctcctacatatccgatgctttactgcacgatggacacgttcagcgcactgaccggaatagagacaacgccgcgctcactgtttgtttatctgaaagaagacgtgaccgagcaggagctttccgatatcagagagtggttgggggaaacctttggttcatacagtgacgaaagacaggaaatcgaggaccgcagaattataatcgagcgttcgcaaaaagtggatatgctccgttctgccgcgatgattttgacctcttccgtaaccttgtgggcggttttgatgtttgaggtctactcacggcgtgatgaaatttcagtcctgtacagcataggcgcggaaaagagacagcttaaaaagctattgcttatcgagatgggaatgaggagcgccgtttgctccgtgcttatcgtgtcggtctgcgctgtggcgggagcgataaagaatactattccgttctcgttcggcatatttgcagtgtatgtcggagcagttttgataacagccgcgaattttgtgataccgtcgatgattgcgtttcacggtatcgtaaaaaaatacagtaaggagagggataatggagatactgaaagtctcggcgctgaataaagtatacgtgcagggagataagcatatttacgcggttcacgatgcatggctcagcgtaaagaagggcgagtttacggcagtagtcggcgcgtcaggctcgggaaagtcaacgctgctgagtctgattgccggcaacattaaaccaacaagcgggaaaataatccttgacggaacagatatgaccaccgcctcggaaaaggaaatcgccgagataaagcggagaaaaatcggattcgtgtatcagcagttcaatttgctccccgggcttaccgcaagagagaacattattctcccgtcgcttttagacggacataaacctgatgaggagtggtttgactacatcacggaaatactcggaataaacgacaggctcgagcatttgccaacggagctgtcgggcggtcagatgcagcgtgtcgccattgccagagcactgataaaccgacctcttatgctgatagcggacgagccgacgggaaaccttgacaaagagacctcggacgaaataataagcctgtttatgaagctgcacgaagagggacacacgctgataatcgtaacgcacgacgcaaatttagctagccttgccgacaccgtgtacagaatagacagcggaaaggtaaatcgcgaaaaccgggaagtatcctgagaatattctcaaaaaatcctcattaccacttgacaaccgaccgataggaagctataatatatccatgcgataacgaaaaagctgttgtggagcgtgtgatggaaaagggaaacacaaagatcgaaatactggaagcggcgctgaacctgttctcaactcaggggtacgaggctacctcaattttgcaaatagcagaggcagtcggaatccgcaaggcttcgctttacagccacttcacgagcaagcaggagattcttgacgttctcgtgcgggatgggctgaagcagtacgccgacaattccatctttgcgctcgccgactgggatgatcctgaattcacaaaggataagcatgacctcactcccgagaaagcggtgcgcatggttctgggacaagtccgctatatcctgcacgacccgcgaatcagcaaatcccgtaaaatgctgaccatagagcagttccgaaacccgactttgagtgcgctacagaccaaacagaactacacggacgtcatgcgctacttcaccggactgatgaaattcctcatccgcgagggaaagttaactccatgtgaccccgagataatggcggctcagttctgccttcccgtctccgtctggataaatctctgcgaccgtgaacccgagagggcagacgagatagaagcactaatcgagcggcacatacggcagtttttcgagatgtacggcgcagagaggcaagaggggacgaaactgtaaaaaaatcgcgcaaaaataaatgaaatcaacgcggctgtgtcgagataagatgtagccgcaatattttggacagtacactaccgaacgataggaagtataaccttgcggagtctatgccgaatcggtgggagaaagaacaatactaaaaaacggaggatgacaaatgaaactgacactgaaattcctgcttgccgtcgcgatacttgttgtgtacgacattttttcgggcgatgcgggaataaaagaaagatggaacaagtttattacatgggtaacgaaataaaggatggactgaaatgaaaaagacaaaatttctgacaaacgcgattttgcttttgattattgctgcggtggttatgctgtttggcgtgtcgtgcagtcattcgagcttcagcggcagtgtggtgaagaatcccgactcattcacgcttgatattgaaaagatgaacggcgtggactctcacaaactggagcttagcgcaggagacgtgcttgacgtacattttgaaaccttcaaaggaaagctgtacatgaagataacgtcaaacggcggagcggtaatctacgaaggcaacggagacggagcggcggactttgagcttaacgtgagcgagagcggggaatataccgtagaagttgaaggacatcaggcggcgggaaagataagcgttaaagttttagattaaaatttcatgaaaccccttgacaagttaccaatcggtcactataatggagttaccgaacggttacaaattgaggggtgaatttatggcgggagatacaaaagagagaattttggagacggcgcttgaattgtttgcaaggagcggatatatggggacgtcaatgagcgatattgccggtcagctcgggataacaaaagccgctctgtataagcattacgcaagcaaatccgaaattttagacagcatagtggagcgcatgaaccaaatggactacgagagagcggaagaatacgatatgcccgaatctaagcctgacggattcgaggaagcatatgtgcatacgccgatagaaaagatacgcgcgtacagcatggcacagtttgaccactggactaaggaaaagtttccatcgaattttcgcaagatgctgacgcttgagcagtatcgtgatgaaaaactcgcgcggctgtatcacgactatcttgcgacaggacctgcggaatacatggcggcgattttccgaaagctgacggacagcgatgagaatgcaatgcagctcgcgctcgagttttacggaccgatgttcctgctatacagcatatacgacggagcggaggataaagaaagcattgcgccgctgctgagagagcatattgaccgattcatcgagaaaatcgaatcaagctacagaaattccgaaaaataatataaaaacgaaggtgaaattaatgaagctctactttggaaatgcagtggcgactgcgacaacgcttatgatacttgccatgctcggattcatcggattttcggtgtacaatcgagaaagcatacagtattggggaagaagaagcgcgtttcttttagtgttcggacttgtggtgtgctgtttcgccgctgcccgtgacggacttgacaagaccatacagaacacaatagacggcagttgtgcgcccggtttgttcccgctcgtcagcatacctacgataatcggctgtgttggcgcgatacttatcatcattgccacagtcgctacgcctatcgcaaaaactcagagagcgcgcgagatatggttctacataatgtcgggcggtgcgatcctgaaaatcataacaatggaaatcgcgcgttggattttttaaactaataatacagacaacaaaaggagagagaacaatgtcagagaaaaatataacaatacgccgtgaaacagaggcagactacagaaacgtagaaaatcttgtaagagaatcattttggaacgtatatcgccccggatgctatgaacattacgtgattcactgctacagaagcgaccccgcgtttgttccggagcttgattttgtaatggagcttgacggggagctgataggtcaggtcatgtatgtgcgctcggaaatagaatgcgatgacggaagaaaagtgccgataatgacgttcggtccgataggaattgcgccggaatataaaagacaaggctacggaaaacgcctgcttgactattcgatggaaaaggcaaaggagatgggagcgggcgcacttgcgattacgggaaacatattgttctacggcaagtcgggatttgtccccgctaaaaccaagggagtacgttacttcgatgaccccgacgccgactacttctttataaaagagctgacttcgggatttttggacggaatctccagcacatacaaggatcccgcgggatatttcgtctgcgataagaatcctgaggaatttgaaaaatacgaagcgacattcccgccgaaggaaaaactaaagctgccgggacaactggtgtgatgtgggagaggataaaatgagcggcaaacataccgtagtatacgttcacggaaaaggcggaagcgcggatgaagcggaacactacaaaaagctgtttcccgagtgcgaggttgtcggatttgactacagctctcagtctccgtggaaagcaaaggaagaattcccgccgttctttaataaaatccgcgaaaagtgcgacagacttacactcatagcaaacagcataggcgcgttcttctccatgtcctcgctcgatgagaaagctgtggatgaagcatatttcatttcgccgattgtgaatatggaaaagctgatatcggacatgacagagtgggcgggtgttaccgaggatgagctgaagagccgcggagagattgtgacgaacttcggcgagacgctgtcatggaattacctttgctatgtgcgtgagaatcctgtcgtatggcgcgttcctacctgtattctgtacggcgagcgcgacaacctcacatcatacgaaacaatatctgctttcgcgaaagagcacggtgcaaagctcactgcaatgccgaatggagagcactggttccacacagatgagcagatgagcttccttgacgaatggattaaaaaacacaatggatagagaaaaaccacaccgatacataagcgaaaaacaaccgaacatttgccagataagcgtgcttcatgacgggcaggagatatactccgacgagtggcacgggtataagaaaacggactgcgcacacatcatgtcggcgacgaaaagcgtggctgctctgctcacgggaatcgctgtcgacaacggtatgattggcagtatcgacgacaaggtgctgtcatattttcccgaatatactgtcaagcgcggagagaagaccatatttgacgtaagtataaagcatctattgacaatgcgcacaccgtataagggacatggcgacccgtggactaaggtttgcacctccgacgactggacgagagcgtcacttgattttctcggcggaagaaggggcataactgacgaattcgactaccgtacagtatgcctgcaaatcctctcgggaattttatataaggcgagcggaatgaaacccgtggatatggcgaacaagtacctctttactcccctcggaatagcggagtacgaaaacttttacgccgtaacggtagcggagcacaaagggttcattcaggacaagtctccgaagaacaacgtctggtttgcagatccgcagggaatcgcgactccgggatacggactttgcatgagtgcctgcgacatggcgaaaatcggacagctgtgcctgcaaaacggcatatgggacgggaagaaaatcgtgtcctccgaatggcttagggaaatgctgactccgagaaaggtcgagagcggtgttttcagcggactgtactacggatatctatggtggatagtgcatcccgagcgaatgatttacgcagcaatagggaacagcggcaatgtaatctacgttgacccgaacaagagaatcgtcgcggctgtgtcttcatactttaagccggcagtgcgtgacagagtggagtttattgaaggcgtgctgctgcccatgatttacggaaaggcattgtaaacttatgcaaacaatactgataatcgacgacgacattt

SEQ ID NO: 3277 - DNA, 11282 bp, Unknown
  16S sequences of unknown bacteria
acgtatacagctcttcgttgacccagtttgccacgctgtccgccgtgcccaggcccttttgcgtctgcgtcagctgcccaagcgcgttgtaggtgtatttcgtcgataccgtctttgtcccgtcctccaccgtctggtacagccggttgccgaccttatcgtattggtatcccgttgtcttggtcttttcgctgttggatacgccggtttccgtcagccgcccgatggcgtcgtactgatacgtccggttcagcgtcttcgccgtatcgccatacccatcggtatagctgccctctgtgatatagttgcgcccatcatagctctgcgtgtatttttctttgacggcctctccttgcttgtatgctatttctatcggccgccctaccgcatcgtactcatagctttgcgtcagcgtgatgccttgcttgtcttcctttgtatcaaattccagatattcgtggctttccgttaaatccccgttggcggcatagctgtaatccttcaccgttttcacgttttccgccatcgtttcgttgctggtatccacctcgccgctcttcacagccgtcagccgccccaaatcgtcatactcatacgtgacggtgcgcaccgcgccttcaatttccatcgtattgcccgcgctgtaccggatgcttgtcatctcgcctacgccgttgtacccaaagcccatgaccttgccatcctgcatcacatacagtgcctggtcatttttgtcatacgcccagctgctttggatggtctcgccatcggtatggtcggtcatcccatcccgccgtccgaaatggtcgtaggttagttcggtatacgtgctgccgttggtcttttgctttttcactctgtcatacgcatcatactcatagctttgcttgactgtctgcgtattttgatcgccttgctttacctccgtctgccgtccgtatccgtcgtaagcgtagattgttacgatttgcttttccgaatttctccccttttggatttccttgactacctgccccatctggttgtagtaggtttccgttacgccgccctctgcgtccgtaacggtgtttttggtcaggccttcgcctgcgctttcgtcgtaggtgtagcttgttgtctggtatggctcggtctccgcgatcgccccatacggcaaaaggttggtatattcccggacgctggtgacctggccttgcaaattatgtgcatactgcttgacggcatacaggcgcgtttccccgtcggtctttacatacgtccattccctctgcacatggcccagcgcatcgtaatcggtatagctttccaccgtgttggtatcgtcccacgtatggatcagctgccccatcacatcgtaggatgcattgacgccgcgctcctccgtgccgccgtggatctgggttacacggctcatattgccgatatagtcataataggttttgctgccaaggccctggttggtctccattgtataggagccgtctactgccgtctgcgtgctgctttggcgcaaaacgccgtctttgcccatccgctcggtttgggtggtaatcaggccgtcgcccgccgaaacggcctgcgtttgtaccgctccgctggggtcggtgatggtggcggcccgattgatctcatcgtactgtaccgtcgtctttttggcctccacaaactgcccgctttcggtataccctatcaccagctgttcggtttgcaggccgttggcattgtaccgatacgcctctaccatacccgtgggatccacagatttcaacagataacccaatgcatcgtattgcgtttgcgtcgtaatatcgctgcttccgcgctctgaggtcgtcgttaccggatggttgtatgcatcataggtgtatcgtgtggtctggctgatgccggaaccggataccgtgctttcgctcagcctgccaaacttatcgtaggcatagctggtctgctgcccgttccatgctgtttgcgaggccaattgcccccgcccatcgtacgcgtagcttgtggtcttggtatcggtgaacgaggccggatcgctcacagccgtcgtggctgaaagctgattgcccttctcatcgtaggtatagacaattttgttgagcactgcgccatccttggtcagtgtctggctggtcagccagtcctttcctgccgcataggtattggtggtcaaaacaccgtccggcgccagcgctgtcaatacattgcctagatcgtcatatgtgatcgcatacgcaattggctcggtctccgccgcatcctgataggtgcggatggtctgcgccttgagcgtatcggtatagttctcataataggtttttctgccgtttggcgaaatggtttgcgtcaccacgccatggttggacagatccgtgatatacgaagtgctgcctgcgccgttgccatccaccgtatttgtcaccgtcgtttgctggcgctgttcatccagcatggcataggcaagggtgctggtatcgccgttggcattggtaaacaggctcacccgattggcttcatccaatgtcaaagcgctttgtttggcgctgccggccgccgacatctcgttggccggggaaacaatgacaaacgcatccgaagattctccggggtattcatacgattcaaacatcgtcacggtttcctggctatcttcgattgattccgtaacgccgcctccgccaccgccggagacagggcgctgctgcaatgtcttgatgggccgcaccacgctggtgcgcacatccttgagctgtccgtagttctcctgtgccgggtcatcaaaataggtatagagatagctctgctgcaccaatgcgccgttcgcgctgccatatatgttgttcgctttgatgatcttatcctggtcgtgcggggattctccatattcaaatgtgatatactgcttttcttcctcggcaaagctctcctcctgatacaggctgtgcattacctggatgagccgtcctctttcatcgtattcaaacagcagcttgtttccgttcggttcggagaaagactcaatgaacatgctctggttaaaggtatatacgatatcatccgagcgggtcgccttaaatgtgccgtccgcctgctcttccagcgtaataaagacgccgctaggggctttgtaggtgccgtccggttgtttttcataccgatgaacggttccatccccatccttgagaagcagagccacagtgatgggctgtccggattcatcatggcccatttctgccaacatgttggtgttaaagctgaaatcccagccctttcccaacggagaatttgaggttgcttggctgttgaaagtacgccgcatcgtactggccaacagcggtgcagtgttggtaaagtccgttttttgatataccaggttgccgctggctgtattgatatagccagtaccgttgcccatatccgccgtgagatagctccaatagtcctggagccctaaatatttatccacctctccttggtctaccatggtagccgttgcgctgttggtaggcaggcttcgtacatccgccgcataatccaccactacgggataggttacatgagccaccacccaatattcaaacgtctccccataggataggttatagtcataatagtagggttcctctaccactgcgatgcactttcgatcctgcatgccaacggtctggcgaaagatctcgtattgtatctgttcagcgccctctgcctgggccggcgtccatctcagccaggttgtgtagtttaacagcggcgtagcggacaaatttgtcggcggatctaccagctgggtatataccaaatcattggtgcctacatatcgttctgtgatatgcagctcggatagatcgatttcatagggcgtttctcccggctgctcgatgtacccgcgcagcatgtagccgcaagccgtgcccgctatctctcctttgctaaattgcggcgttgccgtttccccaggcgctaccaccgtctttccaaaatattcaccggattcatcataaaagctcacttcaaatttcaggttctctggcattgcctcggccgtcgctacctctacgctttccagcatgccatatacgctgtcgatgcgttttaagacaaactgattgtccgcgggcagcgggcccgtatgcgtcaacgactgacctgtctgtgtgaagccttttagatcctccatctccaagttttcaggcgtcatggcaatgacgttctcttttatatacagcggttgtgagtacagaataggattgttgtttgcatcgtacagcacggcatgaagatttgtcgtgttcccttctccaaatcgtctttgtgtatacagcccatccaaaacatccagcgtgaaatcaatttggccgttttctatgccgtcaccccggctgaaaaattctccgccaacaaatagcttgccatacgcaccttccggcacttcgcccagcacgttaaaggtaaacgtgttgttccgattgtcaatcaaataggttccgtcttctcttcgctgatggtcgctggcccaaaccagctgtctattggttacctgcacattttcatccgtaatcagcgtaaaggcctgttccctcgctgtgctatggcccgctttgtccgtggctttgatccttacaacgtactggccgtctacaagatctaggcctgtcaaagacacggttgccgggaaggtatccttcccgttttcatccttggtatattgaatgggcacggtctggtaggcagccgaaagcagcggcaattcccctggcagtttgatgccgatttccgctgttatcgtatccagaaatgcatcctgcgcatcctggatgacgatttgatccgtcatggtccacacgggcggatccccctcggatgacgggtatgtgatgtccaacaccggcgctgttgtatcgcgtactactgtgatgctgcgctccggccctgccagctggtgggcagtattgccgtcgacggcacggatttcgatgatgtgctctccttctgccagctggctcgtaagcggaattctgtacccgttgtctttgatcgggctatccggatatatcatggcagacggatcgatcgtttcccattctccattgtcaatgcgatactgaatatgcgcaatatcaaattcgctttccagccctttttccaccttccaatgcacctgtgcaaaggaatctaccccaaaggcgggcgtttggtcataggtatagctctcgccctgtccgttgataacgctgaggtcgctgggcctctgcggcgtgttatgattgggaatatccacgacattggtcggcagctccatggtggtgtagttgccgttgatatcatacgccttgatggtaaaataaatggatttcccgctcggcagtccgctttcctctatgtcgtattctcttgtaacttgctgatactcatccccatcaatcgtttccagcagatgcttttcttccgagcctgtctctgtccaaaagatttcatatttatctatctgcccttttgcctgtacgccatacgccgttaccttatacgatgtatctgaaatacgaaccgcttctaccctcctacagcttgggtttatatctgtcatgatgtgcccgtttaccgtcccttccatactgcccatcatcacttgatttagtgttgcaaagcaatcataggatccattgatcggcgtagcatacaaatgtgtcatataatgccctgtctcatttttgtgttctgaggattttactacatagctccagtttccatttccttcatgtgttgcaggatggaaaattaaatcgtcctgtcccccttttaccgtccaggtaggaaattctaccctggaaacactggtcggttttaccgcaggtgcaaagcttaagaccactttcccattttcccctatataagcctgtcccaattcgtcaaataccggcggggaattgtccggaattttggctgtcttttcctctgagaatacctttacgccgtaatcggtgtaaaattctacctttaccttgtgctctaccccggataccacatcgtgccaggtatagctgtcccccgaagcctctaccggcttcccatccaaatacgcccggaccttcacccctgtctgcggattccagtttaccttgatatcccccttggaggagttgtttccgcctgggtatacccgtacagtcgtggctgtgtcgatgggcgtgtagacaagcgttaaaatgggtttgcagatggaggaatccgatgaataccaccgcttgtacctttgcgcgctttcctcctcgcttttgaacagcaggccatagttgccctttacggaccaggctctggccaggttggtggccggccaggtataccagcccgtattgcctaccctgccttccgcatatttcccatccagttccaagtaggccgttacattgttccaggtcaaattatccgattcccagggaatctttacccggtacatgccaaacatcggcgtggaggtgccgttgtacgattgataggtgttcaccgtcgcttccgaaatatacgctttatccaagccggaaggcaggtcaaaactcatgatggaacgaaattttgctcccgccgtgtcatggcctacccttaggtattggtttgtataatagttgctgtttggatgagacgagtccacataggtatcctttgtcttcgttgccccgtcgatgtttacagagggatcaatctttacaggatacacggtattttcatcttgcaaatacgcttggctgggcgtcagggtatacagatattgcccattccccaagtcctccaaggcaacgccgatatcgaagctgatattctcatactcctcctgtatgccggaatccaccataaacggctgcgggataaagccaatcttctctaaggtttcttggtccttgatgagcacaacgccgtcttcctcgatgagctccagtaccacgccctctacggatagttcaaaggaaaacgccgtgctttggggcgcttccgtcaaaatgatatcctctttcatcccaatgttgtttggctgcaaacgaaggcttacgccttcttcaaatacgttggaatagtccacagactcatattccagctccgacgaatacgtatatggatcgtgctcttcattggctttttttgccttcgccttttgtaccgtttttttccccggtgtatccggctgttctgcttctgtttttacgttgaaggacaatttgctttccggaagatcttgttccggccgctcatcttctgttgccttaggcagattctcctgggttgataccgcatacttggcatttcttccctgtgtggtctcctgcgcctgtggctgctgcgttggctcaatcggcgccggcgtttgcgttggcagttcttctgtcaaggttggggacggtgtcgtctccggcgtttgtacggtaggctccggcgtaggtgtcggcgttgccgggttttcctgcgtgggctgcggttgcaggtccgcattttgattccataacggctttatcgccaggccacacagccctctttgtattttaataggcgcatcgctgcgaatatcctcatcgagcagcacccaactcttggaggattccgatcgatagtcatagccctcttccttaaacggatcttcgctttccgcgctcttgtccacctgtactacgtcgttgacaatatcgtgccagtttccctcttcgtcttgataccggatcggctccaggtgtgattcataggtaatcgacccatccgcattttgccaataggtttccgtttccgtcagcttgtccgtcatcaacaccggctggttttgcgcctcttctatggcgttttccaccgccgcttgggcaaacgcagggagcgggacgcccaaaagcatcaacacggataatacgaatgacaatatctttgttctgtgtttttgttgtttcatgattccctctccccatatgcgttgatttttctatacaaaaaaaccgctcttaaatggcagaggagcataaagaagtattacgaaaatactaacctatgccaagtgaacgggaaataagaaacctctatgtgaatggacgaaccatttgtatagaggttttcttttgcttcttaaaatttttcagcgtccgcaggacgcgcagccgtcaccgaatggggacgatcttgagggcttgggggtaatccctcaacaagcattttggccggtgcaatccggctaaaatcgcaaaacatgtatatgtttgcattgcttgctggttttatcccgaattcgggataaaattggtaagcaatgcggctttgtccacggcgatgccaataagctggatttcccggacgggagctttgatgctgtgatcagcaactacgtctatcataacattatgggtgcggacaagcatgccctgctgctggaaagcctgcgggtactgaaaaagggcggcgtgtttgtcctgcatgacaatatgaagccgcagatgtacggcgacatgaacgcctttgtggaggaactgaggggcatgggctttgccgaggttcagtatgtggagaccgcagagaaaattttcggctcgaagcagcgtgcggctatgatgatgctgggcgattctgctatgatcgttggaagaaaataatgccggaatcagtagggatgcaatccatatgaaaagagcttatcattccggcggctggactgcgctttttgagtctgtaaacaaattacaggaggacaagtgatatgaaatacaacggcttttatttctggatgttcaagagtccgatgaaagcagtcctgacggagaaatacggcaacgcatatgctggggagactatgaaaaagagcaaaaaagtctatcgtgaactggtcgggaaagctgccgacattggtgacgacaacccaatggcatacaacgagctgtttgcactcgcctttgtcgcaccttacatagcaagcgggaagaagatccccccggagacggtgcaggagatgatgcggcgttcgctttaccacatcaagtggtattttgcgaaaaccgacctgaacaccgataagggcaaggcagagaacaaaaagagcatcgtgaagtatgtcaagtggtacacgccggaaaaggaaaaacaatatccgacatcgttcaaagtggactttgagggacagcctcatgaaggagcttgctactaccgcatcacccgctgccccatctgcgcctatgcggaaaagctgggcgtttccgagttgatgccgctgttctgcgagttggacgaggtgatgatcacactccagcacggcgtgctgcacagaaagcagacgttggcaaacggcggagaattctgcgactattacattacaggaaacagagaataaacgaagaagctcgtatcgtcaataatgatacgagcttcttttcatattttttagattgtgttttttcagaccttccatccggcagcctgcttgcgctccaccacaaagcggcggtagagcccgtcaacagcaaccagctcgtcatgcgtgccctgctggacgatctcaccgtgatcgacaacgaatattttgtcggcgttgcgcacagttttcagccggtgagcgatcatgatgaccgtcttatcgtgggtcaattccgcaacggcctccatcagctccttttcattttcggggtcaacattggcagtggcttcgtccagaatgatgattggtgcgtccttcataatcgcccgggcgatggaaatgcgctgccgctcgccgccggagagcgttgcaccgccctcaccgataacagtgtcaaagccgtccggtagcgccatgataaagtcgtagcaccgcgccttctttgctgcagcctttacctcctccatggaggcatcgggctttccgaagcggatagtgttggcgatggtgtccgagaacagataggtccgctgaaacacaaaggagaaattgcggatgaggctgtcgtagctgtattcccgcacatcccgcccgccaaggcgcacgctgcctgactgcacatcccagaaccgtgccataagattgcagagagtggtcttgccggagccggaggggccgacgatagcgaccgtggttttctccggaatcgtcaacgacacatcttgcagaatgggcttgctgtcgtaggagaagtttacatgagacagagcaatgtcctcccgctccggcgacagttcctccccgtcaatatccatgggctctacatgcagaatcgcgtttgccttatccacaccaatgtcgatagaacggaacagggacgaaaagctcccggcggagtccagctgctcaaagagaatgaaggagcagatcagcatcaaaaggcagtttgtaagctccatagtgccgccgaagtaaaagccgatggcagcggtgcagacggcaacgccggtgagcttgttgacgatgaactgcgccagcatataaagaacagacggtatctccatggcgaaggaagccttgcgggcttcctctacagccccatgcacctgggttgcggaatcgtgggtcaggtcaaaattcttgacctcggcgatgccctgcacatattccagcaccttggacacaagccgctcgtcggcattgaacttccgctgggaaagggcctgctccgcccgctgcatggcggcgttgacggcgaagaacagcagcagtcccaccagtgttataagccccatacgccagtcaaagaggaacatcatgaccgcgatgatgccggaggtcaggaagcccctcgttgtgaccattaccacgcgggtagccacattcgccatgttttccatggtgttggtggtgacggacgtgacctcgccgaggctgttgtcattgaaccagcccataggcaggtagcgcaggtgctcggcgatttcgatgcgtttgttggcgcaggctcggtagcccgcacgggtctggagcatggtagccttcatgttgatggcgatggtcacaatcagtgatgcaacgatgatgccgaggctcgtccataaagttgccatagtgacgttcctttccagcagcgcctgaatgacgatggcggctgccggaatacgcatggcagagcaaatggcgctgaccacgcccagccagatagatgttataaacagcctgcggttgtccaccccgcagaaggcaaaaaattttttcagtgtcttgagcattacgccacctccccgtcgtctttgacgctgatgtgggcttcccacatggtttgataaagcgggcaggaagcaagcagctccgcctgcgtgccggtcgcttcgatcttgccttgattgacaacaatgatctgatc

SEQ ID NO: 3278 - DNA, 32759 bp, Unknown
  16S sequences of unknown bacteria
tgacttttcaaaagcggaatattttctcttgacaaaggtcacttcatattagatttcgcattccatattatgttgggccgttaagtgatcggcacaaagcccaaggtgcaaatcagtggattaaacggaaaaaagaaggctatatctatccgtggaatttttccgaaatggtggatgaacaggccagcaatgaagaattcattcagcgaatgacaaataagtgcacctatcttgtcggtgaagatgttttgccgaagaattctttgttatacacgaaattcatggttttgaatgaactgaataatcttcgcataagaggaaataaggtttccgtaaaaataaaacaggaaatctataacgaattattcaaaacaaaaaatcgagttacgggaaaaagcttgctaacatatctgcaaaaggacgatccagagcttcggagggaagatttgaccgggtttgatggagattttaaagcacagttgaaatcgtacatggatttcggaaagaaagttttcggaaaaagaattgatgaagaaccaattcagaatattgtagaagacatcattcgatggagcactatttacgacagcgattcaaaaatggttcgtcgtgcaatagagcaaaaatacggagacgtgttgacttcagaggaaattaaaaatgcgacaaagcttcattataccggatggggaaatttctccagaaaatttttgaatggagcagtaggcgttaagaatgaaaccggagaagttttcacggttattcaggcattatgggaaacgaacgataacctgatgcaaattctgagcagtgattacacattcatggatgaaatcaatacgcttaatgagaagaacatggatgaaatagcacatatttcttataaagagcttgttcagccgttgtatgtttcgccgtccgtgaaaagggcaatctggcagaccattcagattaccgaagaacttcgaaaggttcagaagggtgcgccggaaaaaatctttgtggaaatggctcgaggagaagacaaagaaaagaagcgaacaacatccagaaagaatcagctgttggagctgtataaaaattgcgaagcagatatacggtcttggataaaagaggactatgaaaactggattgaaggaattgagaatcgagaagaacgggaatttaatagtataaaattgtatttgtattacactcaaatgggaaaagatatgtacaccggagaaccaattgatattcatcagttgatgaacggaaattcaaaatgggaccgagatcatatttttccgcaatccagaatcaaagatgatagtctagataaccttgttcttgtaaataagacgagtaatcttggaaagagtaatactgcgctatccgcagaggtacagaaaaagatgaagccgttctgggcaaaattacgaaagaatggattcatcagtgaaaagaagtatagccgccttacaagaagcggggaatttacagatgatgaattatccggatttattgccagacagttggtggaaactcgtcagtcaacaaaagtggttgcggatttgctgcagaagatttatccgaatactcagattgtgtatgtaaaagcaagactagcatctaattttcgccatgatgatttgaaaatgcttaaatcccgaagagttaatgattaccatcatgcaaaagatgcttatctgaatattgttgtaggcaatgtttacaattcaattttcacttctgatccaagacggtggtttaaggagaaaggagaagctgcaaagaattataacattcagaaaatattccgccgtgatgttgtcgataagagcgggaagattgtctggttgaaaccaagtgtaaatgaagaaaataaatacattcgtaatgaggatggtggcctgaccggaggcagcattgatactgttcggaagacgatgctccaaaataatgtgttatatacggagtatacgtactgtgaaacgggacagttatatgatttgacagtgtataagaaaggtgattcgtcaataaccataccgattaaagccgagttgccaatagagaaatacggtggatacaagagcgcaaagacatcctattttgcagtaattgaatacgatggaaagaagaacgaaagagtacgtatgattctgggcgtacctatctatgtagcaaatatgttagaacaaaagcccggcgcatttgtagaatattgtgaaaatgttaaaggatataaaaacgttcgagtgcttcatgagaagataaagaagaatgctcttattagcgtaaatggattcccgatgcggatacgtggagaaaatatcggacaaatatcgctaaaaaataatatgcagctgatagtgccagaaaaatatgagaagttgataagggctgtagaaaaatacattactaatggaaaagactgtgaagtcgatgaaaaaagggatggtttttctggattagagttgaatgaactatatggcagtttgctggaaaaattaaaaaccgtatattgcggaagacctgcaaatcaagctttgaacttggaaaaatctaaaagcatgttcagtaatagtttagaattgtcgacaaaagcaactatcattaatgaaataataaatatgatgcgatgcgatatctctacaactgcaaatttgaaagagattggcggatcgccaaatgctggcaacatagctattagtaagaatatgaagggaaattacaaattggtgaatcaatccataaccggtttgtttgttaataccgaggaactataataatgagttggcgtaccgtggttatcacaggaatcgcaaaactggattacaaattagaatatctcgttgttcgcaaggtggattcaacaaagcgaatccaccttagtgaaatcgaactgctgatgattgaatccacctctgtttcaattacagcagcactaatttccgagttgataaaccataagattaaagtgattttttgcgatgaaaagcacaatcctcagtcagaactgcttccttattatggatctcatgacagtagcgggaaagtccgtgagcaagttaaatgggatgaagaaatccggaaattaatctggacagagattataaccgaaaaaataaggcaacagatgattcatttaaagagcaagaatctagaagagtctgcaggattgttgaaacagtaccttggtgaaattgaacccggtgatgttacaaacagagaggaacatgcggccaaagtgtattttaatgctctttttggaaaggaatttactcgcagcctagattgtgttacgaatgccgcactaaattatggctatggaatattactttcgtactttaatcgtaatatttgctataacggttacataacacaattaggactatttcatgacaatcaatttaatccatttaatctagcatcggatttaatggaaccttttcgtgtgcttgtagaccgagaagtatgcaagcaaagatttgttaaattcgaaaatgaagaaaagttaacattggtaagaatgatgaacgaaagaatcctaattgacggtaaaaacaatacgatatctaatgcaatacgtatatatacaaaaagtgtttttgatgctatttcggatcgagatgttgctcaattaagattctatagatatgagttatagatatatgagaataatggttttcttcgatttgccaacagaatctcttgacgataaaaggaattatcggaaatttcgtaagtttctaatttccagtggatttctcatgatgcaagaatctgtatattgcaaacttgcactgaatcagactgttgcgaatgcagttgctgcgcaagtacgtaaaaatgttccgccggaaggaaatatacaaatgctaattgttacagaacgacaatttgcacgaatggagtaccttgttggagaacgccaagattctgttattgagaatgatgagacgttggtaatattatgagactagattttctatcatgtgggttgacttttaagattcatcaggaaagtatgaattcaattaaaatagaacggcatcgtttatatgaagaaatgattcaagatatctattatactgtgggaaacgttacggatagtgtgaggtgctggacagacgagaatgagcgatatgatttacataaaaatggcgatatcatactttcgccatttgacttaacatattcaacggcagaatataaaaagaaagtaattcttacacttgcgatgaatttggaggagcggggatatagtgatgtattaaagaccgcatatctcgaaagcttgcaggaactggaaaaagcaattgtttcaacggattatgaaatcgagtatgaccccgttattgctacggaaaattttttaaaactcttaaatgtacgattgaaaaatccggaggggacatttatagaaaagctgtgtgaatatgtgaaaaccacacactctctattgaaaaaagattttttgattttaattaattgtgcggcatatttaagaaaagacgaatatgctgttttagaagaatttgcaaaaacagaaggggttacgattttagtttttgatacaagggaatatgacgattccttagatgaaatttgcgaaaaacacattgtggataatgatttatgtgagttatacttatagaagatattgtgcgtactgtatgagatgcaacagaatgtagtgctgttactcgaaaattgaggtttgagagtagtgttatctcatatggtagtcaaacttcataaccagcgcactgatcacaaggaatgtttgagagtagtgttatctcatatggtagtcaaactggcgggtggtagattgcactagatacctgtgtttgagagtagtgttatctcatatggtagtcaaacctccccttgacaactatataataccacaacgtttgagagtagtgttatctcatatggtagtcaaactaccaccgccacgggcgcccccgtaacctagtttgagagtagtgttatctcatatggtagtcaaacgaacagcgcctcgaactcttcctctgtatagtttgagagtagtgttatctcatatggtagtcaaactgtaaagaagcacaagcccacacagcccctgtttgagagtagtgttatctcatatggtagtcaaacgcgttacaacattaacccgtccggcggccgtttgagagtagtgttatctcatatggtagtcaaactgttgtcactgaaatgtctgacgcgatcaagtttgagagtagtgttatctcatatggtagtcaaacctaacctacaatttttgtcaatagtattttgtttgagagtagtgttatctcatatggtagtcaaacgaggtagaagaaaagccaaatctccaacatgtttgagagtagtgttatctcatatggtagtcaaacatcacaaccggattacttagcacagttggagtttgagagtagtgttatctcatatggtagtcaaactagatttattgctcgcagaagtgtcgaaaagtttgagagtagtgttatctcatatggtagtcaaactcgcctcttcttctccggttactcgtgttagtttgagagtagtgttatctcatatggtagtcaaactctacctgtccaatgaaattgaggatcagtgtttgagagtagtgttatctcatatggtagtcaaacgagaagaaaatggaaaacatgagcttgtcggtttgagagtagtgttatctcatatggtagtcaaactgaggactaattgaaaggagaacggaatgaaagagaagaaaacagagtttattgcagtaaaggtaacaccttctttcaaggctagggcgaaagctctagccactgaggaagggagaagcctatcgaactatattgaatggttaatcaacaacgacatgaagagaagggaacaggaagagcaggaataacagacaacgccctccccttgcgggagggttattttattgcataaaaaaacgggtccaccgtttccagcagacccaaaagcaaaatattattatcaaacaaaagtttggtaacatcatggattataacacagtttccgagactttggaagagtgctttgacgagttcgaagggcagttatccgatggactctatgaaaattcaaactggggcgggtacgaggttattgacgatttcgaccttgtgaacatcgtaggtgaagagatcggcgctctgttccatgtgtatatttggtacccgtctaacagaatgtgggatgattccattgaggacatcagctacatttgggcggaaactgaggacaacgctattcagcgcgctatcgagtatatgaccgattccgtctatgattcttgcgactacgacgaggaagagcgagcggaacagatggaatactggagaaatccgaaccattacaaggctgaacttgatgaggactaattgaaaggagaacggaatgagagagaaaaaaacagaatttatcactatgaaggtaacaccttctttcaaggctagggcgaaagctctagccgctgaggaagggagaagcctatcaaactatattgagtggcttataaacaacgacatgaagcagaaagaacaggaagaccagtttgagagtagtgttatctcatatataaatgataatccggaacactgagtaccggcattccagagatagagtaccacaggattgaagctttgttcgctatcggtcggtctgagaacatagacttttcgcattgagatttcgagattcgaatcaagactttcataattgttattgagaatgaaagcactttagcacacattttgtataacaatatgaaccacgtgaatatgatttccgcgcaccggaatatccaatgttctcgcaaatgcggcgatggattccttcattgaagagctggaagaaatcctcgccggggcctgagcggaacgaaactttttttagtgcatggtgatggtgggcccgaagaagatgaagagggcggcagccagaaaggtgagacccagaagtaggatgatggtgtagaggactttctggggccgggcgaacctttggacgtaggccattttgggcttgcgggggttgtagaatacatcaacttcggagccgattgggtacagttccagcagtgggctttcggtgaggccggcgagggcgttctgccggaggttgagtttcagcacgctggggaggtcctcccgggtggtcaggttcgaggtgatgtcggttttggcccggtggaagggggacgaaaaggacttggtgacggtggcgctgaattttgggccgacaacggtgtaggtgcggccgtttgccgtgtattccaccacgggcaggttgatgtcgttgtaacgaacggcggaatagcggacgacggtgccggtggttttgacggagcagagctcggtgtagtgttttttgcggtagtacaggaagaaccataccagcagggcggcaacggcgaaagccagcgtgtagagtccccagaaaatgttccaattcatttcaatcacaatcctttttttacattgaacagatgggcgcgacatgctaaagtggagctaagcagcgcggccggtttttctgggttgagtgtaccacagattggggccgggcggaagaattggaaggacgaaactttttttagggagtgaagcggggaggaaggagcgatgccaacgatggacagacggattaaagggtgccgaaatgtgcactgcagatacaacaaggagcggaagcatttgccgctggactataactattgcccgatttgtggggagaaggtcgggctggtgtgccgggagtgtttcgcggagattgaggatctggggaagacacattttcggtgcgatgcctgtgaggcgaagaaagcggaacgggcagaggcgcggaaagataagctggagaaagcggggaaaaagctcgcgacgccggcagcggatgcggcggttggcataattcagcaggtcgcagtgaaacaggtgaagaaggtggcacccgctgccgggcaagcggtgaagaaggcgatgccggtggccgggaaagcagtgaagaaggcgattgtggggcactaagggaaaaggtaagaggaagagatgcacgaagttgataaggaaacgaatcagcgagaaatgggcaagcatagaaaggagacagcatgaacgaacctatgacagacaatcagatgaatgtaatccttaaccttgtagcagacaagttcgagtcttgcaaggatatggaagaagtaaagaaagccattgaagaagttcgaagcatggcgaaaaaaggcgaataaaaaaagaagcccagcttgaaaaggaaagataagctggagaaagcggggaaaaagctcgcgacgccggcagcggatgcggcggttggcataattcagcaggtcgcagtgaaacaggtgaagaaggtagtgccggtggccgggaaagcagtgaagaaggcgattgtgaggcactaaaggaaaaggtaagaggaagagatgcacaaagggcggcggtccttcgtgcatctcttgtcatttgtggggctatgagccccgtcgagggctcgaagagtccgagacaaataaaccacccgctatgcgggtgcgcatcgaaggttaaaccaatagactcccattttgctacaatgagagtgttcaagcctcagagtagaaaggagagtctatggctaacaaaagttatagccttgcacatacgaaatggatgtgcaaataccatatagtctttacgccgaagtacagacgaaagattatatacaacaagtacagagaggacttgatcgagataatgagaaccctctgtaaatataaaggcgttgaaacaatcgaagggcatatgatgcctgatcatgttcatatgcttgtagcaattccgcctagaatcagtgtatcaagtttcatggggtatctcaagggaaagagcgcccttatgatgtttgagagacatgcgaatttaaagtacaaatttgggaatcggcacttctgggcagaaggatattatgtaagtactgtaggcctccatgaagaaacaataaggaaatatataagagaccaggaaaagcatgatatggccgtggataagctgagtgtgaaagaatacgaagattcatttgttaaataagcccctttaggggcggccaaagtggcaatgacactgaggcttgaacaaagtgaaaacccgcgtcttgaggcgcgggtcagtaaagggggcttatagccccagttcgaaccacccgttttacgggtggcaccgattttatctgaaagcgggacgagccggcgcgggctctaattcgggacgctttccgggaattggtagaaagtgatgcaggaacgcttcgaaaagaggttccggcatcactttctccgcgaccgctggggagattgggatgaaatgcccgaggggaaccggaggtatgtgatgcaaagaagctggaagcaagggctagtacatcacttttttagtgaagtgaaagttaagtagaggaaattcaacatggaaatatttggagttgatgcatgggacgaaaaaaagtgtgttcatgcatcaactttagaaacggggttgatgcacggagtggaaagacaggaactcgtgcatcattttttggaagcgagggcgggcggcgcccgcgcagggcccgggccgcgcagacagggggatgcccgacggccggaggctccaaagggaaggattttggtcaatgggctcgggtgcggaaccggcgggttgccaggggtgccgggctgcgatacactcgagctaaggatttggtataaaaaccgcagcactgcggcggggctcgccttgccggacgtgggtgccgaacggactttgtttttttaggagaggggcgtgtgatgatcgatagaaaaagtgcgcagccggtgtggaagagccatgagaagacgtcggcggagaaggaagcgtggctgcggccttttgaggaggatgagaacctccggatgatggacgaggagacgctggcgaaggcgcggcggtacacggaggagctgtgccgggaggacaatgtttttgcgctgcggctgaaggggtacgcgtgctacgggggcaaccggctgtacgagtgcgactggacggcggcgcgggactgcatgctgcggcttcgggagctggcggacgacgcggagtacgcgaatacgctgggatacatctattattacgggcgctgcaacgggggcgagccggagtacgagaaggcgttcacgcagttcagctatgcggcggccaacgggttgttcgaggcaatctacaagctgggggacctgtacagccacgggtacggctgccggaaaagcgaggagacggcgcagaacctgtaccacatggtgtataacgagaccaagaaaaaattcctccgggggtatgatgcgagttttgcggatgcggcgcttcggctggggaaggtgttcgagtacggcatcggcacggaggcgaatccggcggcggcctactgtctgtacctggaggcagattttgcggcaaaaatccgggcggaacactcggattttttcggggatcattcggtggcgaagcgcacggggcaggctttggagcgggtggcccggaagcttccggcggagtttttccgggatgccctgtggctggatacgcctcttccggtggtggatttcctggaggacggctaccggtgcgagctttccttccaaaaaaaagaggacggcggggcgtgggtgaccggcatgcgaatcgggacccgcacctgtccggatgtggaatatcggctggcgaattttggcggactgggcgtggtcatccgctgcagggaactgtccctgaaaatggaggagccggcagaatatgaaatctgcgacggtggggacaccgctgtgttcgactactacgagcggaatacctacgatgaccaggatgagttctacctgggagataaactggtggcctggatcaagtgcccggggtatcgggtggaccgggaggttctgtaggggaacaaaatgctgatgggaatcgatgtggaaaggccggagaggcgaggaaatgattagagaggcgaggagatgattagaattgacgacgaacggggggagatgtggtgttcgtcgtcaattctttcctttcgggaattaggatgggaaagagaagcacgaagggcggcggccgtcgtgcttctctttttattccatctgaaagcctgaaagcggcccgaatccggcgcgcacctctaattcgggccgctttccggggattggtgaaaagtgatgcaggaacgctccgaaaagaggttcctgcatcactttctccgcggccgccgggttgattagagtggaatgcccgagggggagcggaggtatgtgatgttgggaagcagaaaaccggagttcgtacatcactttttcacttgagcgaaattaaagtagaataaatatagcacagaaatgattggagtgatgcatgaggcgaaaaaaggggtgctcatgcatcaacatggaaaatggagttgatgcatggaacagaaaaacaagggctcatgcatcactttttggatgcgaggccggcggtcggctcatccccgtggcggagccgcatccctcgccccgcgccggaggcccaccaaaaaaggaccgacgcacagtcggtcctcctaattcttctaatccttctaattcccctactttacctttcgggttttcgtggtcttccagttggattgcagcttcttctggattttggcatgttcctgccaggttcgggcgaagtgcagccggcccttggagtcggactggaagtaataatagctgttgttagtgggggtcagcaccgcattgatggactccatgctcgggcagcaaattgggccgtaggggagacccgggtatttgtaggtgttgtacttggaattgtacttggtgtctgccagagaaatgatgtcctttttgatgccctttgcgtactctacggtgacgcaggattccagcttcgggaacttgtccgggtggtggaggcggttcaggaacacgccggccacggttttccggtcttcggtggtggcggcttcgctctccaccatggaagctaagataatcacttgatccaaagtgtacttgctcttcttcaccttggccaggatttccggcgtgtacaccgtctgctggaagtgatccagcatcgtgttgatgatgttgtccgggtcctcgtcctttgtaaagtagtaggtatccgggaagaggtatccctccaggccgccgatgcgcttggaagcgggcaccttcttcaggaattcgtagttaaaagaatgggttttgcaggctttgagaaattccgatttcttgcagacgccggcctcctccaggatggtccccatttcgcgcacctgaataccctccgggaaggtgacacggatgtctcccgccggtttgcccatgattttacaaatctcgaaaaaactgctgccgccgggaatcttataagaaccggggtaccagttgccgtttcggccttccacttccgccacaatccggaaaaggaacgggctctgaatcaagccttcctctttcagcttgtcggccacgatgatggagccgtcgccggaggatacggtgacctcgcccccatcgcgattcgcagtgatgccggatgtcaggacgccgagcagcagaagcagagctgccaacgcggcgattgctataattgtcattttttttcgtttactcataacaataagaatatcacagcggtaaaaaaaataaaagttaaaccacagagataccgagaaaaattcacagaatcgtcattgactacggggcgcgataggattaaaatgtgtagcgtgctacatgtagcacgctacacattttacaattagaattcattttgccggaggcccaatcccggcagccgacggcccacacagcagccggagacccaatcacagagtgcctccacatgaataaaggagaaaaaatgaaggaatgcaaatgcaatcggaacgaaatcggcatgctgatcaagcagatttccttccagctgcgaacccatgcggacatggatttgcggaagtgtgacctcacctggtctcaagcccacctgcttcggcacctggccaagaccgaaggacagatgtcccagaagcagattgagaaagaattggagatttcccatcccaccgtggtggggctggtgcagcggctggaaacaaagggttttgtggaaagcttcaccgacgagaaggatcggcggattaagatggtgcggctgacggaacgggcgtacgagcaccagcattttatggagacgcggttccgagagaaagagaaattgatgaccagaggcatgagcgaggaggaagtgcaggaattgattcggctcctgcgaaagctccacgccaacctggaagtcggtaaggaggataacgatatatgatcaaaaagttaatgcaaagcatccgggactacaagcggccggccattgagacaccggtgtttgtgggaatcgaggtgctgttcgaatgtgctttgccgttcgtgatggcccagctcatcaaccacatgaccggagaatccatggatccgattgtgaaatacggaagcatcctgctggtgatggccatgctgtccctgcttttcggcgttttggcagcgagaaaagccgctactgccggcgcaggattcgcgaagaacctgagacacgatattttctatgcgattcaggacttctctttcgcagatgtggaccggttctcctcctcctcgctggtaactcggctcaccaccgacgtcaccaacgtgcagaacgcctttcagatgatgattcgaattgtggtacggaccccgctgatgatggtgttctctctggcaatgagtttctccattaatccgagaatggcgctgttgttcttctgcgtgatgccggtcatcgccatcgcgctgatctggatgattcgcaccgccatgccgattttccgacggattttcaagaaatacgatgccctgaacaactccgtgcaggagaacatcgccggcatccgagtggtaaaatccttcgtccgggaggagtacgagcgggagaaattctatcgagcatccgatgaagtgcgaaaggatttcacccatgtagagcgtattctggccctgaacagcccggtgatgagcttctgcatgtccgcctccatgctgctcatcagcttcttcggtgcaaaaaccatcgtgaacagccacggaaccagcctgaacaccggagacctgtccgccctgatttcctacggcgtgcagctgctcatgtccatcatgatgctgtccatggtgttcgtcatgctcaccatggcacaggaatccgcgcgaagaatcacggaggtgctgaactacgagaataccctgcactccccggaaaacccggtgatggaagtggccgacggaagcgtggacttcaaccatgtttcttttaagtacaatgaaaaaagcaagcggaacgccctgacggacatcgacctccatattgggtccggtgagaccgtgggcatcatcgggggaaccggttcctccaaaagctccctggtgcagctgattccgagactctatgacgtgacggagggctccgtggaagtgggcggcatcgacgtgcggaactacgacgtggacaccctgcgggacgcggtggccgtggtgcttcagaagaacgtgctgttctccggtaccatcaaggagaacatgcgctggggcaacaagaacgccacggacgaggaaattgtggaagcttgcaagctggcccaggcggacgagttcgtctccaaattcccggacggctacgacacctacatcgagcagggcggaaccaacgtgtccggcggccagaagcagcgtctgtgcattgcccgggcactcctgaaaaatccaaaggtgctgatcctggacgactccacctccgcggtggacaccaagaccgacgccctcatccgtcaggcttttatggagaagattccgaataccacaaaaataattatcgctcagcgaatttcgtccgtacaggacgcggatcagattctggtgatggatggcggccgcgtggtggaacagggaaatcacgagagcctcattgccaagaacggaatttaccgggaaatctttgattcccagaccaaaggaaaggaggaagaataatgccgagaccaagaagaggacaacccgttggcgaaattcgcccgggaacgatgaaacgttttatcaaatacctgaccgaccattataaaggccggctgctggtggtgctggtgtgcattattttatccgccatctccatgtccttctccaacgtattcctgcagcagctgatcgatcaagtcatcctgccgggaatgaaggtgggcatggagtcggtacaggcaaaattcctccgcatcatcggaaccatgggcgtgttctacctggtgggcatggccacttccgccatctacacccagattatggcgggagtcacccagggaaccctgaaaaacctgcgggatgagatgttcgacgccatggagaagctgccgattaagtacttcgacacccacgcccacggcgatatcatgagtacctacaccaacgacgtggatgccattcggcagatgatcggccagagcacgccgaccttgattcagaccggcctgtccgtactcaccatcgtgttcatgatgctccggtacagtctgtggctgacgatggttgtttttgccgtaattctcctgatgttccgggtgacgaaaaagctgggcaaggagagttcggtgtacatgatgcgccagcagaaatccttggccaaggaagagggctttatcgaggaaatgatgaagggccagaaggtggtgaaggtgttcacccacgaggaagagagcaagaaggaattcgacgtgctgaacgagcagctcttccaagacagcgcccgggccaatgcggccggcaacatgctgatgccgattctgggaaatatcgggaacatcctgtacgtgctgctggcgctggtgggcggactgctggtggtctttggggcgaccaacgtgagcctgcggggcttccggcccattaccatcggcattatcgtgtccttcctgggcatgtcccgccagctgtctcagaccatcggtcagatgtcggcccaggtgccgatgatttccatggctttagccggtgcgggccgggtgttccggctcatcgatgaaaagccggaggaagacgagggctacgtgcatctggtgaacgtggtaaaagaatccgacggcagcttcaaagagaccgaccggaatacggagatgtgggcctggaaacgcatgactccgggttacgcggaaccccagtatatagaagtaaaaggcgacgtgcgcctgcaggatgtggacttcggatacactccggagaaacaggtgctccacgacgtaagcctgttcgcgaaaccgggtcagaaaattgcttttgtaggtgctacgggtgcgggcaaaaccaccatcaccaatctgatcaaccggttctacgacatcgcggacgggaaaatccgttacgacggaatcaacatcaaccacatctgcaaaccggatcttcgccgttccctgggcatcgtgctccaggatgtgaacctgttcaccggaacggtgatggacaatatccgatacggacgactggatgccaccgatgaggagtgcatggaagcggcccgcctggccaatgcggatgatttcatcacccgcctgccggagggatacaacaccatgctcaccggcaacggcgcccagctctcccagggccagcgccagctgatttccatcgcccgggcggcggtggcggatccgccggtgatgatcctggacgaggctaccagctccatcgatacccgaacggaggctttggtgcagaagggcatggacaacctgatgaagggccggaccgtgttcgtcattgcccatcgcctgtccacggtccggaactccgacgccatcatggtgctggatcagggccggatcatcgagcgaggggaccacgacgagcttatcgcccagaagggcacctactaccagctgtacaccggtgcctttgagttggaatagttataataaagagaacaacctgcaccggtccgccgtctcgcggaccggtgcaggttgtttcatatccgggcgccgtgcgggcggcggagacttggtgcacgaatccccgaaaacccttattcctccgtttgctttgcaccaagtctcgggcccgttttggcgcgtgggcggcggggacttggtgcacgaatccccgcaaagccttattcttccgtcccctttgcaccaagtctcgggcccgttttggcgtgtgggcggcggggacttggtgcacgaatccccgcaaacccttgttcctccgttctcattgcaccaagtctcgggcccgttttggtgcgtgggcggcggggacttggtgcacgaatccccgcaaacccttgttcctccgttccctttgcaccaagtctcgggctcgttttggcgtgtggccggcggtgacttggtgcacgaatctccgcaaggccttgttcctccgttccctttgcaccaagtctcgggctcgttttggcgtgtggtcggcggggacttggtgcacgaatccccgtaaagccttattcttccgtcccctttgcaccaagtctcgggcccattttggcccgccgggctctttttgcggttatgcttttcatcaatttacaaaaaaggtataatgaaatggcccgattggcgaggggccgattcgggcaaaggaaagggacgagaagcaagcaatttataactggggggataatgataggagaaagaacatgcttaacaaaatcgctcgtttagtgggcgccttcttcatcacgctggtggttctgctgctgatgctgttcatcgtgctgacggcaatggaatatcggccggaaagcacggagaaggtaagaatcgacagtctggcagaggatacctttgattccccggaggtgggatccaccatcaaggtgatgagctggaacatcggctacggcgctttgggagacaatgcggatttctttatggacggcggaagtcaggtgactaccgcttctgcagagcgggtgcaggaaaacatgcagggaattatcgatgaattgaaaagccagaaggcggatgtgatgttcctgcaggaagtggatcgtttttccacccgtgcccatcataccgatgagcagcaggacattgcggaatccatggatggataccagactacttttgccaacaactttaaggtgagatacgtgccgtatccgtggccgccgattggccgcgtggacagtggcatcatgaccctgtcccggttcgcgcagtccgattccacccgaatcagcctgccgtgcccgtttgaatggccggtgcgcatcgcaaacctgaagcgctgcctgatggtgaaccgggtaccgattgcgggaaccaagaaagagctggtgatgatcaacctgcacctggaagcttacgacaacggcgagggcaaggtgaaacagacccgggccctgctgaaggtgatggaagaagaacagaagaaaggcaattacgtgattgccgggggagacttcaaccagactttctccaacgtggacatcggaaaatatccgggcagtgaggacatttggaccccgggcaagatcgacgcaaaggatttcggcaaggactggaacttgctgatggacaacagcaatccgacctgccgttccctggacaaggtctacaagaacgcggacaaaaaggactgctactactacatgctggacggttttatcctgtccaagaatctgcaggtggattccataaaaacagagaatctcaacttcaagaattccgaccacaacccggtaattctgaaggccacattgaattagcggaacgaaaaaagcggcgcccgaaggggcgccgccgtgtatacgcttacagtgagaattttttcagcagtaaaagcagcggattgatgtcgtagaggggaccggcgatataggagctgttcagctgttcattgatggcttgaatccgatccgggaggaagatgcccgccagaggaaacataaaggccaggaacagaaagacgaacagggttcctttcagcacgcccaccgcaaaaccggcaaaggaatcggtgctgccgatgacggtgcctttcttccgagcgacgtgaagccgccggcgaaggaacagggaaatcaagctgactccggtggtaatcagcaggaaagacagcacgagaaccgcggtggtcgtaaaatggctcacctcaaaaggaaggtccgaaacaccgaagttctgaagggcgtcttccagggcctttggaataaagtccagcaggttcacggtggagccctggaaaatgttttccaggccttgctgcatggaggcctgcagaggtgtttttcgaatcagggcgctgaggggccgggtaagggccgtcgccaaagcgatgccggccaccatggcggccagccgaatcagggactcccccagtccacgggattttccccgaacggcaaaaactataaaaataagaatcacaattatatctaatatcatagctgtattatacacaatctgagtgaggaaacaatggaaaagtattggaaatctccggaagaaaaggaagacaattccctcttccatcacatcgccataatgtgcggaatcttcggcggcacctccctggtggcgtacgcggtttccttgaaattgatttcctccgaagccaccatcatgctgtacctgctctgcgtattcctggtggtgtggcgcaccggacgattcagcttgggggttattacctccatcgggtccaccatggtgtactattatttcttcgcatcgccccaattttcctacgatatgaccactccgccccgatacctcctcaccatgggcatcatgatttcggtggcactggtcaccagcggactcatttcccaggttcggcaggaagccctgattgcccgagaaaaagaggccctgacggaacaactgctgcgattgaacaacgacctggccggcgccaaaagcgcagaagccatcatcggaatcgcgctgtccgccatcaacgagggtgtcggctgtgccgccggctacgtggcgtacgatcccggaggcaaacccggaagcagatacatcttccagaccgtgggacatcacacggcactcacctggtatcccatggaagaggacgaaaacgtgcggtatcggattcagaatgggaaaacgattttcgtacggggaaaacaatattacgaatggcccttgcgcggccatgccggtctgatgggagcgattcgaattcggctggcggaacaagaaaacctggaccggacgcagatccaccttatgcgctccatcatcgataatatcgggatggcgttggaccgattccgcaccgcggaactgcggattcaggcccgggaagaggccacccaggaacgattccgctctacattgcttcgttccatttcccacgatatccgaactccgctcaccagcatttccggcaacgcggagatgctgatgaaagcaaccaagtcggaagattaccgctaccgcatggcgaagaacatctacgacgatgcccagaacctgtcgggcatggtggaaaacgtgctaggcatcacccgcctggaaagcggcgtggagattaagaaggaagtggaagtggcggaggaagtcatcggtgcagcggtgcagctgacagaggtgcaccacccggaatacgatatccaagtatccgtaccggaggaaattctcatggtaccgatggatgcatccctgattcagcaagccatcaccaacctgctggaaaatgccattcaccacaccaagaaaaaggatggggtggcagtcatcctggaacggaaggggaacgatgcggtgttcaccgtgcgggaccgtggaatgggcatcaatccggagcacttggatcggctctttgaaccgttttatcagtccaatcgaagcgatcaggtggtgtatcgaggttttgggttgggcctttccatctgtaattccatcgtgaatgcccacggcggccggattctggcgagaaaccggaaagatgtgtccggggcggaaattatttttacgttgcccatggagggagaacagtgaaacagacaaaagaacttataatgattgtggaagacgaccggcagattcaggattttatcgcctactcgctgatgacggcgggattcggcgtgctgacggccggcggtgtggaagaagctgtgcggaagatgcggtccaaaaaaccggatatcatggtgctggacctgggccttccggacggagacgggctggacctgattcggcgggtccggaagttttcggatattccgattatcgtggtgtcggcacgagataaggaagaggacaaaatcgaggccctggatcggggcgcggaggattatattaccaagcccttctccgagtcggagctgatggcgcggattcgggtgctgcggcgccacctgattcgggaagagcggaaccggatgggggccgaggtttcggtgcggggactgaagattaatttcgacgcgaaggaagtgaccctggatggaaacctcctgcacgtcactccgctggagtaccagctgctggagctgctgttccacaacatcggaaaggtgattaccacccggacgctgctggacgagctgtacggcgtgagctacggggacaatacccagtctctgcgggcgctgatggcgggacttcgccggaaaatcgagaaggtgccgggaaaaccgcagtacatcgtgacggaaatcggtgtgggttatcgcctgaaggatgaatagaaccttgccgataatgccggaaatagtgtattattaaaatatatttttgtggatgagaaaggaaagcagagaaatgaagaaacgatccaaaatcctgatttcatgcttgatgatggtgattcttgcagcggccatgatgaccggctgttccaagaaggaagaggcgaagccggaaccggttcggaacccgttgaccggatctgagaagttcgattctgcggcacagggaattcgcccggtggcactggtggtggaaaacgctccggatgcccgcccgcagtggggaatgacggacaagaagtactccccggatattattttacagggagaagtggagggcggaattacccgtaccctctggttctatgcggattacaacaagttgccgaagaagatcggcccgatgagaagtgcccgtccgccgtacatcaagttctcggaactgttcgacgcgattttcattcactggggacagagttcatcttcctcggagtacaagggcgccaacaccgtttttaaggaagataaggtggaccatatcaatcagatgacctacaaaggaaaggtggatctgtacagccgggacaacagccgggacgtatcgtcggagcacaccggaattctccacggcgacaaggtggcggatgccatcaaggacaagaagttccgcacaaagaccaagaagaaggtaacacagctgcagttcggcaagggcattcgggatctgagcaagaacacctgtggaaaggtgaccctcacctggtcgaggcggagttttgaggatgcggtatggacgtacaaccaggaatccggacagtatgagacgaaggattttgagaacaacttgagccgggagaacctgctgattctcttcgataagacccagtacatcacaaaatccaattaccacggcacgggtcagggtgtgacttactgtgactacaagctagccggcggcaaggcgaagctgatcagcaacggcaccgtaaaggacatccgctgggatgtaaacgaggacaaccagctggagctgttcaccctggtggagaaaaaggattccgacaaggacgatgaggattccgagccggagaagaagatggtttccctgaacccgggcaaaacctggatcggctgggcttcctccaacaacggcggcaaggtaaagattgatccgttgaaggaaaagaagtcggaagagaaggagaaataacgaccctccgggaagatctcggaagggagcagtcggaaatcccctgccggagacggccggggatttccttcgaataggggaagaagtaggaagcgggccccgcacaaccaaagaaacgaggtacacatttatgcagttgagaggagagcaaaagtcccttcgctcagaatacatccgatacatcattccatccatactggctcagtgggtgtacaccctgtacaccgcagtggacgggctgttcgtggcaaaaggcgtttctgtaacggccatgaccgccatcaatatcgcatcgccgtttgtgacggcgctgtttgccctgtccctgatgttcgcggtgggcacctccacggtggtttccatctcattgggagaaggccggaaggaaaaagccaacgagatattcagccagaacttcgcgttcctgatcgtgctgtccctcctgatttccgggctcctgttctggaagctggaggaactggccctgttcctgggggccaccaaagccaccctgccctatgtgacgaagtacatcggaaccatcgctccttttgcggtggtatttatcgtgtcctattcctttgagattctgctgaaggcggacgggcatccgaagaaagccaccaaaatcgtgatggttggcgtcatcctgaactgcatcatggactatctgctggtcatcgtatttccgctgggcgtcttcggtgcggccattgccacggcactgtcccaggtgggggtcacggccctgtatctgcggcacttcctgtccaaggaagccgtgctgcatttcacccgctttcattttagcgggcgcaccattgtgcgggccatgaagaacggcctgtcctctggaattacggagctgtccgccggactgacggtgtactttttcaaccacgccattgcggcctatctgggggacgaggccttggtcagctacaccatcatcaactacgtgaacgccctgtacatctattccatgacgggaatcgctcagggcagccagccgctgatcagcttctatcacgggaaaaaagaaaaatccgccacggccaagctgctccggtacggcctgattacggcggcaggttttgcggcggtcaccgtggtgctgtccgtattcggcggaggcctgctggcgaagctgtttattccggcggatttgactcacctgagaaattacacggtacatgctttgcggattttctgcatctcctttgtgccggcgggattcaccgtggtgttggccggatattttgcatccatcgagcacgcggggaaagcggtttccatcaccatcggccgagccatcgcggtgatgctgctggtactggtgctgatgacgagagtttttggcggcgaaggcatctggtggaccacgccgatttccgagagcatttgtctggtgtatgcggtaatattgtttataaagggaaaggcgagagatgctgcaaattaagaacattcgaaaagagtaccgcaccgggggactggtgcagaaagcgctggacggcgtgagtctgaatttcagggacagcgagttcgcggcgattctgggaccctccggttccggcaaaaccacgctgctgaacgtactgggcggactggaccggtacgacagcggagacctgatcatcaacgggacatccaccaagaagtacacggaccgggattgggattcctaccggaaccacaccatcgggttcgtgttccagagttacaatctgattcctcatcagaccatcctgtccaacgtggaactggcactgaccatttccggaatcgggaaggaagaacggcgaaagaaagcggcggaggccctggccaaagtgggtctgggagaccagcttcataagaagcccggtcagctttccggggggcagatgcagcgtgtggccatcgcccgggcgttggtgaacgatccggacatccttttggcggatgaaccgacgggggcgctggacagcgtgaccagcgttcagattatggatatcctcaaagaggtggcggaggatcacctggtaatcatggtaacccacaacccggagctggcccgggagtacgccgaccggattgtggagctgaaggacgggaatatcatttcggactcccggcctttttccgtgagcaaagaggaagcgggaaaagcggtgcaccggaacctgggcaaagcggccatgaattttgccaccgctttgcaactgagcttcaacaacctgaagaccaagaaagcccgcaccattctggtggcctttgcgggatccatcggcatcatcggcattgccatgattttatccctgtccaatggagtgaacaactacatccgcggcgtggaggaggacaccatccgggaatacccgctgacggtggacagctctggcttcgacatgtcggccatgttcacccggggcggcgatggggacgccggcaagagtgcgaaaaagggggagattcgggaactgcagacggtgaccaatatggcctccgtcatggaatccaatgacctgaaatccctgaagaaatacatcgacagcggtaaaagcaatttggagaggcacacgagagccatcgaatacagctacgacgtgaagccccagattttccggaaggtggacacggaataccggaaggtgaatccggacgaaacccggaaaaagatgggcatgtccatcagctcctccatggcatacagcagcatgatgagcaccgacgtgttccaccagttgccgtcggatccgtctctttaccgggacgagtacgacgtgaaggcggggcactggccgaagaagtataacgaatgcgtcctggttctgtccaaggaaggcatggccagcgatatcgccctgtacgccatgggcctgaagaacatggacgacctggacaagatgctgaaggatttctccaagggaaaggacgtgcattcggacgaggaccagaccgaaagctttaactacaacgactgcatgggcatcaaattcaagatgatcggcagctcagactactatacctacgatgcctcccagaacgtgtgggtggaccgctccgaggacgacagccatatggaccgcgttatcggaaagggggaggacctgaaaatcgtgggcgtggtgaagccgaagaaggatgtggatttcaccgtgctgaacggggatatctactatccggcctccctgacggaccatatgattcggaaggcggcggacagcaaagtggttcgggcccagaagaagagtcgggacatcaacatcctcacgggaaaggaattcggcgaggagagcgacggaccggacttcgagtccatgttctccttcgacaaaaacgcctttgccaaagtcttccaattcgatccgtcccagatcggaaaggccatgaaggcaccgtccaagaaaatggacatgagcggcctcatcgacccgaaggccgtgacccaaatgccgggcatgagccaaggggacattcagaagctgatgcagagcaccaagctgaacttcactcaagagagcatgcaggagcttttcggcggcctgatgaaaggcttcctggaatactccgcgaaaaagggcaccgactacaccaagatgaacaccgcctttcaggattacatgaaatccccggcggcccgcaaaatcctctcggacaacatgagccgcatcctgaaggcccacgtggaggagcagctgaaggacgagaacctgcaggacaccatgaaggacgtgcttcaggacttcccgaaatacctgaaggacaagggcatcaccgaccccgacggcatcaccgacgagaccatcgacgagttcctggcgtctcagggagtgcaggacaaactctccgccaaaatgacttccctaaaaacaaaactcgagaacgtggagatttccgacgaggatggggatcggatcatgacggagttgatggagggctacgcaaaatttgcgaaggagaacaactacccgaccacgcagcagatgcagcaggattttcaggagtatctgtccaccccggaagcccagaaaataatcaattccaccgtggcaaagagcatggatacctcggcgctggagaagaatctggcggcggctatgtccggatacaccgccaaggcggtggcctccatgtcggaaaaactggtatccggcatgatgaccaactatatgaagagcatgggcagcctggatttctccaaagcctttaagatcgatacggatgcttttgcggatgccatgggaatgaacatgagcgagagcgagattcaatccctgatcacgtccctgatgaacacccaggccaacacctacgaaggaaacatgaagagtttcggctatgcgaagaaatccaatccgactcagattgccatctacgccaaggactacgaaagcaaggccgaggtgaaggatattctggatggatacaaccggaagatggtgaaggcgggcaaaaacgatcaagaaatcacctataacgatctggcgggagccctgatgggttccgtgaccaatatcatcgatgccatcagctacgtgctcatcgcctttgtgtccatttccctcatcgtctcatccattatgatcggagttatcacctacatcagcgtgctggaacggcgaaaggaaatcggaatcctccgggccatcggtgcatctaagcggaacgtgggccaggtgttcaatgcggaaacctttatcatcggggcattggccggactgatcggaatcggcgtgacggagatcctgatcatcccgacgaatatcatcatcggccatgtgaccagcgtgagcatgcacgtgtccctgccggtggtgggaggaatcgtgctggtaatcctcagcatcatcctgaccttgatcggcggaatcatcccatcccggaaggccgccaagagcgacccggttaccgccctgcgagtggattaaataattaagcagaaggaaaaaagattgaatacatcaaatcggaatcaacaaaccgcaaaactatcggatatcttactgtcctggtacgacagtgaacgtcggattctcccctggcgggaggatccgacaccttaccatgtgtgggtttcggagatcatgctccagcagacccgggtggacacggtaattgaatattatcagcggttccttcgggaactcccggatgtgaaagcgctggcggaagcggaggaagaacggctcctgaaactgtggcaggggctgggctactacagccggattcggaatatgcacaagggggccatccaggtgatggaggaatacggaggcgaaatcccgggaacccccaaagagctgcagaagctgtccggcatcggggagtacgtggcggcggccatcagttccatcgccttcgcctaccccattccttccgtggacggaaacctgcttcgggtctacgcccgcatgaccggctacgaggaaagcatccgcaccaccgccgcccgaaaggtggccacggcctattacgaggaaatcctggaccgcactcgtcccggggacatgaatcaggccctgatggacctgggcgccaccatctgcctccccaacggaacgccgctttgcgaaaaatgcccatggcagatgcattgtgaggcccgccggacggggaaggaacagcagcttccggtgaaggaagagaagaagcagcggcgaaaagaaaagcgcaccgtgcttcgaatccggctcggggaccgggtggtaattgggaagcgcccggaacgggggcttctggcgaatttgtacgagctgcccaatgcggaaggctggctgacggaggcgcaggcggaggaggcctgccggacgctgggatatgagccgaaggccatccggaagctgaagccgtcgaaacatatttttagccatgtggagtggcacatgcacgccttcgaaattgaggcggaggaacggccggacgcgtcagcggcagaaaacggtttttttgcggcggagaagagcgcattgcaggaggagtattccattccaacggcgtttaaggcgtacatggacttctgattcgggaaggcggtttttacgcggattttgaaggggatgcgaacccgtcggggcggaattgtggtacaatagacagcagtgaaacagaaaggagatggggcatgattaagtatttctacacgcagaacggccggacgagttcggtggcgaatttctgtcacgactgctgggtgaagatgaccaacccttccaacgaagaggcggagctgattgcggaacggatgggcgtcgaggtggacgacctgatggcagcaattgacctggaagaaaagacgcgaattgagcttccggagaactacactttaatcgtggtggacatcccgtcagaggaataccggaacggggtgcgggcctacgtgaccattccgctgggaatcattatcactaaagaagctatcgtgaccatctgctcggaggagtccttcgtgcttcggaatttcgagaagaatcggatgaatgatttttccacccggaaaaaactgcggttcgtgtaccagattcttttggaatccgctttgttgtaccagaaggcgctgtactcaatcgaccggaagcggcaagaaatcgaggaaaaggtgcgggacgatgtggaagaggaagatctgttcagccttcacgagctggagcaggcgctggtgtacttcgccacctccattcgtgagaacggcaacgtgctggaccgcctcacccggtactctcggctggaacgcttcccagaggaccaagagctgctggacgatgccatcgtggaaaaccagcaggcggtggagatgacggacatctaccgcagcatcgtggacggcacccgccagctgatgtctacgattttcgataaccggctgaacaacgtgatgaaaatcctcacctccatcacgctgattttggcgattccgacggtgatctccggaatgtacggaatgaacgtactgacgaaatacatgcccttcgcccagacgcctttcggcttcggcatcatcagcggcatcgtggtggccatctgcctgggcctgtacgtcgtgctgaaacggaagaagatgttgtgatattgcatccaaaatgtcaagaaatcttctgcaccaaagagaagcggaaaagtaaagtagtaaaacttaatcggattatgaagaaaaagtagcggtgcgatggcgccgctactttttctgtctatacagaactgaagtggaaggaagtgcagtcgaatggcaaattcgtccgcacttccttttccaatcccatccggggccggggacgtggtgcccctcgacgaaggaataagggattgcggggagcgaagcaccacgtcacatcgtagacggagaattggaattcaaagacttggtgcaaaggaaacgaaggaacaaggttttgcgggagtctttgcaccaagtccaaggggttggagctccgaaaagggccaaggacttggtgcaaaggaaacgaaggaacaaggttttgcgggagtctttgcaccaagtccgaagggttggagctccgaaaaggaccaaagacttggtgcaagggaaacgaagaaacaaggttttgcggggattcgtgcaccaagtccgaagccgcggagcggcgcaccaccgaaacccgacgccgaaaatcctctgctcggcactcccccgacccgaatcccttattttctcgcaatgaaagaagccgctgtaccaagtgcacagcggcttcttccatatattatgctttttttggggctgcaagttcaaaggcgaagcccacgccgtccggcagcgcctcgcaggcccggcagcgccctcgtccggtccgctaactccggcgaagcccgcgccgcccggcagcgccccgcccacgcggcaaagcccgaacatcctgcacatcccacgcctacatcggctgtcttgggatgcgcaccgtgaaggtggtgcccttgcccgggatgctgtccacgtgaaccgtcgcgtgatgaatcatcagcgcgtgtttgacgatggagaggcccagtccggtgccgcccacctccttggaacggctcttgtccacccggtagaaccgctcgaagatgcggctttgggcatcctccgggatgccgattccggaatcggacaccgtcagaaggatttccgattccgtcggctccaggtgcacgtgcacgtagccgccggagtgattgtatttaatgccgttttcgcagaggttgtagacgatgctgtacagggtttccggaatcccgtgcatcggacaggattttccctggagggaaatggacacacccgcctcttccgccgggatttccaggcagtccaccgcattctcggcgatggtgaagagatccgtatcctcccacttcatttccggggcaccgctgtccagcttgctcaggccgatggtgtcctccaccagcttggccatccgcagggattccgagcggatttttgcggcgaaaggccggatgtccttttcctgaaccataccgttttccagtagctccgcgtatccggagatggcatggagcggtgtcttcagttcgtgagacacgttggcggtgaaatcctgacgaatctgcgccgaccgggcaatttcgtctcggtcctttcgcagctgctcctgctgctgggtcatacggcggatcagcggagcgatttccttgaaatcatcctcatccacgtgctgaatggcctcatccaggttcagcttgttgatcggctccacgattttccaggaaagccgggaagccagccacagggaaatgaggatggcgaatattgctacaaatgcgatggatggggagatgcccagaagcaccatccacaccggtttctggtcgatggacacccggagcacgctcttgtcggacaggcgctccgcggcgtaaagttgttttacggaaagggtgttggagtaacgaacgctttggccgaaaccgtccttctccgcctctttgatttccgcacggtctttgtgattgcccatggaatccacgtccgcccggttgtcgaagagcaccgtgccgtccgcagcgacccaggtaattcggtagctgtcggaatctaatttatgaagatattttttgccgttcagttccacgcccttggcagccagatgggtttcgtccaccagctgctctcgctgggtggtatccacgtaatcgtacaatgccgccatgatgataatcagggaggcggtcagcaccaggatggaaaccatccaaatggagcgaaaaattttcttactcaccggtatcctccattctgtaacccactccgcggacggtggcaatcatcccgccgcagcttcccagcttggtccgcagagttccgatatggacatccaccgtccgggtttccccgacgaagtcaatgccccagattgaggaaagaagctgctcccgggagaacgccttgcccagattttccataaaagtacgaaggagttcatattccttcaaggtcagggtgaccggctggtcgtggacggaaacctgatgcttgacggtgttcagggtaatgcctccgcacatcagcaccggcgcatcctctttcggggtggtgcggcgaagtacggctttgatgcgggaaatcatctccatcatgccgaagggttttgacaggtagtcatcggcgcccagatccaatccaatcaccttatcgtattccgaatcctttgccgttgccatgatcaccggaatgttccgggtcagaggcgaggctttcagttccttgagaa

SEQ ID NO: 3279 - DNA, 32759 bp, Unknown
  16S sequences of unknown bacteria
gccggcgataaagcgttttccgccgccgccttgtgtgaactttttgctccccgaagcggagccgtaagcctttgcgggcggcggggagcaaagtcggcgaccggcgagccggcgattaagcgttttccgccgccgccttctgtgaactttttgctccccgaaacggagccgtaagcctttgcgggcggcggggagcaaagtcggcggccggcgagccggcgattaagcgttttccgccgccgccttgtgtgaactttttgctccccgaaacggagccgtaagcctttgcgggcggcggggagcaaaggcggcggccggcgagccggcgattaagcgttttccgccgccgccttctgtgaagattttgctccccgggacgaagccgtaagtctttgcgggcggcggggagcaaagtcggcggccggcgagccggcgataaggcgattttcgccgccgccttgtgtgaagattttgctccccgaaaccaagccgtaagcctttacgggcggcggggagcaaaggcggcggccgacacgccggagataagacgttttccatcgccgccttgtgtgaactttttgctccccaaaacggagccgtaagcctttgcgggcggcggggagcaaagtcggcgaccggcgagccggcgattaagcgttttccgccgccgccttctgtgaactttttgctccccgaaacggagccgtaagcctttgcgggcggcggggagcaaagtcggcggccggcgagccggcgattaagcgttttccgccgccgccttgtgtgaactttttgctccccgaaacggagccgtaagcctttgcgggcggcggggagcaaagtccgcggccacttaaccagtgccccgggttacacccgggacacactcagatgaaaagagatgcacgaaagaacttctccgcccttcgtgcatctcttctcatgattgtaattccgaaaggaaagaattgacgacgaacccccacattttcccctttcgtcgtcaatttcttccgatttcttgaaagagtcccgaattagaggttgtgcttattataatatacccacagcagtggacacttttacaagttgagcatcttgaaaagagccattcaattcggacgcccccgtatggtggacagccgaaaaagcaaggatttgaagggagaccgatgccagtgccagcatcggcacccggcggccggagaaatccaaaaaaataaaaaagagaccgccgcaccactgtgcagcagccccttctgatagctacttaccacttaagtattctttaacaaccttcgagacgacagcaccgtctgcctggcctttcagctctgccatagcggctttcatcatcggacccatgctcttcatcgagcggtccaatccggattcttcacaaattcgctccacagcggcgcgaacggcttcctccgacatttcctccggcaaatactgcttcagaatatcgatttctgttctataactatcgagtaaatcctgtcttcctgccttttcgaaatcagcaatcgcgtcagtacgcatcttgagctgtttcttaataatcggaacgatgtcggcatcctccagggtcacctgctgatcgatttcatgctgcttaatcgcggcacgaatcagattaacggtttccttccgggtgctgtcatgcgccttcatcgcttccttataatcggtaagcaattgttccttaagacccattgaatacctcctttaccagattaatactttctggctttctttctagcagcttcggatttcttcttacgctttacgcttggcttctcgtagtgctctctctttctgagctcagacataacgccatcgcgagcgcaagatctcttaaatctcttaagagcgctctctaagctttcgttttctctaacgataacctgtgccatattccgatttcacctcctaccgtactcagaatgtaaatggaacagaatcgtccataacattgtaattgtaccatcatcaatctatttctgcaagtgatttttaaagaaatttcacaactccttagaaaatactttccacgatgtctccggccatcatcttccggcgggaatcctcgtccaccgcgaacttatccgccgccatgccgtgaatcatcacgccgtacagcaagctgttgttctccgaattgccctgagcaatcagggatgcaattaccccggagagcacatccccggatcccgccgtcgccagaccggaattgccggtgacgttcaggtacagccgctgagtgccatcttccttaatcagggaaaccagcgacacgtcggacttcaccaccatgctcacccgatacagctccgagaacttctttgtaaagccgattcgatttttttcaatcacctggatgtcctctccgcagagccgcgccatctcacccacgtgcggcgtgatgatgcacgggcattttcttttacggaacggcttcagattcttggaaatcaggttcagtgcacccgcatccagcaccaccggagtctcctgtgccaggatttctttgataatcaggcgtccggttgcatcttccttcatgcccggtcccgccaggaccacgtctacgctttccacaaaatcatccagcgctccgatcacatcgtccgtcttgtacggcaccactaccgcttccgggatggatacattgaagaaaccggtgaatttgttcgggcagaaaatctttaccagcccgcagcccgctctgtaggaagcttttgccgaaagcatcgccgcccccatcatgctgtccgggctcaccacgattcccacggttccgtaggtgcccttatgggaaacctccgttctcggaattagcgccatatccttggtttttcggaagaactcccggtcgcacacgaaaatacgatccggtatatcccgatatcctcgtttcgccagaccgatgtccactacttttacctcgcccgaaacctttcgtccttcgcagaagaacaggccggttttgtaatttcccatggttacggtaaggtcggcccggaataccgcgttcataatctgaccggtggtggcattcagtcccgacggaatgtcgatggccactttgtagcccttcttggaattcacatactccaggaacttcacaaaattatttccgaaacggcgattgagtccggttccgaatataccgtccaccagaacgtcgtattccgaacgcagcgccctcaggctttccgccgcatcttccgttccgtagattttcaaatccgggaacatggaggaaataatccgaatctggcgccggaattccttagacgtgcggttgggatcgcccacgaaatagagtgtgacggaatagcccaaatgaaggagccagcgagcaacgcacactccgtctccgccgttatttcccggtccgcacataaccagaacccgcgtattggtatccggaaagcgctccgtaatttcgttcaccacacctcgggatgcattttccatcagcacggaacttggaacacctttgtccatcgtgtattcgtccatgtatttcatggattttgccgttaatgcatacatatatctactcctgcttatacagtattctaactaattatacagagtatattatatcatttttgatatcatatgcaactcgggttttaccgagaatccttgaaaccgtcaccgaatcaagctacaatatacgtactgatttttcataaaaaaatacttcaagggagcgtttatgtccgtacagattaccgacgacgaaatccggcagattattctccggagaaagcaaaaagaaaaagaacgaaagagaagaaagaagcgaatcgctttagccatctgcctggttttccttgccggaattctgggcttttccttcagcaccggcggcggcatcttcactttgttccagacccgcggcgtcatctttatcgatgcgggacacggcggtgaggatcccggcgcagaggctttgggacgtaaggaaaaggatgacaccctggagctggccctaaaggttcggaaatacctccgacgaaaacgctttaaagtggtgatgtcccgaacggatgacgtgaacgtggaccgcccggagcgagcagagatggccaacgaggcagaagctaagctgatggtttccctccaccggaatcagtccgatggggagggacaaggtgtggaggcctggattcactccggagggaattcctctgccacccttctggcggacaacatactccgcaatctggagaaagaagggtttacctaccgaaaaatcggcaccggcacattgccggatgcttctgacaattattccgagaatcggtattccaccatgccgtcctgtatcattgaagtgggattcatctccaatgaatccgataaccaacgctttgacagtaacctgtcccgcaatgccaaggccattgccaacggcattgaaaccagctacgaaaccctttatgaaaaggactcggaagaataactccaatcgaaaacccggaaatccaccgcatctgcaatggatttccgggtctgcttttatctcttcgctacgtgctccgtatcgcagtactcacagcgatacactctccgatccggatccgccaggcggaaccgctgcggcacacctcgttcgatggatgtgatgcatctcggattcttgcactgaatgacgtttgtcagtcgttccggcaacgccatgtgcttcttgtccaccatctttccgtccttcacgatattcaccgtgatgttcgggtccacataacccagcacatcgaagtccagatcaatgagttgatcgattttgatgatgtccttcttgccgtattttccgctccgggcgttctgaatcaccgcaacggaacaatccagattctccagttccagaagttgatagatcagcagggatttgcctgcctggatatgatctaaaacaattccggtgcttacaccgtcaatattcatcacatttcctccttccatctaagcagcgttgcaatcaaagctttccgaacgtctttgccgttccgaacctgtttgaagtacaccgctctcggatcccggtccacatccacggaaatctcgttaatacgaggcagcggatgcattacgatcatcttttccttggccaatttcattttagcccggtccagaacgtaggtatctctcaaacgaatgtaatcctcttcgttgaagaagcgctcctgctgaacacgggtcatgtagagaacatccagatccggaatcgcatcctccagactggtggtctccgtccattttacgccggcttccgtcatactttccttgttgtatttcggaagcttcagctcatccggcgagatgagaacgatttccacccctttgaaacgaagcagggctgcaatcagagagtgtaccggccggccgaacttcaggtctccgcagaatccgattcgaatattatcgattcggccgaattccttccgaatggtgaacaggtccgtcagcgtctgagtcggatggaagtgtccgccgtcacccgcgttgatgaccggaatgctgcaggcattggatgccaccagcgccgcaccttccttcgggtgtctcatcgcgatgatgtctgcgtagcattcgataacctttgcggtatcgctgacactttcgcccttggacgccgagctgctgcttgccgaggcgaaaccgatcacattaccgcccaattccaacatcgccgattcgaaactcagtctcgtccgggtactcggttcatagaataacgtagcgatttttttatgggcgcattcctcgtaatacttctccggatgcgcaaccatgtcgtctgccagatccagaatctcgccaacttcttcctgggtcaggtccgtaatgttgattagatctctcttagccatgaaatgattccctctccttcatctgcctgaatgtaaccttcttctaccgctgtgtcgatcatggtctccacgctgcacaggctgtatttctccacattcgcttccgcaaacttctcgtctgcctttttggtgttgtaggtaaaaatactgattacgccaaggacatctgctccggcttctctcagagcttctacgacctcgatggaggaaccgccggtggaaatcaggtcttcaataacgaccaccttatctcccttttccagctttccttcaattctattgttccggccatgggtttttgcgctgccgcgaacataacccatcggcatatccagaatatgtgcggcgattgcagcgtgtgcaattccggcggtgctggttcccatcagcttctcgcattccggatatttttcttttaccactctggccatctcattctctacggtgttccgaacttccggatccgtcagaatcagacggttgtcgcagtagatcgggctcttgattccgctggcccaagtgaagggttcgttcggtctcagaaaaacagcctgaatcttcaacagaccttttgcaatttccttactcatttcccatgtcctccttacatctcgcatatgcagcgaccgggtcggctgcctttgtaatacttcttccaataaccaaatagtccgatcccaaagctttggcctttgccggcgttgccacacggctctggtctcccttggcatctcctgccagacgaattcccggtgtaatcgtccggaaatcggaagccacccgttcatgaatcatcggggattcccaggcggagcaaaccactccgtccagaccggctttccgagcattttctgcataatgaacaaccacgtcttccatctcaccgttcaccagaagttcctgatgcatcatctcctcatcggtggaggtgagctgagttacggcaatcagcatcggaatctccgagccgccccgctcctgaacgccttccatcagaccttctttcgcggcctgcatcatcttgatgccgccggcggcgtgaacgttggtcatatccacacccagtctcgccagcactttcatggcgcttttcacggtgttcggaatatcgtgaagcttcaggtccaggaaaatccgatggccccgcttcttgatttcttcaatgatggacggaccttcgctgtaatacagctccatgcccacctttacaaataccggctcttggaaccgatccaagaattccagtgctttctgtcctgttggaaaatccaacgcaatcataattgttggtgtcatctctatactactcctctgatttcttccaggttacggattcccagttccttcattctcttcggcagcgcatcgatggtcttctggcacgtccacggatccaccagattggcggaaccgatttcgatgcccgtcgcacccgccataatcatttccagcacatcgtcggcacaggaaattccgccgattccgataatcggcaatttgcatgcgtggtacacttcgttcaccatgcgcatcgcaatcgggcgaatcgccggaccggacaggccggcatacgtcttggacgtaatggtcttccgagtcttcaagtcaatccgcatcgccttgaagttattaatcaagctgatgccgtcggcaccgccgctctcgcacgccttcgcaatctcggtgatgtccagcacattcggagtcagcttcataaaaataggtttttttgtcacgtcccgaaccgcccgggtaatctcttccgacagtttcggatccgaaccgaaggcggaaccgccgtgatccacgttcggacagctgatattgatctccagaatctccacctgctcttcccggtccacctgcgcggcaacctcccggtactcatccacgctgaaaccgctgatattcgcaacaatcggtccccggtaaatcttccgaagttccggcagatccacttcccggaaatgctctaatcccggattctgaaggccgatggaattcagcattccgctggtgcattccgcaattcgcggcagctcgtttccgtagcgcggttccttcgtaatacttttggttaccagggcacccagcttattcaggtcaaagacatccttgtattcctgaccatagccaaatgttccgctggccggcatcaccggattctgcagccgaacaccggcgagttctatgctcatatctacagggtttcccatagcagcacctccttatcaaataccgggccttccttgcacacccgctgggatcctacttttgtctgaatggaacagcccatgcaagcgccgaagccgcagcccatgcgcgcttccaagctgaactggccctttcgaacctttccgtccagcgcctgaagcatcttcagcggtccgcaggcacaggcgtaatccaaagtgtcgaaggcatcggtgacgaagcccttctgtccgtaagagccatccgccgtcatcaccgtaatgtcgtccgtaaaattcttaaattcatctaccaggaaaatctcgttggccgtattaaaaccaaggatcacccgacatttttttccggcaatgaccaggctcttagccagtcccagcatcggcggaattccgataccgccgccaatcaaagtgcatccgtccggaatggcgtccacgtcgtaaccgtttcccagaccggtaagagaggaaatcttctctcccggttccatccggctcaacttcttcgttccgtctccaaccaccttataaatcagaacgtagcgatcgctgtcgtaggagctgaccgaaatcggtctccgcaggaatttctccggaacctccagcatggcaaactgccccggagccgtgaacgcgcactccggcgtctccagcgtcattttatagatgccgtccgccagcatctgattctccaaaatcgtgcttttatctctcttcatattctatacctcgtagacaatctttccgttccggaaggtcatctgtgtcttcccgtataccgtccagccgtcaaacggtgtgcacttgcccatggacaagaaccgactgctgtccagaacgtacgggttctccagatccatcactacgtaaccgtcgcccatcggaagtccgaagcgtttccgcggtgcgattgccatcatttccaccagacgctccaaagtcatcacgcccggacgcaccagtccggtgtacagaaccgggaacgcgcattccaatccggtgattccgttcaggctcttttcaaaacccttggacttctcttccgcgctgtggggtgcgtgatccgtcgcaatcatgtccaccgtaccgtccagcgcaccttcaatcatggctttccggtcttccggatccttgatcggtgggttcatcttgaaacggccgccggccgccggattctccgcaatgccctttcgtacatcttcggtatccagcaccaggtagtggggagcggtttcgcaggtgacgttcacgccgcttttcttcgcatcccgaatcacttccacgctttccttgcaggaaatatggcatacgtggtatccgcagccggtttcatccgccagcttcagatctcgctcaatctgccgccattcgctttcccgcactttaccttcccgaagaagggattcatcttcacaatgtgccacaatcagcttgttcaggctttttgccacgttcatggcctcccgcatcaagccgtcatcctgcacgcccttgccgtcatcggaaaaggccagcacgtgattcgccataccttccatatccgaaagagttccggtaccggactgatccttggtaatggtaccgtatgggattacttgaatcaccgcatcccgatcgatgatttcctgctgcacccggagagagtccatatcgcaaggtaccggctttaggttcggcatggtgcccaccaccgtgtatccgcctctggctccggccaggcttccctgccggatggtctccttgtatccgaatcccggttctctgaaatggacatgcacatcacagaaagatggcaaaataaaagagttatcgagttcgataactctcttttcgtcacattcattcatattggtaacatcgctaatttcaaaagaaccgttatccgtcagtgctccgtctttatacagttttccgcctctgagtactgtcttcatgttacctccttaatataaacctagtagattatagcactttttcttcttcttgtgtagaagtaaaatcaggttctgtcaggtttttttcaggttccggcgtttccggaatttccaccgattcgtccggcgtttccggcgttgcaacccgctccgtctccggggctgccggcttcactgcgttttgcaaattctgcaggatctccattctcgaatcatccgcttccatcggcgcttgcgtcacagtttcctccggagcgtgaaccggttcctcggcgccttccggcacgtctccgccgctgggattatcttccgtaaagtccacaaacgtcttctgcggaaccgacggcttctcatcaattacatacgtatccagaattttgtcgtgccaaccgcggttgtatttatcaatcaaaatccagatgtaacccagccacaggaccgacgaggatgccttttttacgataatttcccgcaaaagcattttcgcaaatccaacgggacgaccggttcgggcatccactactctcaagcccagaatcgccttgccgatcgtctgggaacgggagaagaaatacagttctgcacccaagaaaatcagcatcaaaatcatgactacggatgggtacgataccccgcccgtcacgtacggctgattgttgtaataggatccgtattcggagaggctgttcatggcatcctgaatcagactcattatgccgctgacaacctgtccaaagaatataatggtgatgaaagccaccggcaccgaatcaatcagtccggccccaaatctctttcctctcgttgccaatttcattacgcgtttctgtgacatatcaatttacctcgttttctctaagctcccaaacattgccacacatttctaaatattctaacacagtccgtcggcgggaatgtgaatcctatctaaaaaacaaaagcctgcagccgatatcatcccgactgcaggtctttatctaatcattaattactcttcgtgcggtttgaaatccttgatttcctccggaagttccagaccctttctggtgtagtaatcaaccagtgcggatttgattgcttcttctgccagtacggagcagtgaatctttcttgcaggaagtccatccaacgcttccactacagccttattggacagctccagcgcttcctgaacggttttgcctttgatcagctcggtagccatggagctggtggcgatggcggaaccgcatccgaaggtcttgaacttgcaatccacgataacgtcgttctcaatcttgaggtacatcttcatgatgtcgccacagaccggatttccaacttcaccgacgccgtctgcatcttcgatttcaccaacgtttctcggatttttgaaatgatccattaccttttcgctatataacatgttctctttctcccttctctaactcttcccaaaatggggacatctttctgtaaagcgccacaatctcgtgcaccttctcgatgatgtaatctacttcttcttctgtattctcttcattcaggctgaaacgcagggaaccgtgagccgcctctaccggaactcccattcccatcagcacgtggctcggatccaaggactcactggtacatgcggatccggaagaacaacgaatgccttcctcatccagagccagaagcagggattcgccctctacaccttcgaacgaatagtttacattacccggcagtctcttcaccggatctccgttcagcttggaatgcggaatatcgctcaagccctgaatcagacgatcccgaagcgctgcggtcttctttgcgttcgcttccatattggcaacgccctcttccagagctgctgccagagcggcatcgcccggaacgttgcatgtgccggctctctttcctctctcctgagcaccgccttcaatcacgtttaccagacggattccgttgcgggcatacagaacgcccacgcccttcggtccgtggaacttgtgtgccgacatggacagcatatcgatgttcattgcctgtacatcaattggcaggtgcgccgctgcctgaaccgcatcggtgtggaacagaacgcccttttccttgcagatggcaccgatttccggaatcggctgaatggcacccatctcattattggcgaacatgatggataccagcgcggtatcttcgcgaatggcatcccgcaccttattcacatctacaatgccgttgctctccggagccagcagtgtgacttcaaagccttccttctccagcttcttcaaagtatggagaatcgcatggtgctcgatattcaaggataccagatgcttcttacccttgtccttcagcactctggctgcagacagaagcgcctgattatccgcttcgcttccgccggaagtgaaataaatttcattcggatttgccgcattgatggcctttgccaccttctctctggactccgccagcttctctgcggtaatctgaccctctgtatggaggctgttcgggttgctgttgtaattcttcaagcaatccaccaacgtgttcatcgcagtttcactgatataagtggtcgctgcattatctgcatatactctcatagaaccctccctctataaaatatagtgtgtgtattctttgtatgtcgaattaaaagtatcatataatccctattaagtcaatagggattaatgaatcctcacctattttttaatatccagaatcttctctcggtttccgtccagcagatcctgcaaggtgatgttctccaggtagttggaaatcagccggtccagtccgatccatagaggaagcgtaatgcagccctccgaattggcacaatccacttcgctgttcttcacgcagtccaccggcgccaggtttccctcggtcaactgaaggatctcgttgatgctgtactccgaaggttcttttttcagccgatagccgccgttcttcccccgacagctcttcagcagaccgcccttgttcatcatggccaccacgatttccagatatttcagggacaatttctgccgctccgccacctcagacagagaaacgaaaccatcctcctgatgttttgccaggtccgtcagcactaccagcgcgtatcggccctttgtcgaaaccatcatctgcccatcctcctttcaaacttacttaattaaaataccacctgttcactaggaaatcaagtaattcctactaattcgatagaatttaattttttcgttaaatatggtacaatcccggtaaggagaaataccatgaattacgattataatcagctttttgcaaaagaatactccggctactcccgcatccgacacggtgcggaggaagcctttcgcgcactggagggatgccgcctcaccgcttggcgatccgatgcttctctgggaatccatgcgctggaattcggaaccaaattccttctcatctggtacaaggattccgatcactgtaaaatcagaatcggtccggccgcctcgtccggcgaaccctcggggctttcgtcttttgatgggctgacggattgcgccggaatggaactccacgatttctatgtgctgatgggagaagagcccctgctctgcctgtccttttccgatgccttcttccacccggaaaaccggatgctccggcaatacatcatttcatcggaagccggaggctatggaattcagtccaccgccgttccggatgaatcccccttccgccgaatttctacggaacgggttcccaccacccggcacttccgcaaggtgattcgaaacgaggaaaccggcgagcagttcgtttctttgtcagacgaggacggaggcaccctcattccgccgatctataacgacatcgaattgttttcaacggagaaggaaatctaccgaaccagcattcgaaaggtaatccccgggggaacggattatgaccttttcgggttgtgcgacgaaaggggaaaggaaatcattccctgcatctacccggacctctattacatggccaacggattcgtgttggtaatggattaccgccataagtggtgggtactgaacgagaagaacgaagcccttttcggccctcacaatcagggcgtggatatttacagccgcaaccgggagtacctttactacatcgaatacaacaacgatgcccaatgcgaggcattgggcatctacagcgtggaactccgcaccgagttaacggatgcggattatatccgtattcaatatttgggagacgataccttccgggcacagaaaatattcggtcccggtgacgttcgcaccgtccttatggatccttacggaaaaatcattccggaatcgctatagctcatacatgtgatacatgtgagcatacattccgtccttcgccatcagctcatcgtggcttccctcttcctgaatgccgttctccgtcagaacgatgattcggtccgcatttttgatggtggtcagacggtgtgcgatggtcagcgtggttctgcccttggcaagttctgccagagaagactgcaccagacgctcgctttcgttgtccaatgccgaagtggcctcatccagaatcagaatcggcggattcttcaggaatactcgagcgatactgattcgctgcttctggccgccggaaagcttcgttccccgctctcccacataggtgtcgtatccctccggcatttcccggatgaaatcatcggcaccggctagttttgccgccgcaataatttcctcccgagtggcaccgggacggccgtactcgatatttcccgcaatggtgtcggagaacaggtatacgtcctgctgtaccattccaatctgggaacggagagactgaatcttcgcctttcgaatatctactccatccacggaaatgcttccggatgtaacatcgtaaaaacgcggaatcagattgcagaaggtggtttttcccgcaccggaaggtcctaccagtgcgatgttctctcctgcacggatatgcaggttgatacggttcaagatttcttcgctgtcgttgtagcggaaggaaacatccttgaaatccacctcgcccttcagcggtcccagtgttaccgcatccggcgcatcatccacttctaccggttcgtccatcacttccacgaaccgctcaattccggtaataccccgctggaactgttctgtgaactccacaatccggcggatggcttccagcagcatgttcacatagagaagatatgcgatgaaatcgccggcggtgatggcacctttaatcaaagaaatggaacccagcagcacaatcatcacgtacatcagcccgtcaaacatccgggtcacgctgcggaatcccgccatgctcttgtatccgatgcgctttgcatccaggaacttgacatttccttcactgaacttttctttttcaatatcctcgttggcaaaggatttggccacccggattcccagcaggctgtcctccacgtgggagtttacttcacccagctggctccgctgcaacttgaaggcggaacgcatcttggtccgatacttcatggcgaagtagatcatcagcggaatcatggcgaaaagcaccaatgtcagcggcacattcacccggatcagtatgatgaacgaaataatgattttaaccgccgcgatgaaatactcttccggacagtggtgggcaaattccgcaatgtcgaacaggtccgtggtgattctggaaactagctgaccgattttgttctcactgtagtaggagtaggacagttcctggaagtggcggaacaggtcccgccgcatgtccgtctcgatcagcgcgcccattacgtggcccgtgttctgcatatagtagttggacagcacgtccaccccgcgaagtaccagatacagcgcagacaggcgcaccaccatgttgatggtgaggtcagccggatggtatgataccgtgttggtgataaaccggatgatgaccggcagcaccaggtcgcaaacgctggtaaaggcggcacaaatcaggtcaaaaataaaaatctttttataagagctgaagtacggcatgaaccgcttcagcaaatacccggtgggcagtgtatggttcttcatagtttttcctccctattatattgtaacaagttattttacctaatcgttttgaaagttgcaagaattatctgttcaactctgtttttttcatggagataatgtataattgtcatatttaaggattgtatttggagtgtaattgggaaaggaagagaatcatgaaaccgaatagcttgattccatcgaaatatcgtcatttcatcgagcagaacgcctggatggtcggcggcaatattctctttgccatcggcgtcaatatgattgtcaccccgctgggactgtacaacgggggttttatgggactggcgcagctgttgcgtctcctctgcgtcaacgtgctgcacattccggtgccggccggctttgacctggtgggcgtgatttattttctggagaacgtgcccctgttcttcgtcgcttataaggtggtgggaaaagaattctgcttcaaatccctggtgtccatcggcattgcctctctggcactggcattggttcccgtgccggccacaccaatcatgcacgataccctggcggcctgctttgtgggcggcgtcatcgccggaagcggtgccggaatggtaatgcgcggaggttcctccggcggcgggcaggatatcatcggtgtgtgcatggccattcgccatcccaatgccaaagtcggaattatcagcatcatcatgaatgtttttatctacggtgtctgcctcttcatctttaatgtggaagtggtcatctattccttgatctacaccacgattctggcggtgttcctggaccggatgttcatccagaacatcaacgtgcaggtgatgattttcaccaaaaacccgggaatctccgacgtaattctcaccgagatggagcggggcgttaccgactggaccggccgaggtgcctatacgaaagaggactcctacatcctggtgaccatgatttccaagtacgaaatcgagcggctgctgagcctggtgcgcggcatcgacccccacgctttcgtcatcgtgacggaaggcaccaaagtgtacggaaatttccagaaaaagctgacggattaattcttgggcagcagctccggccgcgggaaaatccgggccttgttggcgtggcttgacggtgcaacaaggccttgcgggaaggtccacgccaacatgggcgacgccgtcaagggaaaatccgggccttgttggcgtgcgaaaaaataatgaaaggaagtgatgcacgaccccttgtttttctgcctcgtgcatcaactccattctcagagttgatgcatcagcatccattttttcaactcatgcatcagctctaatcattttcatattgctttcattctactttgttttcaattaacataaaaagtgatgccggagttcttgttttctggtttcctacatcacagcataccattgccgacggtcatcctccctctgagtgcccggcggctacacaataattgatgcaggaacatcttttttcagcgttcctgcatcaatttcctgatttctacctgcggcccgaattagattcgggccgcgtttacatgaaaagtgatgcacggaaggcgctcgccggccttcgtgcatcacttcatctcatcataattcacaaaaggaaagaattgacgacgaactcttcatcttctcccgttcgtcgtcaatttcttccgatattccaaaaacggctcaaattagagactctgttctttccaattatgagatatccgcattccggttgatatcccgaatcgtgcccatgattccgctccacacatcttgggaatctccgaacagttcgatgatatttccgcggtccgtgaacggagaatcctggagaaccgaaacgtctttcatgataccgtttcgaacgatatattccacaatctggttcacgaaatagatctgccgatcattcaggttcgcattttccaggtaatctgcgaatgccgctttggccgcattcatatccattcccacaatttcacgaaccagttcccccagtggtttgtcgccgtactctttctcgtaatcctctttggaacccacttcgctccaaaggatttgctccagctgttccacatccattttggtcaacggaatattggacttgagcttcccaattaccagatgatccggatgctggcgaatgtatacctctgcatcgtgacgataatccttcaggtaatcgttctccagttcgtcgccatcccatttcatttccagaatttcatcttcgaaatccgtatgatgtacttttatctttggcggctggtaatatatcatcagctcccgaaggttcttccgaacggattcgaaatcgttcatgtccgcgtcactgacccactctgtatccagaacccggtcaatccacattttctgagcttttaccgcaggaatcgtcccggcttcttttgccacactgcccacacgattctggagagactgaattccggcactcgtcttctttccttccagatgcgccaactcgatgccgtacatcagcgaatcaaagcgaagaacccgcgcatcttccgtgtcgccctgcagcagcggagcgatttcttccttaacgtacgactcgtcttcatcggttatgattttgtaattatccttatttaaatatttttcgatataccgcaaatgctgtcgcgccgcaaaaccttccttattgattccccggaccttttccagcatctcatccaccagattatttcggaatgccatcaacggctccgtctggtactccaaatcctgcagcttatgagacagggcgaatttaatccggtacaactgaccctgcagcgttccggaatccttcacttcccggccgtttggattcaagcggaagaattcgaaatttccacagaagtcgaaaatatagaaattctccttgtccgcaccgtccagcaagccctcacacagccgtgtcccccggccaatcatctgccagaatttcgatttgctcatcaccttcttgaaaaacaccaggttcagcacttccggcacatcaattcccgtatccagcatatccacggaaatcgcaatctgcggcagcttcttcggattggagaaggtatcgatggcctgctgcgaattcttaatctgattgtcgatgacctccgcatagccggtcagcttcggatattcctcgttaaatacttttaggatttcctctgcatgcagatggtttttcgcaaaaataatggtcttgccgatatcttttccgaaatgaacgcggtggcctttcgtcatgaggatgtccagcacttttcgaatggtgtccttgttgaacagccattgattcagcgccgaggaatcgatctgcttcgggataaaatcctcatcctcaaaagtatcttcgaattcgtcttgctcttccggtgtaagatcgtcgtagttgatgccattctccatgaatttcagcttgctttccacagacacgtaattcaccaggtatccgtccgtcaccgcctgagccagttcgtagccataggtcggctgtccggctttcaggttaaaagcaccgtaggtattcttgtcgatttcatccttcggggttgccgtcaagcccaccaatggtgcgtcgaagtaattaaaaatatcccggtatttattataaatcgaccgatgggcctcatcgcaaatcaccaggtcgaaatggcccggcgtaaacaatcttttgccatcctcgtcatttaccgaatcgatacagccgatcatggtctggtaagtggcaaagacgcaagccgcgccgtagttttctttatcctcacagagatttgttaccgataagttcggcagctgatcgccgaagcttcttttggcctgggtgaccagtgcggttcggtcggccaggaagaggacgtttttcacccagccctttctctggagcacttctaccagggatattacggttctggtttttcccgaacccgtcgccatgaccagcagcgccttccgccggttctcttcgtccaacgtacggcagactgcttttaccgcggcttcctggtaatatcgtccggcgatgtcccggcgaattcgaatatccgtcagcggctcccgcatccgttgaagattgtgaagcttctccagatcgcgcttggaatagaattccgcaaccggccgctccgggtactggttgtcgatgattcgcatctcgaaaccgttgctcaggaagaccaccggtctgcgcccgtattctttctccataatatccgcatagagccgggcctgaattcgaccgttttccacgttggcgctggtgcgcttcgcttccacaactgccagcggccggccgtcatccccgtacagcacgtaatccgcaaaaccttcgccggaggcgttcggcattccttccagccgcacctcctccagccagtccttgcctttcgtccagccggcagcggccagcataacgtcgatgtatatttttctcgtattgaattccgtcaaatccagcggctttggaacataattctccatccgctcttctcgtctcgcactcagttcgtctttcagcgcccgattctcttcgatgagcttctggatgttcagttcgtactgctgcgttttctcctgggcgagggcttccttcttctccagctcattctctgcgccgagaagctcccggtggaaatccggcgcatcgtaggttctggaataactgcatgccacaaaatccatgaagtagaacaggttctctattcccagcgccgcctgttcataggtaatctgcacgccggcatgcgccgcattgtttcccagcgcccgcacatactgaatccgccgcatcaaatcatccggcaccaactcccgaaagcgattggtattgatcatcgcaacgagagtttctttatatggcatccgaagaaaatggtccgccgtgtacatccatttgatggcaaattccatcgcctttctgcacccgattgcgcacgcttccggatcgatccccagcagccgttccgcccgaacagccatatccgcaaaagacttaaattgtgcatcctctttgaggaaatcaaagttacccattgcttctctccgataattatactaactgcagcaccctctccatgggcgcattcaaaagtcatttcattatatcgtatttcccatctccctgccaactgttgattgggaagaaaacgttccaatggtttatcacctattcatttgttgtactgtctccgaacaaaatccgcatataatcgcggcgggcatagatgatacggtcaataaaaacttcgctgccgtaagcacggtagaagctgatgtaattgccacttacaataaagcgataatcactctctatatccgcaatcgaagacagcggagccccggcctgtgcatggttctgtaaaatacggagcttctttgtaattcgacttacggttgccaatgctgcggatgggttcagtaactcttcctcaatataggatttgatttctaaaaggtcgtttttagcttcctcggacaaatgcaaattattcattgacaatcccgaggctcttctccacggcttccagtgtcagccagcctttctcttcgccagattttcggccttttgcaagttcgttcatcagctggatggttgcctgtgccctttcaaagtctcgcatgtcgagaattgcatatctgccgtgcccgttctttgtcagaaaaaccggagcgccaacagccacatcacgcagcacatcgctgtaatttcgcaaatcagaaatgggtttgatatttggcatatttctcaactcctttcaaccataatatatcccaatctgctgtaaaattcaacctcattttttacagcgcgcgaattctgttgattgccaatttgctaaatttcatcgcgagccacacggatgcactcactggtagtgacataaaaggctgggtatcagcatttgtttcctccgtgttaatgggaatccggacattttcttggactacttagatggtaataccaagaaattccccgtattctgttggaccttcgagtcctaatagtccattcattgttgtaccactggagatattcatctaattctcggaaataaattaatcacacaggcaaattgatatttattcttttgcgaaatgcgggacccgagcggctgacgggaaacagcgggaattagagtggccgccggaccggattgtgaagttggtgtgaaacgttatgcatattgccggcagaagctgctttttgcgccaacacttcaaagtcgaagcggcaagcatgtatgcagctgacccgtttcggacgggttcggcataaaaacagcacggtttttcggagtaatccggggtgattctaataggataatccattaccagttggcgattactctaattaccgaaaaagaactgccccctggacgaaaatgttgtgcagattgggtctgaattgtcggaaatgcacaacacttcacgtgaacttcataatgcacttttctgtattgaacttcaaagattgattatttataggaataaacaaatggaaaaactaaaacaattcaataaattggaggtgacggtatgaaaaaagtgaaacttacttctgtttgtcgacctaagcagtggaaaagcatacccatatctgagctcagcgacgttggatatccagtttatggagctaatggagttatcggatactatgacagttataatcatgagcaggaaactgtaattattacttgtcgaggtgccacctgtggaactgttaatttgactcatccgagatcctacgttaccggaaatgcaatgtgtcttgataatgtaaaagacagtgtagatatcaaatatttattttattcgatgcaggcatatgattttacaaaagttattagtggtactgctcaaccccaaatcacacgagttggattggaaaaggttgaaattacattgccttcattagatgtacaaagggaaattgtttctatactcgacaaaataaatgctttaatagaacaacgcagattgcaacttaaaaaactagaagagctagtcaaagcccgatttgtagagatgtttggtgatccggaaactaattcaaagggatgggctgaaatctcgctttcagaaaaattgaatgttttaggtggctatgcctttaaaagtgatcagtttgaagaaacaggcggaattcctgtactacgcataggaaatataaattctggctatttcaaacctgtgaatatggtttactggaaagaggatagaagtcttgaacgatatgctatgtatcctggcgatttggttatgtcattaacaggtacagttggtaaggatgactatggaaatgtgtgcattttaggcaatgcttatgaaatgtattacttgaaccagcgcaatgcaaaacttgagctaaaggatggactggataaatactatctagcagaattgttgaaattttctcaagtcaagaaaaaacttacaggaattagtagaggcgttcgacaggctaatatttcgaataaagatatcttgaatttagtggctccgattccaccaatggaactccaacaacaattcgccaatttcgtcgaacagatagacaaatcaaaagcgacggtgcagaaggcattggacgaaacgcaacttctatttgatagcttaatgcagcagtattttggctaaggcaggtgatgacatggctagaatgaccgtatttcatggaggctacacacctattgaaaatccaaaggacaatgatttgttctatacgtgcagtttaattgattacattgccagaaaaacaaagaatgtccgagcaactgtcgtaaatcagcttgggaagaaacggcttgagaaaatctatgacctggcggatgtctatcattgcgacaatattgagcgcgtggcagatgattttattgaagaagcgggaatcgctgtcggaagttttgataacgtcggcgactgccggtatgcaatcccgtcgcattgggacataggaaaagtctacaaacggctgattaaaatgattgcagaaaaagagaatattgagacagtggatgcactaatcaaggcgtataattcttttatcagtgcgaaaatcgatgactacaacagcagcgtttattacgataatccgtcgtacatatttgcttgctatgaagaaaaccgcatgatataagggcatgccaaaagaagaacgttactctcaagggttttcggaatcctcgggggagcgttctttgtttttatgggatgggattgcgtcagaatttaagcgatgtatttctggtgggacattttcacgttgttctggtttacgatggcgtactgcatggtggtgtcaatctgggagtgacccagaattttctgaacctgctcgatgggcatgcctttgtcaatcgcccgagtcgccatggtccggcggaacttgtgggggtggatggatttgagattcagcatgcgtcccattttgcgaaggcgaatctccacgccgctgatggccagccggttgtagggggcgaggagggagacgaacaacgcgcggttggtgtcctggcggctttccaggtaattcttgaggtggattttcgtcttggcgtcgaaatacacccggcgctccttatcgcccttgccgaatacgacgcattccctggattcgaaattaacatcctcgatattgaggcggaccagctcgcccacgcggattccggtggaataaagcaggtcaatcatggccaggtcgcgaaggctggtgcagctgtctcggagcttttcgatgtcctcgtcggagatgacctccttcacggttttcttggttttgattttgtggatgcggcgcatggggcttttcagaatgtggtcttcctcttccagccacgagaaaaaactggaaatgttccgtcggatgttgtcgatggtcgctttgctgcagttccggcgctgctgataatctgacaggtattcccgcatccgttccgtcgtcatttttcgaaccggcaggttcaccgcggcaaaaaggtgctggaccgtcacttcgtagtattgaagtgtccgaggggaacagccttcgatggatttggcttccaggaaaagccgaaggtattcgtgatttgttggctttcgttccggctcctcggtgctgaacgccttcaccagcacttcttgcagcttcttgagctgggcgatgttcagaacttcggccatttcgttcgtgattgcgatgattttttcttccatgattggtacctcgtttttgggtaaaggataccatttaagaggtggaatcggaaggtggggagagtggtgttttgatttgtcgatcgctgctacgaaggcagcaaactgtttttgcagttttaacggtggcaatgcaagttcaatattagatacaacaccttggttaatcttatatgttccatttgttgttctagctcccgcctcaatctgtttccttacaaagggctgctgccacgcataaaacaagtacggcaaacaaatcctatgtaaatcaatagttgcagcaattgctgtatctggaaatatcaaatcgtatctgtcctcttttgaatacacccctactcctactagttttttattgccatttcctctgcacatataaaaatctgatgctgtcacacgtttttcaagcggagggtccacatcgaacatcccatctttccacgagtctggattaaagccaccttgtgtaattgccgaaagcgttaagaccttcgcgggataggttccaatgtttgaaggggatacgccattacgcatattgagcataatcgttcctgcccgaacacgctcccacgcttgagattcaaacatctctacaaatcgggctttaatcaggtcgtcaagcttttgaagcacacttcttctcagattgattatattttttgctttatctaaggcctgtacaatatattcttgttcctctacgcttggaatacgtatcggaaaattcttgagcatttccagttttaagttatctcgtacacttcctgttgcaactgcttttatcctatataaagcaaaatcactttttaaatagtaatacagatattgttgatttaattctggcgacacagaaaaaacgttatacagaggacttacaataacttggtcttcatccctttgccaatcaacagaacccacatttattcgagagggattataggcaaaataaccccttggaacaattttgtatgtcgatttatctttacttgcaacttctttcccaaaataatcttggcagaagccttgtgtgtttgtaacactatacaccggaatgtcctcgttagccttgtttcgaacagagtattcctgtatgtattcacctagttttactttcatctcttcattccttatgttctatctttcccaatgcctgagttataacctccggcacgcattatgaagttcacatgaagtgttgtgcatttccggcaattcagacccaatctgcacaacattttcgtccagggggcagttctttttcggcaattagagtaatcgtcaactggtaatggattatcctattagaatcaccccggattactccgaaaaaccacactatttttatgccgaacccgtctgaaacgggtcagctgcacatcatctcaccgcttcgactttgaagtgttggcgcaaaaacaggttccggcagcaatatgcataacgtttcacaccaacttcacaatctggcccggcggccactctaatttccgccgtttcccacggttttccgttagccgctcgggtcacgcatttcgcaaaagaataaatatcaatttctcgctcgctgagccgccgaaccggcaatcccggcacacacttcactgcactccttagtcttcacccaacatcgcggtcagttcgtccatcgccgtggcgatctccatctcgatttcccgcaggttggtgagaatctcctgtgtcgatggatattccaccggaacgtactccacttccttgtatttgttgatggacaggtcgtagtcgttctccacgatatcctctttcggcaccatgaagctctgctccgtccgcttccgctccatctccccatccaagtgatggaaccgctggatgatatccggaatatcgttctcctcaatcggactccgcttgtcatccagactgaggccatcgttttgcatatcgtagaaccagacgcgatccgttccgccggcttcggttttggtaaaaataagaatcgccgtagatacgcccgcgtacggtttgaatacgccggaaggcatggagattacggcttccagacggttgttctccacgatttcctttcggatggacttgtgcgccttcgaagaaccgaacagcaccccgtccggaacgatgcaggcacagcgaccgccgattttcagcatgcgaaggaacaatgttacgaacagaagctccgtcttcttcgtcttggagattttcagcagatccggcgagacgatatcgtaatccaagcttcccttgaacggcggattcgccaggaccaatgaatacttgtttttgtcctcattctgatccgacagactgtctttatattcgatgcacgggttgtcaatcccgtgagccatcatgttcatggcaccgatacggagcatggttcggtccatgtcatagccgtggaacatgtgattcaaatagtgctctttattctccttatcgaaaagaacttcccgctttcgctcctcgtcttccatcagatattcgctggctgcgataaggaatcccgaagttccgcaggccgggtcgcagatgatttcatccggcttcggctgcatcaatttcaccatcattttgatgatatggcgcggtgtacggaactgcccgtttcttccggccgtgtttaatttggacagaaggtactcgtacacgtcccctcgaacatcctccttatccagctttgtttccttcatcatccggaacaaatcgctgagcttctccacgactttagagaggagcagcggcgtcggaatcatgaaaatcgcatcgctcatgtactttgaatatgcgctttcccggtcgttgtggagattgatgatgaacgggaacacctcattcttcaccacatcgaacatcttctccgccgggaaatcctgaaatacggaccacttcagctgctttccgtctaccgtccggccctccacttccacttcatccttgaagatgctttcgtgggatattcccagcatcatggcctccatgctgcccttattatccgcctcatccagatcgtggatgaacatcaaataggtaatctgctcaatcaccgtcagcgggttcacaattccccccgccgcaaaatcatcccacaggctgtcaatccgatttttcagttctccggttatcatttttttcctccattatcctctcagcgcttcatccagttcgtccacatttgccacgaactcaaacagtttcatctcctcctccggcaggaattccttctccaccatctggcgaaatgtgccgcggaggggttcgtaatatccgttgatgttgtacagaaatgcccgtttctccgtccggcccagtctcttgagtgtcagcacttccgtgatttcctccagggttccgatgcctcccggcatggcgataaaagcatccccaagttcaatcatccgactcttccgggtggacatggagtgcaccacttccaaggtgtgaaggccttcgtgcccctgctcacagtgcagcaggaaatccggaatgatgccgatgacctttccgccgttctccaacacggtatctgcaatgattcccatcaagccgatattgccgccgccgtacaccagcgtgtgcccgttcccggcaatccagagccccagtgcctccgccgctttcttgtaatccggatccgaccccatgctggatccgcagtataccgttatattcatctatttccccctcttctttccgcttgcataaattctctaccattataccaatccgacgctgaaattcaaatgcccccaggaaggtctttgtactattttgaataaagcccttaacttttttggggtacgtgctataataaaaatagttcggtaagagttctctaccgacagtttttatattatttttgtgaaatccaaaaatcggattgacagcaaagaggtgaataaacatgaaaaaagaagttctagagcttcgggaaaagatgaaagccaatggtgtggatgtttattacgtaccatccggcgactatcacagttccgagtatgtaaacgatttctttaaagctcgtgaattcatgagcggactgaccggagaatccggtgagctcatcgtcgatgacgaaggtgcttatctttggaccgacggcagatatttcctccaggcagagcgtcagctggccggcagtgaaatcgagctgatgagaatggcagagccgggcgttccgactgttgaggaattcctgattgacctggccaagaaaaaaggcggctatacgctaggatttgacggcaaggttgttccgggatattacggtgaagagcttcagtcgaagctgggtgaactgggcgttaccattaaatgggataaagacctggtaggtgaagtatggacttcccgtccgcagattcagccatcggaaatctacgaactgccgctgaccactaccggcaagaccgcaacagaaaagcttgcagatgttcggaaagccatggccgaaaagaatgcggattacctgctggttaccgatctgatggaaaacgcatggctcctgaacatgagaggcagtgatatcgattacacaccggtattcttctccttcatcctgctttccaaggattctgtgaacctgtacgtaatggacggtgcggtaaaggattccctgccggaagacctgtccttcgttaccgtgaaaggatatgatgaaatcgaacaggacgttgccgctctggatgcatccaagacattgtggctggattccgcttccgcgaactacgctctgtgcctgagaattccggaaggcatgaagacggtggatgaagctactccaatcgctatgatgaaggccgttaagaatgagaccgaaatcaagagctccctcaacgcgcataagaaggatgcggttgcaatggtgaaattcatcaagtggattaaggatgttgttgcaaagacaccgcatcagaccgagctcagtgcggcagaacagctgcggaagttccgtgccgaagaggacggcttcttcgatctgtcctttgagaccattgccggatacggaccaaacggttccgtcatccactacgcaccgacaccggaaaccgatgccgaaatcctgccggaaggcttcctgcttctggactccggtggtcattacacagacggtaccacggatattacccgtaccatcgccgttggaccgctgactcaggaaatgattgatgactatacctatgttctcaaggctcatctggcaatgcacaatgccgtgttaactccgggaatgaacggaatcgacttggatgccatcacccgtgcaccgatgagagcgataggtctggactttaagcacggtctgtcccacggtgtgggtcacctgctcagtgtccacgaaggtccgaatatccttcgccgtgtaccgactccgattaccatttgtccgggcatgattatgtccaacgagccgggcgtatacatcgataaccagttcggtgttcgtatcgagaacgaagttctgatgaaggacgacggtaaaggaaacaccattaacgagccaatcaccttcgtaccgtacgaaagagaagccattaacccggctctgctcaccgatgaagagctggcatgggtcaacaactaccataagatggttcgtgaagtactgcttccacgtgtggatggtgacctggcagaattcgtcaaggcacagaccgaagagattaccaaataaagtaaccaaattataaggagacatagagatgaagtatacaaacacagacaaagcacctgctgcaatcggcccgtactctcaggcagtcactgccggcggattcctgttcatttccggacagactccgttcagcccggaaaccggtgaaaccatcggtaccgatgttgcgggacaggcggagcaggcatgcaagaacatcggagaaattctgaaggccaacgacctgaccttcgaagacgtggtaaagaccacctgctttatcaccgatatggcagacttcggtgcattcaatgaagtctatgcgaagtatttcgtgtccaagccggctagatcctgcgttgcggtaaaagaacttccgaagagcatcctttgcgaaatcgaagtaatcgccgctgcgaagtaggtacgcaaagtcatttgataaacgggagcgagccaaagttcatggttcgctcccgctttgtttttggtttttcactttttatgatttttaattccgaaattctatagctatagtttttttatcacatgttttagtcctttttgttccaacgatattgaattcctgttattttttgctaggatgaagccatgaaatttcagaaaaaacaacgagcgctcatatctcttaacagtatgatttcacagacttcccataaggattgacagaaattatatttaaaactacaataggagcaagaaaatgactaaccacaaaaaccgaccgaatccaaaatgaggtcgttaaatctagaaataacgtaggatgggagagggtttatatgctattggaagaaaaatacaaagcctacttcgaagaaggtcaattagataaggttctggagttgttcgaagccggacacctctctttggaagttgcactccgtgaaaccggcgccacttcagaaaaagagttgaaacagctaattcaagaacgaaaaatgtcggaaaaataatagaataagccaaagacgagttggttgcattcggtttgagtgcttggattttgaatccaagcactttactttttctggttcttcacttttttctcggggattttaacaaaagagcaaacctgcatccggaaaacaatctcatcgtcaagctgagattgctttccggatgcaggttctttcattcttgggcgccggcgggccgggaaaatcctgagcatgttggcgtgtcctgacggaggaccaagggtttgcgggcatgcccacgccaacatttgcgccggatacctgctaacgagattcggttgttggcgtgacccgacggagctccaatggtttgcgggcatgcccacgccaacatttgtgccggatacctgctaatgagattcaattgttggcgtgacccgacggagctccaagggtttgcgggcatgcccacgccaacatttgtgccggatacctgctaatgagattcaattgttggcgtgacccgacggagctccaagggtttgcgggcatgcccacgccaacatttgtgccggatacctgctaatgagattcaattgttggcgtgacccgacggagctccaagggtttgtgggcatgcccacgccaacatttgcgccggatacctgctaatgagattcggttgttggcgtgacccgacggagctccaagggtttgcggggaggtcgacgccaacacgctcatgtccatcattaagaaaagaatgtttaccttatacaaaaggcaatccccgagaaaaaagtgaagaaccctttttcttaggcactctactgctgctacacgtaccgcagaatctcca

SEQ ID NO: 3280 - DNA, 6739 bp, Unknown
  16S sequences of unknown bacteria
agtcgaatccggcggaggaggatattacatgagaacctcaccggacgacataatgcagtcgcagaacgactaatatttttaaacaggggtagacctgatggtaaatcttgtaataatggagtctcccacaaaggcgagcaccgtaaaaagctatcttggctcatcgtataaggtggtcgcgtcgaagggacatatccgtgaccttccgaaatcaacactcggaattgatgtagataataattttgaagcacactatataaatataagaggaaaaggcgaccttatcaaggaactcaaaaaggaagttaagaacgccgacagaatataccttgcaacggaccctgaccgcgaaggagaagctatcgcatggcatcttatcacggctctcgctattccaccggaaaaagccaaccgcgtaactttcaactccgtaacaaaagcggtagtcaaggaaggcataaagcatccgcggcaaatagacatggacatagtaaacgctcagcaggcaagacgcatacttgacagaatcgtcggctataagctttccccgttcctttggaaaaccgtcaagagcggactttcagccggaagagtgcagtccgtcagcacaaagataattgtcgacagggaaaacgagataagggcttttgttcccgaggaatactggacaatagaagccgttctcctcacaaaggacggaaaaaaagtcaaaacaaagctctacggactcgcgtctgacggaaacaagctctcaatcggaaacgaagaagaagcgaaaaaggtgttcgacgcggtaaacggtaaggactttgctgtctcggatatcaagctcggcaagaagctcaaaaatccgtccccgccgttcacaacctccacattacagcaggaagcctcacgaaagctcaattatcagtcacagcgcacgatgaagatagcgcaggagctttacgaaggtatgaatctcggctcggaattcggcggagtgcagggtcttatcacgtatatgcgtaccgactccatgagaatctccgacgaagcaagggacgccgcaaagacattcataaccgaaaaatacggagaagagtattatcccaaaactccgcgtgtatataaatcaaaaggaaacaacgtacaggacgcgcacgaagcaattcgcccgtcaaacctgaatctcgaacccgctgccataaagaaggctctcacaaccgagcagtataagctgtataagctcatttgggacagatttatcgccagccagatgcagtccgccgagctttccaccgttcagaccgacttcaactgcgagggatatatcttcagaacaagcggatatacggtaaaattccccggatatatggcgctgtacgaggaatccacggacgacaagaacaccgacgacgaaaacgtaaagctgcccgaaatgaaggtgggagatattctcgcgtcggaaagcgttactccggtgcagcacttcaccgaacctccggcaagatataacgacgcgacgcttgtaaaatatcttgaagaaaagggaatcggacgtccgagcacatacgcgacaataatcacaacgataatttcccgcggatatgtcaagagagagggcaagcagctcgttcccacacctctcggagaagtcacaaccgagctgatgtgcgaaaacttccccgatatagtcgactgcaaattcacggcgtacatggaaagccagcttgacgatattgaaagcggaaagactaccatgctcgatgttatatcgggattctacaaaaatttcagcgtagagcttgaaaccgcattcaaaaacgtagccgaccgcgatatcgagctgcccgttgaagagacggatataatctgcgagaactgcggaagccgaatgatagtcaaaaacggacgcttcggtaagtttgccgcctgcccgaactatcctgcctgcaagaatacaaagcctcttgcaaagacaggagaaggattggtagaaaaaaaagctgaaaagaccgacatgaagtgtgagctttgcggcgcggatatgatacttcgcacgggaagatacggctcgttctacgcctgctcacgctatcccgagtgcaaattcactaaacagaaggtaaaatccctcggagtgaaatgcccggaatgcggctcggatattgtgacaaaatacggcaaaaacaagactgtgttctatagctgctcgcgctatcccgaatgcaagttctcgtcgtgggatatgcctacaaacgaaaaatgcccgaagtgcggcggaatgctgtaccgtaaaaaaggtaaaaatcagctgatatgcaaaactgaaggctgcggctacaaggtcgacatacagaacagcgaagatagcggagagactgaaaccaatgaataatattaacgtatacggcgcgggtcttgccggaagtgaggcggcatggcaggcggcacatcacggagcacacgtcactctttacgagatgaagccgaggaaaaagtcccccgcacaccacagcgatacctttgcggagcttgtatgttcaaactcactccgctctgccgaattcacaaacggtgcgggacttctcaaagaggagctgcgcaggatggattcgctcatcatggaagcggcttatgcttcaagagtatcggcaggcggcgctctcgcagttgacagaaatatcttctcggaatatgttacggaaaaaatcagaagctgcccgaatattgaagtagtcgaagaagaaatgacggacattcccgcggatgagataaccgttgtcgcgacaggaccgctcacctccgacgcgcttgccgcaaaaatagctgagcttatcggtggaaaaagcctgtatttctacgacgcggcagctcctatagtcgattttgaatccgttgacatgacgaaggcgttttttgcctccagatacgacaagggaacgccagactacatcaactgcccgtttaatgaggaagaatataaagccttctacaacgctctcataaccgccgaggaagcaaagctccacgattttgaaagcggagacaagctaaaagtgttcgagggatgtatgccggtcgaggtcatgggcagacgcggggaagatacacttcgcttcggtcctatgaaacctgtcggaataaaaaatcccgcgacgggagaggaatactacgcagtggttcagctcagacgcgagaatgacgagggaacgatgtacaatatcgtcggcttccagactcacctcaccttccccgagcagagaagagtgttccgcatgataccgggacttgagaatgccgaatttatgcgctacggtgttatgcaccgcaatacattcctctgctctcccgacctgcttgacgaggattattctctcagacagaacaaaaatatctttttcgccggacaaatgactggcgtggagggctacatcgagtcagccgcatcgggatttgtcgccggagttaacgccgcactgagagcaagaggagagaacgcctatgtattcccgaaggaaaccatgacgggagctttggcgtactatatctcgcacggcgaaaaaactctcttccagccgatgaacgcgaatttcggagtaatgccgtcgcttgaaacaaaggtcaaaggcggaaaaaaggcgagaaacgaagcgtattcggcgcgcgctctcgcaaaaaccgatgaaataattgatatagtaaagaatttataaatattaccggtaactgatgatgaaaataataattgatgcaatgggcggagacaacgcgccttttgagattgtcaagggagcctgcctcgcgtccgagaaatataaatcaaagctcgttctcgtgggagacaagcccaaaatcgaagcgtgcatgaaacagcttgacgcggattccagaataatcgacatcgttcataccgacgttcagattacgatggaggacgacccgcttaccgtagtcagagctaaaaaggattcctctatgactatcggactgaatctcttaaaggacggcggagacgcgtttgtttcggcaggaaatacgggagcgcttcatgtaggctcgtccctcataatccgcacgattaaaggagtacagcgttcgggtatcgccacgataatgccgtttgaaaaacccgtgcttctcatggattccggtgcgaacgtcaacgtcacggcggactaccttgttcagtgggcgctcatgggacagatatacatgaaaaacgtcatgggagttgacgcgccgacggtaggacttctcaataacggtgcggaggaacacaagggaacgcagattcagatagacgcgtaccagaagctgaaaaacaactccaacataaagttcatcggaaacgtcgagggcaaagagcttcccactgctccctgcgatgtagtcgtaacggacggattcacgggaaacatcacgctcaagctcatagaaggcgtgtcgaaattcttcttcggatatatgaagaaaatgtacacccacaatgtgctgacgaaaatgtcgtatctcgctatgaaggatcagctgcgtgagatgaagcataactttgacgcgtccgaatacggcggagcacctcttctcggactgcaaaagccggtaataaaagctcacggaagctccgacgccaaagcaattatgaacgccgtaagacaagccgaggcattcgtcaaaaccggagttatcgaggagattacacagtcccttgaatctatacgcgagaacaatactcccgctaaatgatacagtaaggtagataaaatgaacaatcaacaaaaaccaatcagcgagcttgaaaaagaaataggctataccttcaaaaacaaagagataatcacagtcgcgctcacacattcgtcctattcaaacgagatgaagtcacacggcgagaagatacagttcaacgaaagactggaatttctcggagactccgtgctttccatcatcgtaagctcgtatattttcgagaaatacaagaacaagcaggagggcgacctcacaaaaataagagccgcagtcgtgtgtgaaaaggcactctcgaagttcgccgcaaagataggactcggagactacatgtacctcggccacggtgaagagataaacaatggcagaaaaagaccctccatcacagcggacgcatttgaagctcttcttgccgcgatttacattgacagcggagaaaactttgacgaagtcggcagatttttgctcccgttcatagcggatgagatagaattcatcaccgaaaccggagtttttgtcgactataagaccactcttcagcagatcgtacagcaggcgaataccgaaaagctcgaatatgtccttgtaggcgagagcggacccgaccacaacaagaagttcagcgtggaagcaagactgaacagcaacgttatcggtcgcggagagggcaaaactaagagagaagccgaacagatagcggcgcacgaggctcttgtacttttcggagaagcataaacgtccgattgagctatgaagaaaaaccatgtaaacataccagtgttcattcctcacctcggatgcccgaatatgtgtgttttttgtaatcagcgcgcaatttcgggtgtttcttcttttattcccgatatggctgaggagactatcgaaaccgctctctcttcccttgacggaatggcggacaggacggagatagcgtttttcggcggttcttttacgggaattgaccgagaacttatggtgtcccttcttgatcttgcacagagctatgtggaagacggacgtgtgtccggtatcagaatgtcaacgcgcccggattatatcgacggggaaataataagcatccttaaaaattacaccgtgaaagccgtggagcttggcatacagtctacctcggataaggttctcgccgcttccaaaagagggcacacaagcgagtgctcattccgtgcgatgacaatgctgagagacgccggattctctaccgtcgggcagatgatgataggactgccgctctcgacccgcgaggatgaggtaaaaaccgctgaggacatatgctcgctcggagcgtcaggctcacggatatacccgaccattgtatttcgcgacacggagctgtacgacatgacacagcgtggggaatacgttcctctcacggtggaggacgctgccttgagaagcgcggatgtgctcgaggtttttgttggcaacggagtggaatgcatcaggataggactgtgcgactccgaaaatcttcattcggacaaaacatatttcgcaggaccgaatcatccggctctcggagagatgataatcggtgaagtattctataaaaatctccgccgcgctatggaaaaggtggaaaataccgacagcataacagtacgcgttccgtgcggtgcggtatctgcggctgtgggacagaaaaaacggaacaaaataagacttgccgatgagtacggtgtgagacggataaaatttgtcgaggacagctctcttaccggctataatgtaaggatagaaaataattaagacataaatcgggggaacaactcttgtacttaaaatcacttgagctgcacggctttaaatcgtttcctgaaaagacggtactgaaattcaacaagggaacgacggttattgtcggaccgaacggaagcggaaaatccaatataaccgacgctatgcgctgggtgctgggtgagctttccaccaaaaacatccgcggcagcaagatggaggacgtaatcttcgcgggagcggcagacaaaaagcc

SEQ ID NO: 3281 - DNA, 32759 bp, Unknown
  16S sequences of unknown bacteria
cctgtgcttccgcgccgtagtcggtgcgccattccatcggctcggcggtgaaattcttacgatagaatcgttgactgccgataaaagcaggggttctttcctcggggcaaacactcggcaatccactgcttgcagatttcttcctctggaaaaacaaacagcacggcttgtactgccgtgccgtctgttgctatgctgaaaaatgagccggatcgaatactaaagccgccgggaaagtgcaaagccacagccttgcttccttacagctccttcgccatgtccagtgccagcgtgatcatgttcgtcagcatggtctggcgttcttccgccgtcatggcgcggctgtcgtcgccgatgatgtcgctgacggtcagaatgcccagcgccttcttgtgcagataggcggcgttcatgtaaagggcggagcattccatctccacgcccagaatgcccatggcgcgccacttgtcaaaaacctccgggttggcgcggtagaacatgtcgctggccagcacgttgccgacacggacgggcagccccttcttttccgccgtctggtcggccagcttcagaaggccgtagtcgcagatgggggcaaaggtgccgccaagaccatactggctgccgtagttgctgtccgtggacgcaccctgtgccaggatcacatcgcccagattcagggacgcgtccagaccgccgatggaaccgatgcggatgatattctccacgtcataaaaggagaacagctcgtaagtgtaaatgccgatggaaggaatgcccataccgtgccccatgacggacacgcgtttgccctgatagttgccggtgtagcccagcatcccacgggtctggttgaagcactccacgtcggtcaggaaattttcggcgatcatttttgcccgcagcggatcgcccggcatcagacaggtggacgcgatctggcctttttcagccgtgttatggggagtcatggaattacctcctaaatagaaaataaatcgtatctttatcataacaggaagccccgggaaaatccagcttttccaaaaagaaattcatggcttgacaggaaaaacgggaactttttataatgggaaacaggtcgtcatgccgagcactttcaaaaaagagccgtatgaccctgatattgaaaccaaaggagacgacgtatgggaaaatggggctgggtgcagccggaataccgtaagtttgaaccgttccacacaccgtttaccgctttatttttgaaggtgtcccataaaccgatggagctgcttctgcacgcaggttcctcccgcaaggtggagcagcgctgggtcaccatcccctcgccgggcggagaaatgcagatgctgatctccgaacccaaggacacggacgaaacgctgccgctgatgatctatacccacggcggcggcttcggcttcggggccgcgccccagcatcgctggatgaacgcgctgtttgcccgggaggccaactgccgggtgctgatgccggattaccggctgctgccggaatatccctatcctgccgcccgggaggatgatattgccgcctatgcatgggcctgcgagcacgcggaggaactgcatattgacccggaacgcatcgccgtgggcggggaaagcgccggcggcgcattggcgatctacctctgccgcgacgcggaaatgcgtggcctgcccgtgccaaaattccagatgctgatctatcccgtggcagatgaacgcatggaaaccgaatccatgaagaaatataccgatacgcccatgtggaacgccgagcacaacgcggaaatgtggcgcatgtatctggaaggaaagacctgcccggaggcctcgcctatggaaatggagctgcccaaacaactgcccctgacctatatggaggtggccgagctggactgcctgcacgacgaaggcgtggcttatgcccggcggctggaagaagcgggcggaacggtggagctgcacgagatcaagggcgtgttccacggttatgacgtggatccccgcaccagcgtcatgcaggagtgcctccgcaaccgttcggacgcgctgcggcgtggcctgtggggcgaatgaaccctttcggcattttccgccctaaacagacggaaaatgccgttttttgcgcgctggggaaccgtcgcgttcacttgagtgactttcggctttgtggtataatttcagacggtagtcacgaaaaacgctgacccatccatgaccggccgcattcatccggcggttcgggaaaaaatagaaatcggaggaatgatccatgtatgtttccgacgctatggtgaagcgtctgcctgcctattaccggcatttgaaggagctggaacgggaaagcgtccgccagatctcctccaaggaactgggccaacgcatgggactgaccgcgtcccagattcggcaggacatcaactgcttcggcggctatgggcggcaggggtacggctactccgtcagcggcctgcgggaacatatcggtcatcttctggggctggatcagacccatcagatgattattgtgggcgggggcaatatcggcagggccatggcccgctccgattcctttccacgcaacggctttgagaccattgccatctttgaccgggatgagaaaaagatcggcagggaggtcgacggcctgttcgtgcaggatattgactgcatggaacgttttgtaagagagcacccggtggatattgcgctgctggccgtgcccgcccgcgccgcacaggggctggcggagcgactgtacgcctgcggcgtgcgcgggttttggaactttgcgcccgtagacctgtacctgccggagaatgcagtggtggagaacgtgcatctggatgaaagcctggaagtgctgagcttccgaatccttcagaaggcggcttctcccatggagcaggaggacggctatggcggcattgggcggaggatatgagacgaggccggaagaaaagaaacggctgatcgtgaatgaacagggagaatttgtccgcccggcggatttgcaaaagaccatgggcgggccgttattttctccctatgaggaggaagaacaggagtttcttttcgacgacgatctggactggcgcgcgtcggtccagtcccttccggttcggcgcagggcgggaagccggccgccggagggacagccaaaccgccgcccggaaccgggcagaaggaaaccggcgaagggcaaagaccgcgggcggggcagagaaacgaagccgtggaagaatttcctgtatgtgttcatcattgccctgtgctttttcggcatgtgcgtgctgggcgtgatgatgatgcctcaaatggcgggatatttctggaaggactttggaaattacgccttcatcaacggcgaactgctgcgctatgacagccgggccgccgcgtcctaccgtcagtacaaaaattacatggcccagaacgtgatctatcccggcgtatttgtggacggggtcagcgtgggcggcatgacggtggaggaagcccgggaagcgctgtctaagaccacgggggaaacggcgggacagttttccgtcacggtcgctatcggggataaaacgtggaatttcgattcgtccaacgtgccgtctgcccgggatttgggcaacgtgctggaaaaggcttatgccattggccgcaccaatacggtggagattcaggccacccagcagacgcccttccggcagcgggtcaacacggcgctggcccttcgggagcagggcgtgaacctgaccaccaccgctacctacgatcacgaagcggtgcgggcgctggtagatgagatcgccgcctatgtgacccgcgatcccatcgacgcgcaaattttgaccttcgactacaagacccgcagcttcaccttttccagcgaacagccgggcgtgacgctggacgccgatctgctctatgagcgggtctgcgccgcgctggacaagtgggagaagaacgccaccgttaccgtggacccggtcatcacccagccgtccgtcaccaaggacacgctggcggcaggctttaccatggtggccgcctacacgactaccactacgaaggattccaaccgcaacaccaatatccgtctggcctgcgaagccatcaacggcacggcgctcatgcccggcgagattttcagcttcaaccagaccaccgggcagcgcacggtggaaaagggctacaagtctgccggggccatcgctgccgggcagagcattgaggaggtaggcggcggcatctgtcaggtgtcctccaccattttcaacgccgtggccagggccaatctggagatcgtggagcgcagtccccacgcgtggcccagctcctatgtcaataagggtgaggacgcgacggtcaactggcccaatctggacttcaagttcaaaaataacacggactacccggttttcctgatcacctattacgaggatcggaaaatgtccgctgaaatttggggcatgacgctgggcgaaggggtcagcatcgacttggaatcccaggtcatccgcaccatggacccgcctacggaggtcaagtacgtctacaacgctcagcttccttacggcaccaacaagatcactgtcaaggcccgcacgggctacgtggtggaaacctacaaggtctggtataagaatggcgaagagttcaagcgggaaattctgcacaccagcacttacaaggcctaccagcagacggtggagtacaacgattgaaaaaagccgccgtcccgttggatgggacggcggcgtgacagtctgaaaaaatcggaaaagaggctgtttaccgccacagcgcggcggcggcgacggaaaggatcatcagagcggccagcgtgatgcagatcacccgcaccagaatggtattccgctgcgcctttttactccgggaacttgccatatcaaacgacctccttgcaatgcgttagggtcagtatagcataatgtttttccctgtagcaaccccgcaggggtactgaaagcgaaaattcatctttcgttcacggcaaagttcaccaaatattcacaccgggcccaagctttgccggggcgggtgggttgaaactttgccggtcaggttgtataattctttcatcatcatgccggaggtgcgtacagcgtggaagaaattcgtctgggcgacgtcattcagacgcgcaaggcccatccctgcggcagcgaccgctggcaggtgatccgcattggcgcggacatcaaaatcaaatgccttggctgcggacgcgtcgttatgatggaacggccggaatttgtgaagcgccgcaagaaaatactggagcaggggccggtgccggaggcggaaacgctgcggcagatggccgggcaattcgaaggaggaacacggtaatgcagacggacaatgcagcggaaaacgttcaggcggcagaagaacaggaattgcagcctgcagaagaaacgaaaaaaggcaaggaaaagaagcctgtgaatgttaaaaaggaaattttgagctggatcctgacgctgggcgcggcggtcattatcgcgctggtcatccgcaccttcctctttgagccggtacgggtggacggccacagcatggacgacacgctggccaacggcgagatcatgttcgtgaccaagccggaatatctgacgggggatccccagcccggcgacgtggtcatctgccattatccgggccggggcgacacgaattttgtcaagcgggtcgtgggcgttcccggcgacacactgatgtttgtggataatgtgctgatccgcaatggggaagtggtggacgaaccctatctgacgccgtcccggaaccagaacggtttcagcatgttacctattacgctgggtgagaacgagtattttgtctgcggcgacaaccgcgacaacagccacgactgccgcaacctgaccaacggtgtgcctgaagctattacccgggacatgatcatcggtcacgtccgatacgtggtctatcccttcagcgacgcccgctccatcaactaggcaggcagggcgtggccctgcaccccggactgcgcgccgcaggcgcgcagggtactcggacgacaggaaagttggctgcgttttaccgccgctcggcggagggcctcgcggctcgcgggtttggcgtggttctatctgggaataagagaaaaggccgccattcagcggagggcctcatggcttgcttaaaaagaccggcatgttttcgatacacgccggtctttcaaaatggaaaaaactgaaaaatgcggcggtttcccaaagaagggaagccgccgcttttgaataggaggatcaatagccgtatttcttctgctttttcagcaggaaaaagatggtagccagcacggccatgatctctgccgccacgatggagaaccagatgccgtccaacccccacagcaggggaaagagcagtacggccgccacctgaaacaccagtgtacgcaggaaggaaatcagggcggaggtcaggccgtcgttcagcgcggtaaagaaggacgagccgttgatggcaaagccggagaacaggaatgagaaggagaaaatggcgaaggcatgggtggtcatttgcagcagttcttcgtcataggccacgaacaggcgggaaaggggagcggcgagaagttcccctgcggcgaacatgcacagcgcggcaatcgccacaataaagatggctttccgcagcaggctcttgagttcttcccggttctgcgcaccgtagtggtagctgacgataggcgcggtacccacggaatagccgatgaagatggcctgaaagatcatgctgacatacatcagtacgccataggcggcaatgccgtcttctccgacgtactgcatcagctggacattatacagcatattgaccagcgacatggagatattgcccatcagctcggaggaaccgttggcgcagatacggcccagcgggcgaagctccagacggcagcgggtcaggtgcagacggctggaatttttccgggcgaaatagatcagcgggaacacgccgccgatgaactgactggcggccgtagccgccgccgctccggccagcccgaagggaagaactgccacgagcagccagtccagcaccatattggccacgcctgacgcaacggtcacatacaggcccagcttgggcttttccgccgtagcgaacaggcattgaaactcatattgcagaatgtagaagggcagggcgatcaggttgatggtgccgtatagcaggctgttttccagcagttcgccctccgcgcccatcagccgggcgaagggccgcagaaacagcagccccacggcggtcagcaccagaccgcagagaatggaggcgaagacggtcatggaaaaaagcttgtccgctttttccgccttgccctcgcccatggttttggcgatcaacgcgccgccgcccgtgccgaacatgaaacccacgccgcccagaatcatcagaaagggcattattagattcacggcggcgaagggcgttttgcccgtataattggaaacgaaatatccgtccaccacgccgtagatggacgtgaacaccatcatgacgatggagggcagggaaaagcgcagcaggcgcttccgggtaaagtgatcggataattgaatggcttgcattgtaggaaactcccgtttttacagttgccgaacctgctcccgcagggcggtcagatagcgctcggacagcgccagatattgggcgacgtcttcctcgggccaggaagcgaaaactgcatcctcagcccggatcatgcgaagggcggttcgcgcggccagcgcccggcccttctcggtcaggcagacctgcttgttccgcgggccgtcgccttccaatcggagaacgccctccgattccaacttgcgaagggcagaatgaacggtctgcttactggaaaaagcaaagcgatagaccaactgcagcgggcagggatccccctgctcacagagaatgtagagcaggttcatggcgctgtcggaaatgccaagtttcaggcacagttcgtgataggcggcatccgtttcactgtggagggaattgaaacgccgcagcgctggagaaagcgtatttttcacttggcagcctcctttcgtccgaaatcgtaccgaaggattttagtacgatttcggacaaaagtcaaggactgtttgcaacatgggagaaagagattgtcagaagcggttttctctggtaaaattcggaaaagacgggatgaaacggcggcagtctcccgtttgcttgaagaaacacatatggaaaagcggcgttttctgcgccgcgaagggagcggaaaaggttgcatatacagccgaaaaaacagagaaggatccggcggctttcgggaatggccgccgtgctgctggcgctgggcggtttcagcctgtcgagcgcggaggcaaagatctaccagcccggtcagggcgtatgcggcaaggaaaactgctactgggaaacgcccatggatattcgggatacggaagcggtctgggccatgctgcaaagccctatcacggtgatcgacggcggacagaaggacacgttttacctgctggccgagcctgaggaaggcgcggagcgggtcggagaggtcacgggcgcgtcgcagggcgtgcatgtgctggaaacgctggaaaatggctggagctatgtggagtgctattccagctcctttcatgacagcaagctgaaattatggaaccagctggtcagcgggtatatccgcacggaactactggtggagaaggaggttcagccggaatacggcatcgtgatcgacaagctgacccagcgtctgtatctgttccatgacggcgaattgatggacacactattggtctctacgggcctgcccaacgacaagcagccctacaatgagacccgttccggcgagtttatgatcgtcagcccggtgggggattttccctcgggcaacatgacctgcggctatggaatgcgcttcaacaacggcgatctgctgcacgaagtgccctatctgaccaacaaaaaggatggccgccgggattacaattactgcgaaaaggaactgggcaggcgggccagccatggctgcatccgggtgcagcgccgcaaaacgcccaacggcgtgaacatgcagtggatctggaacaccctgcgcagccgcatgggcacccggctggtgctgtgggaggactggcacgggcggcagattccgctgccggaggacaatctgcagctttactacaatcccaacggcggaaagagctaccactccgctgccgcctgcaccagcgtgaaggacgagtatctgcccctgacggcgttttcctacgcccagctgttggaggaacccttctccaaactggtgcggtgcgactattgcactccggcgcttcgcccggaggagatcgagacgatcaacaaggaatatgaagcggacgaaggtctgacggtgaaaatctattaacggtgggggaatggctgctgtggcgcggcctttccctttttcttcccttgacggaaaacgattcacacactataatagacccatgcgaaagcggaacgtccatatgccggaaggaggggaaggccgtatgaagtttggcaaaatgctgctggtagcactgctgtgcggcctttttctgctgcttttgagtgcgctggtcgttgcgcccgaaacggaaacggttctccaggaaaatctgcccctgaccggccttgagatgagcgcctgcgcgctgccggtgtgggcggatgcgggggacagtgcgtcccgctgggtttggatgctggcggcgctgtttttctgcgcaccgctgtgcctgctgccccgtctggttttgagccgggacgccaacggctgcgtgctgcgccggggccgttatctggatgaagcgtatttattgttccggcaggacgtcgcctgcggctgatcttcccggattttctttccgcagcagcggaaaataaaatcataaaaaacaaaatacggacggaaggatggttgacaaacaatgaaagtcaacaatcgtcgccacgccaaaatgagcaggaaggcttcggccattctggctctgtgcgtggtactggtactcaccatcgccgtgggttatctgggcgtgcacggcacatggctggatagccgcggcttgtacaagctgctgccctggctgcccaccaccgacgtggacaactggcctcagagcatcgcacttggccttgacctgaagggcggcgtgtacgtcgaatacgaagccaccatgagcgacgagctgcgggaggaaggcaacaacttcgattacctgctgcagaacaccatggatatcatcgccaagcgtctgaccgagaagggctatccggaagccaccgtcagcaaggtgggcgtcagcggcatccgcgtggagatccccgatgtgaccgatcccgccgccgtgctggatctgatcggttctcccgccaagctggagttcctggactccgacggcaacgtcttcatggacggcagcgccctgcagaccgcctacgccaccaaggatgaaaactccaagcccgccatcagcttcacgctgaccaaggaaggcgcgaatatcttcggcaatatgaccgccaagagcatcggcaaggccatcaccattcagttggacggcaacgtgctgatgagtcccaccgtgcagagcgccatttacggcggccaggtgctggtgaccggctcctttaccgaggagcaggcgcagaactacgccctgcagctgcagagcggcgcgctgccgctggatctgcggcaggataagctggataccatctccgccacgctgggcgtggatgcgctgggcaccagcgtgaaggccgccatcatcggcatcctgctcgtcatgctgatcatgctggtccgctatcgtctggccggtctggtggccgactgggcgctgtgcatctacatcattctgctgttcctgttcatcgccgtggttcccggcatccagctgaccctgcccggcatcgccggcgtgatcctgggcatcggcatggccgtggacgcaaacgtggtcatcttcgagcgcgtgaaggaggaagtccgcgccggacggcccaccatccacgccgtgcgcatcggcttcaagcacgccatgagcgccgtggtggacgcgaatatcaccaccatcatcgcggccgtggtgctgctgttcttcggcaccggctccgtgcagggcttcgctaccacgctgctgttgggcgttctcgccagcatgttgaccgcgatcctgatcacccgcttcctgctgacccgcgtggcccgcatctggtccaatcccgccctgtatgcggctaacgtaaagcccgctgcggacgaaaccgtgaaggaggcgaagtaagatgaaaattcagaatcgtgcgaaaatttgcctctgcatttccatcgtgatcatgctggtcgccgtcgtcatgagcctgaccggccatggcatcaactatggcatcgactttgcgggcggcctgaacctgcagtacgacatgggttccacctatgataaggccgacgtggaagaagcgctgaaggcgcagggcatcgaggagttcgtggtttccaccgtcggctccgaaggcaccgccgtgcagatccgcgttcctaccttgtctgacgaggacgaagtgcagaatctgcagaatggtctggaaacgactctgctggaaaaatatcccaacatggacaccgacaacgccacggccagctatgtgggcccggtggccggtgcgacgctggttcgcaacgccattttcagcgtgctgatcgccgccgtgctgatgctgatctacatcgcgttccgtttcgacctgttcagcggtatcgcggctgtggcaggcctgctgcatgacgtgctcatcatgatcagcttcatggtcatcctgcgcaacgtgatccagatgaactcttccttcatcgccgccatgctgaccatcgttggttactccatcaacaacaccatcgtgatcttcgaccgcatccgcgagaacaacaagaagcccgcgctggccggtcagccccgctccgagatcgtggagctgagcgtgaaggagagccttggccgtaccatcaacactacgctgaccacgctggtgaccatcgtgaccctgtacattctgggcgttgcttccatccgggagttcagcctgcccatcatcatcggcattctggccggtgcgtacagcgccaacctgatcaacggctacgtctgggccgcgctggaagacgcccgtcttgcccgcaagagccagaagaaggccgcgtaaggaagatccatcaaacaaagacccatgccatgtgcatgggtctttttgtgtgccgggaagggagagggagcggcacgaaaaatcgccataaaagagggaggtgagacaaggcacagaacgccgatgccatccgtcataaacgctggggtcgtttgggcaatatgcagaaccgttggggatatggccttgttgaacattttaaacaagattatttataatgtatttttcagccattttatttccaatatttgcatattatggtatactggagataaccatttgatctgaacaggaggtctttccatgagcaaggttcaacttaccccttcccccaagaaatctctttccctgattctttgcattgtcttccttgtggcggtcgtgctggcggttgtgggctttgtcggcaaaaacgccgccctgacggaaaaggccgccttgaacgtccaattagaggacacattggcccagctggaagaaagcaaagcggaagcggaagcaaaggcggcggaactggaagcactgcaggtctccgtgaaagagaacgaagaaaaagccgccgccgacttggaaaccgccgtgcagcaggcgaaggacgatgcaaagcaggaaaacgaagccgccgttcaggcagcggtgaaggaggcggaggaacgggccgaagccgccgcccaaacagctgccgagacggaagcggcactgaaagcacaggtggacgatctgacggcccggctttccgaagcagaggccgcgttgaaggagctgaaagcccagcatgaaaccatatccggcgcgaacgtccagttgacggcggaactggaagcggctcaaaagcaggccgaggatgcgatcgctcaggccaaggccagcacgttggaagccgaaactgctgcaaaagctaaggacgaagcggaagccgcgctggctttggctaaggagcagactgccgccgcagagcaaaaggcgctggaagcagtgacggagtacgaagaactgcaggcctttgccgaacagttacaggcggactacgatgagctgctgggtctgagcgctacgccggagcccagcgtatcccctaagccgaccactacgcccaagcccacgaagaagccctgacggatattctgaaaaaagaaagaccctgcacgaggcagggtcttttcgatggaaaaatggatcggttatgccgggaaaagttaagcagcttctcctccgatacgccacccctcggccttttcgcggatctggatgaaacgcttgtataacctgcaggggaatcactatagagccattggaaactatcacggcgttggctaccccactacctgcttctgggagatcgccgcgcggatgggaaatgaggcgattattggtgtggacgcccataacgcggaaatgatgacatggagcaagcactttcaggctgcccgccagtatttggagggtttagggctgaaagtgttggatcagcttcccggaatgccgtaaagctcctaagcacagtaacgctatagagctattccgggaaaacccatgcgaatgtcccttactatgaaaaaatttttcgatggtaccttttttcgcaaacaaaaaacttttctgctgccttgccgcttgaacggtcaaagtcagcctgcatttggggaaaaacggactcatggcagtaatccatatcatactgccatgagtcctcgttgactttacttctttttgtgaaaatccatagtgaaatctttctggcgaatccagtaaaccatgatacaagagacgcagccctctgccgggtgcagtagcgggcgcatttgcacctgatagagagctgcgtcacccccggcgctccaactcaagccggagtgtcggaaagccgctatgactttacttcatttccatgccgacgtgaccaaactttgcaccgttcagtgtcacagcgaaaaccgccgtttcggcaagagtgcagcgataggcacggccgatcagagaaccgatttcggacttggcaatgtcagccgccgccgtgatcgtgccggaagccgtgcagtcggaaatgtcataactgtgcacttgtaggtttgtcaaacatattggacagtgaactttgagagcgacgtccagcggaggggtctcatgggcaagttgttagaacggtggttatggacggcgagttgctttgcaaagtcatccagagaataaaaggcgtgacaggagtaaaagcgcttctgatcctcgcgatggctgcgctcgaccttgccgttatggcgtggcgaataaggacggatcagcttatgtcggataccaaacactgttataatctatcaaaggttccagcgtgtcagactgttttttagaacgagagggggagtgttatgctttatttagtagttgccttcatcagactcaaaactgacatctagcaaagtttttattttatcgcttttgattcggttgcatgtgcgatgcgttaattgagcattttcaatcgaggttggaccaccttttgagaaggggatgatgtgatcaacttcgcagtcttctatggttagaattttatttccacaaattgcacaaacgggattgcggtgaaagagctcctggcgaatgctttcatcaaaggtgcgaggcatatctatctcacaagggtctatgcagccagtaatgatattgatgacttttgtgattctactgcgcacacgacgtcctgcattggttccgacataaacattttcacggtactctgcatcgttttctttcatgttgaaaatgccatcccgaattttatcggcatgttgtagaagcgaacgcttcggaaaaagtgaaaaaggaattacgatagaatcataaacagcgccattaaacttacttgcacgttcaccatgaaagaaaaacgcttcgcaaccgagaacctgtttgatggtatccataactgaacggtattgattttccatctcataaatttcatcgtcagaatcattttggtgcttggtcataaactgattcatggtattcttaaaagtacctgaaatatgataaaaatcacgcattgcaaaaaaacgcaagatacgttcttcgaattccatacgtgagttatcggtataatggaaaagagctttcacgttttcatcggtatcggcaatgcgccgtaacattgaattaaaactgccacggaaaatacagttacgaacctcctgatccttcagttttactgcaccgaggttcagtcgggaaaaaatttcatatttaagctcctgagaatcgcggtcgaggcaaatggctttgagagattttgcccggagtcggcgctgcatgggtttatccagatcacgaaaaaaaaggccgtttaaggcgctcagggtggtcagaccacataaagaaaaatcatttttcaaatagcgggtaaaagacataatccgctgttgaccatcaataacggaataaattccatcatcttcctcgcataaataaatgatggggatcggaatgccgattaaaatagactcaaccagcaatgatgctcgtttatcatcatacacatagttacgctgatattcgggattgacaataatatcattagcatcaaccatctctcgaagttgcgacagtgtgatatcttttgtttctgtatgaacgacaagctgatccaattcatcagttttcataagtatctctcctcaaaaaaaacctggcaagcaagcttgccaggcatgtggtggtcgcaacaggactcgaacctgtgaccccatcgatgtgaacgatgtgctctaccaactgagccatgcgaccattcgttgtacaccgtcttccgacgacgtcattaatcataacacaggcttttggaaaagtcaagcataaaaatcccattttggcattttcttcgtaaagacgtgatccgttctgttcagccccaaagacagactaaagcattccattgtgaaagtgcaggaagtgatgccctctgccgggggttttaggaagtcaagcccatatgcgactctgcttacgattccatcgtgtatcgtcggcttcccctgccggacactctctcagacgagcaaaggcatcctcgatcgtaggaaatcctcccctgcagtttatatcatcggtcagtgcgaccgctctttctccttttcgttttacgcaaatgcccgtctttccaaagagagcctcctgccacagagccggttctgtgacaggaggctttttctttccttttgtaacgattggatcagaacagcttcttactttccgtaagtggccgccagcgttttcagcacatccgcggcgctggtcgtgtcgccagcgtgaatatgggcctgcagagcgtttaccagatcggtagtaaacgcctgatcacccggataattgaagcccttggcttcggcaatgtattcgtcgatcacggccagtgcgggattggcagcctggaataccggcagcgccgcttccatgcagggacggtcgcccatgagctccgcacgcttctcctgagactcctgacgggccatataataggccacctgcgcagccagatcttcattctcgccgtccgcgatcacagccgcgccataggaatgaagcgtgcagccagtcttgccgtttccgccggggaagggaatgaacacatagttcgtatccggggcagattcccgcatcaggttcacataccaggttcccgcagtggtcatggcagccttgccggcagcgaaaacttcgccgtcccagcccagccccagcgtgcggggagcggcggcaactccctcgtcaaacattttgaagacaaaattcagaccgtcgatgttctcctgacggtcgatgtcatgggtgccgttccaaccgccgccgaacgcgttcagatactgcgtagtcgcgaacagcgagccgtcgtgaatgcacaaacccaccacgccgtccttcgtcagggtcttggcggcttcatacacttcttccatggtggtcgggtaatcgcccagaccggcagcgttccacagatccacattgatggcgaacagagcgggagcagcggtcatggggatcccatactgcacgccttcgtagttccatgcctgcacggcgttttcggcatagccggtcagatcgaagccatagctgtccagcggcgccagcacgccgttgtcgatcagctgcagatgccgttcgttggtggccacgaccacatcgggagcagtaccggccacgaactgaccgggcagcttctcgtagaaatcattggcgctgggatactgcacctttttgacttcctttacgccgggaatcgcttccagaacgccctccagcgcggcgtcgatggccttgtcctcgccggaagaaccccagaaaccaacggtaatggtggcgccctcctccgcgccggcggtcacgcacagacccagcgccatcagaagagccagaaacagggaaacgattttcttggttgccatgagatgagcctcctttaggttgattggtaaggttagcatagaactttaccggccgcttttcattacagaaatttgctatttctataaaaaaacggattttgcaggccgtcagcgctttccactgtttcggtattgattcggggtcatgccgcacagcttcttaaaggtattgttgaagtggaccggcgagctgaagccgcactgttcggcaatttcatagtatttcagattggtggtcaggatcagcttccgcgctttttcaatccgctggcggatcatgtagcgggaaaaggattcgcccacttcttcggaaaaaatatgactgaaataaccggcgctgatccccagcctgcccgccacatcttccagtgaagtcttttcccgaagatcgtgattcatcaggagaagcgcctgttttaccagatagctgtattccttttccccttcggaacgctgcagcgaagagagctgatgcagcatttccgcaatgctggcgcaatcatctccttccagcgccgccgctcccggatacatctcgtccagccgggtcagagactcgcgaagggtttccagaaacgccttgcggtcgataaaattttctccctgtgcggccagccattttcgaaggacggcctctatcttttccggctcgtccgcttccttcagccggcaggccagcgaaccaagctccgcctcctgccggggatggagtatgccctcccaaaacagctttttatcgggatagaaccagctctgctccagaagctggcaggcccgttcatagccctgattcaatttctccggcggataggcgtttcggtatacgacgatcacggcgtctgcctccagcatccgttcgaaatgaaaagccagttttctgaccatgccattcagctgctcctccagcttccgggcgctcggctctcccgagcaggtaaacaggagatggcacagatacggctccgtatacagcagctcccattcatcctgattctgcagcacctcccggacgatagcgtctacggcccggaaaaacacatgcaggtcgcttccccggtatcgggccacaaggctttcccaatgccggaacgaaaaggtcaggatataaattccgttcggcttgaaccgaatatgatggttctcgcagccccgcagaaacatttcccggtccgtacagcccatgcgaagaatgtttcgaagaaaattgtccttgtattgctgagctgtctgttcttcctccagaagtcgtttttcttcggccgtctccgtttgccgggcgctcagccttttcagatattgagaaaagctttcctctgccagatcatttttcagcacataatcgtccgcccccagccgaagcgcctgctgcaccaggcgaaattcatcatggcaggtcagcatggtcacatgcccggaatagcccctctgccgaatttccttcaatacctccattccgtccagtccgggaatggtaatatccaaaaataccgcatccggctgtttttgcataatcatctggacggcggaagcgccgttgtccgcctcgcccaccaccgtatacagtccttccttttccgcaatggttttcaggcccatccggacacaggattcatcgtcaacgatcgctatccgaaacatcttccgcctccaaaaccggaatttccacccgcacgacggtatacgctccttcttcgctgcgaatggatatgccatattcttcaccgaataccagtcggatccgctgctgaatgttatacagcccgatcttcatcatgccctttcccttgaggtgcttctgatgaaggacctcctcgatccgggcgggcgacatgcccgcgccgttatcctgcacctcataaacgatccggtccggctcacgacggatctggacgcgaatttcaatggaacgttccacaaggtccagaccgtgaaaaatactgttttccaccagcgtctgaagaatgtattttaaggtgcagcagtccagcgccgccttgtctacgtcgtagcggatgcggaaccggtcaaaatagcgcagggaaaggatctccgtgtaataccgcatcatgtccagttccttgcggatcgggatcttttcactcttttcccgcacggcaaaggagagaagctgcgaaaatgcgttcagcgcctgctcgatggtcctgactccctgaataaccgccatccatttgatcgtgttgagggtattgagcataaaatgaggcgagatctgagcctgaagcgcctgatattcggcctccatcttttcccgctcctgcagcttcacctgacggatgagctgttcggtattgatgatcattttattgaaggaatcgcatacctcggcaaattcaccgcctgtctccaccttagcccgaacggacaggtcaccggcgcgtacctccttcataagctgattgatctcgctgatgggtttcatgctgttgcgggtgatcagttccgtaataaaggggatcagcgccccgaacgcgccggtcagaaggatcatggtcaaaagcgtccggcggatatttcgcttcagctgatcctttggagccagactggtcagggaaaagccgaactgccgggaccggctggacaccgtcacgcggctggggcgcaggcgttccaactcttcccgccattcgccggacggcagcgaggtatacagcagctcctcggcctcgctgagaagcaccacctgcgtgtcttcatcgccctccaggatgttcttcagatcccgggcggcaatgtccacacggatcaggcccagcggctgctggccgatgggatccaccagcagccggcccacggagattaccggctcttcgcccgggtacagatcatcttcccgcaggggaaagatcagcgcctgacggccgttggtctgccgaagccgctgataccattccgcctcccggggatcgccgggcagcagccccttgccgctccgctgttttgtataagcggtctccgtatgaaacccgaacagggtaatggaataaacatattcgttttcataaaacatctcggtatacagccgggcgtttaccgtttcgtagtccagatattgctgatagcccgtctgcgcctgacggtaatcctccgcgctttttcgcaggatggacaggatggtattgtcaaacaggggtttttccgtgatggtgaccatggtgttcattaggctgtccatcgtcatcagcttctgttcgccgacggaacggagagagtcctccatgtccctgcggtaggtctggatcgtcgagccgagaataatggcggtatagatcgccaccatggcggccatgatccctaccatggaaattttgatccgggtcttcagcttcatggaacccctcctgttttacaagatccgcaccatcccaagatgcattatagcagattcgccgtgcggcttcattatggaatgacgctgtttcttcacaaaatctgctgaaaggaaggctttccccactgctccagccttctccaccgcgaaatcagcgaattttcttaagaaatagcagaattctgtaatgaaacccctgcgctgccggtttattcttatttcggaatgaattctatcaaataacggacccgcgccagcgcgggcgtattgggggaacgtgcgggcatgagaaaaaaagcgaagcaacagaaaacacgattccgggaagcggtttccagaaatgaaaaagcggccggttggatcttcatcctccctgcgacggtctgttggctgatctggtttttatatccttttctgcagtgcgtgggcatgagctttctggattacaactacctcaaacccaaagcccgggccttcgtggggctggacaactatatccatatgtttcaggatcccaaattcctgctggcgctgaaaaatacgctgtggtttgtcgcagtcaccgtaccagtggtcacagtactggctttggcgttggcactgatcctgaacagcagcttccggggccgcggcgttttccgcaccatcagctttatcccctacacgatctccggcgtggccgtggcgacggtcttcatgcatctgtttgtcaaggacagcgccgtgaccgtcttcttttcccggcttggggttgaaaacgtcacatggtatgccagcattcatctggtgatgcccttcatctccatcctgttcatctggcagatggtgggattctataccgtctactatctggcgggaattcagaccattccggcgcaggtctatgaagccgccgtcatcgacggggccggaaagtggaaaaccttccgctatatcacgcttcccctcctaaagcctaccacctatctggtggtcgtttacgccatcatccaggccttcaaggtttatgaccagatcgccgccatctgcggcagcgcgggcggcggacttggctccccggcaggcgcttcctccaccttgctgacgtatttctatatgaacagcttcaattactataaggtcggctacggctgcgcggtagccattgtactgctgctgatcattgtcgccgttaacctgatccagaatcggatcaccgattccggcgatcaggattgagaaaggagcgttgacccatgagcaaaacggcaaaaattctgtttcggctcctgatcctggttctgggagcggtgtttgtggttcccctgctctacgccctgtataactcctttctgcctctggacaaggtcgaaaagctggtttcgccggatcagttcacgctgagcgtctatcaggatctttttacgaattatcctgttttcgtctggctgaaaaatacggtgatcgtagcgggcctgaccctgctctcccagctgtgcatcaccgttccggcaggctactcgctggcaaagctgcggtttcccggccggagcgtcgtttttacgatcgtccttctgaccatgatggtgccctttcaggtgctgctgacgccgcagtatatcatgatcacccggctgggctggaacgataccctcgtcggcctgatcgtcccctatatgatgaacacgctgtatatctttatgtcccggcagttttatctttccttccccggcgatcttctggaagcggcgcgggtagacgggctcggcttctttcggagctttttccacattgtgcttcccctgtccaagcccattgtggccacggtgacgatcttcaactttgtgcagagctggaattcgtatatggtgccctccacctttgtcatgagcgaggagcgcttcaccatggtcgtgggtctcaacaccctgaaggacacctattttaaccggctgaacctgacgatggcgggcgtggtcgtgacctgtctgccgctgctgatcctgtttctctttctccagaagcatctgatccgcgggatcgcctcggagggcatcaaaggctgagaggccaaagcccgtctctgactttcccgccgtttttggccgcaaaagcgctcacgcctaaaagaacctaggcatgagcgttttctgatttctgttccgcaaacaaagaccaccgcagaaagcagaactgcagcgatcctgcagccgttctcgccgtataacgggcagacggaggccgttttctgtccgaacaggctgcattccatcgtctggcactcgagggcgccttttttgccgtaagccttgcgctaccaactgagccatacgaccaattcattgtgagccgtcttccgacgacgttactagtcatcataaaggcttttggaaaggtcaagcataaaacgagcatccgaaaatttttttgaaaaagggaaaaggaacattgcaaagcccctccggccatgggaaaacagccggaggggcaaaaagcttatttcttgtggtagagcttgtgactttggtatttggcgtcgcaggtgacattcaccttcaggcggcggaaaatgttgctgtccacctgcggaagaatgacggtggagtgcgcctcgcagcccgccagcagaggcagctgctgcatggccagcgcggcggtctcgttggtggcggcgcagatggacaacgccaccagcacttcgtcgctgtgcagccggggattgtggttgcccagatagtcgcacttgagggaccgaagcggactgatgacggtgggggagatcagacggatcttcttgttgatgccggccagctttttcagcgcgttcagaagcactgcggcggacggccccagcaggctggaggtcttgccggtgacaatggtgccgtccggcagctccagcgccagcgcgggggcgctggtctcctcggcccgctgacgggcagcggcgatcacaggacgcatttccgggttcagccccgccttctgatagatcattttcagcttgtctacttcgctctgctccgtgtgaccctccaccagcaggcagcgggccgcaaagtagcggcggatgatctcctgatgggcggcttcccggcagacttcgtcgtcaatgatgcagttgcccgccatatttacgcccatgtccgtgggggatttgtagggcgaagtgccgtaaatgcgctcgaatacggccttcagcacggggaagatctccacgtcccggttatagttgacggtggtctcaccgtaggcttccagatggaaagggtcgatcatgttcacgtcgtccagatcggcggtggcggcttcgtaggcgacgttcaccgggtggttcaggggaagattccagatggggaaggtctcgaacttggcatagcccgcctgaacgccccgctggtgctccttgtacagctggctcagacagacggccatcttgccgctgcccgggccgggagccgttaccaccaccaggggacgggtcgtttctacatattcattgcggccgaaaccgttgtcgctgacgatctgttccacatcgtagggatagccctcaatggtaaaatggcggaatacccgcactccaaggttttccagccgctgcttgaacaggactgcgttgtgctggtcgttccagcgggtcatgaccacgctgctcacgtacaggccgatgccgcggaacgcgtcgatcagccgcagcacgtccgcgtcgtaggtaataccaaggtcgccccgtaccttgcttttttcaatatcatccgcgttgatgacaatgaccagctcggcctgatccttcagattcagcagcatccgcaccttgctgtcgggcagaaagccgggaagcaccctggaagcgtgatagtcatcaaagagcttgccgccgaattccatgtagagctttccgccgaaaatgtcgatgcgctggcggatacgctcggactgcatggccgtgtatttgtcattgtcaaacccgatctgcatatgtatctttcccctttccagtgtacaacccatcttatcatgacatttttcggaagacaagggaaagatttgacgaaaacggagaaagtttccgggtggatgggcggcgaaagaaatgctataatgcagaaaaaaggaaaaggagagattcctgtgccgtgcttcgaaagcgaacattaccgtttccactattcggcgggcagctttgcagaaaaacatatccgggagctcgccttgcggcaggaaaaatgcttcgcctacatctgccgggtgctgcaggtgaaaccggaccggaaactgcagtatttcctttgcgaaacgccggaggaggtaggggcgtattacggcgatgaggaaccatgcgacgggtttgcccgggaacccgaccgaatctatgccgtgtacaatgagcgctgccgctgcgacgggtttcatgaggacgcacacttgatcagcttttttctccataagccgcctcaggccgctgtccgggagggattggccatggcctttgacaggcagtggtggggaatctgtaatttcgaatgggcgttgtattaccgagaagaaaaccgactgccgcctttcaactgccttctggaaaacgaatgcttttttgctttggactgcggattaagctatcctatcgtaggggcgtttaccgaatatcttctgctgacctacggaacggaacgctaccggctcttctggcagaaggaaaacggcggggaagaagggttccgtaaggcctatggcaaaacaacgggcgaactgagccgggagtttgaacagtacttgaccctgttttcgctggacggcggcgtaagggaacggatcgcggcgaaattgagcggagcgcccgcttctccgggttgacaagcagggaagggaatgtgtataatttttttatctgcgcatggcgcggaatgggaatgaggtgtaggaaatgttgacgaagatcccgaagggaatgaaggacgtgctgcctgcggaaagcgcccgttggcgcgcggtagagaaggaatgccgccaggcggcactgctggctggataccgggagatccgtaccccggttctggagcatacggagctgttcgcccgctcggccggcgaaagcagcgacgtagtgcgcaaggaaatgtatacctttaaggataagggcgaccgcagcgtgaccctgaagccggaaagcacggcgggcacggtgcgcgcatttttggaaagcggcctgtacgctcaggcgctgcccatgaaaatgtactatatcaacgcgccccacttccgctatgaagccccccagtccgggcggctccgggagcatcatcagttcggcatggagtgcttcggcgcgtcccagccctcggcggacgcggagctgatcgtgctggtggtggaactgctgggcaagctggggctggaaaacctgtccgtgcgcatcaattccatcggctgccccaactgccgccccgcgtatcagcagcatttcaaggaatatctgaacgcacggcgggagaagctgtgcaagtcctgtcaggagcgaatggacatcaaccccatgcgcacgctggactgcaaggaagccgcctgcaaggaagaactgaaggacgcgcctgtgatgatggatcacctctgcgacgagtgccgggcgcattttgaagcgctcaagggctatctggaggcggcgggcatccgttatacggtggatccccgcatcgtgcgcgggttggactactacaccaagaccgtgttcgagatcattaccgacacccccaacggcgagctgaccgtgtgcggcggcggccggtatgacggactggtggaggagatcggcggaccgtccattccggcggtgggtttcggcatgggcatcgagcgggtgctgatgctgctggatcagcagaacagccagaagctggccgtggaggacgaacgcccgcaggtgtttgtggcctgcctgaatcagagcctgtcgaagaacgctttccttttgatggagcagttccgccgggcggggcttcgggcggatatggatcatcagggacgtagtctgaaggcacagttcaagtatgccgataagctgggcgcgcagtacgtggccgtactgggcgacgacgaagtagccaagggcgtggtcaagctgcgcaatatgcagacccgggacgaatgggaatctccgctgaaaacggccccggaggatctgaaagcccatctggaaaaataagccggatcgttacaggctgtatttgtaaatccgggcagacacggggatggcgagccgttccgggaaaatgctgactttgggtgtttttccccggaaagcgatcccttcgccggcgcctcgccgggttgtcaagcgctgaaatatctggtatactatccttcgggtatgcgcaccggcgcgcccgtgaggaaacagaccacaggaggtgtctatcatggcccccaaaaaggataatttgcccctgacgctggatcaggatcaggactctaccggaaccatcacctacgccaatgaagtggtggccgtcattgcaggcgtcgccgccaacgaagtggaaggcgttgccggaatgtgcgcggccagcgggatttccgaggtgttctcccgcaacaccaagaacgtcacccgcggcatcaaggtggagctgggcacggaggaagtctccgtggatatttacctgatgatcgaatacggcacgcccatccagacggccgcccagaacgtgcaggaaaacgttcgcaaggccattgagaccatgaccggcctgcacgtggtgcgggtggacgtgcatgtacagggcgtcagcttcgaaaaggaaaacaaggacacgcaggcggggctggacgagcttcattccagcgtggcggaagtggcggcgcaaaagccggcgggccatgtggaatttgaaggcgaacccactccggcggagtcccacaacacgcctgatcccgaaccgatcgacgtgaaggatgaaaacgagcccgaagaagcctgacaaacgacggcaaagcaataccggcccaaaccggcattgctttttgccgtttttacgaatctgaccccatgaggatgggagaggaggtttttccatgagaaacaagttctggaaccgggtgctggtagccctgagcggccttttcattttcgccgcgggcgtgcttttgtttttggtcagcttcctgtcgctgttcagcatcagcctgtctctgggcggcacggagctttcccagctgctgaacggactggccgtgtggcagaaaattttgttgatgctgggaggcgttgccgcagcagcgctgggtctgcacgatttgagcattcccttccccagccgccgggagcggggcttcatcatgcagcacacagagttgggcgacatgagcatttccatgaacgcactggataccatggtgcgccactgcgtggatcagcataaggagctgaccgtcaagtccacccgtatcagccgtgtcaagagcggcatcgttgtggaaatccgcattatgctggctgctggggtgaatattcccctgacggtgaacgccctgcagaagcaggtgaagcagtacatcatgtcctgcagcggcgtggaggtctatgaggtgaaggtgctggtggagacaggcattcccaacggaaagacccgccacagcaaagagctggtgctggagcctcaggccgcgtcgcagcccgtgaaggcgggacccgtcaaagaacccgctcagaccgcggagcctgaacccgtcgcagagccggtgccggagccggaaatgactgccgaagaagaagcccccgccgtcacggcggaggaagaaactgagaacacgcactgggaagaaacccgggaggaagaagaaaacgagagccagccggaagagaccctttcggccagcaaagaataaggagcgtcagtcatggacgagaataagggatttgcggtcggcacgaaaaaatgcggtctcctgtgcggcgcgatcggcgcgctggcggctttgtgctgggtgctgtttgggttttggaacatgatcttcatcgcggcgatgtttgccgtcgggtatttcgtcggcgcgtgcgaccataaggcggagctgttcaagcgcatcgtggatcgcttcgttcccaagaagggcgagtaagccccgggcggggagacccgcccttttatgcgaaactgcgacaaaagaaatggagtgttgaatcgaatggcgcgttcattggccagacgggctgccatgcagcttctgtacgaacgcctgtcaggcggcgaggcggatcaggaatccctggatatggtatacgagcagttatccgaagagggggaaaagcctcagcgcgtgaacctgaccccggaggatcgggcctacatcgatgatgtgctgcagggtgttcaggatcaccagcaggagctggacgaccagatcgccagccattccaccggcgaatggaccatcagccgtgtaccccatgtggatctgagcattctccgccttgcggcctacgagatgctccaccgcagcgacgttcccgacaatgtggccatcagcgaggcgatggagctggcctcccggtacagcgagccccgcagcagccgctacatcaacggcgtgctgggtgccatggaacgcgacaagcaggaaggctgatctccatggacgcagtgttgggtctggataccagctgttataccacttccgccgccgcggtggacgcgcagggaaaggtgatcgccttttcccgcctgctgctccccgtggaggcgggccagcgcggccttcgccaaagcgaggccgtttttgcgcatgtaaggcagctgccccgggtgatggaaagcctgatggcggaactgccgacggaagcgacgattcgcgccatttgcgcatcctccaagccccgggatgaggcggacagctatatgcccgtgtttcagaccggttgcggttacggacgggggatcgccgcagcgctgcgggtcccgttttttgaaacgacccatcagcaggggcatatcgccgcaggatgcatcggccttccgccgctggacgagcgctttctggcgctgcatttgagcggtggcaccacggaactgctgctttgcgaaaacggccgactgcggctggtaggcggttcgctggatcttcacgccgggcagatggtggaccgggtgggcgttcggctgggattgcgtttcccggcagggccggagctggaaaagctggccatgtcctgtacggaaccgacggaagccctgctgcccgcgtcgctggaaaaggacgcatgctattgccacctttccggcgcagagaccaaagtggcgcagctgtgggaaaagcaggcctgctcgccggagaggatcgctgccgaaaccttcgatctgctggcccggacggtcagccggatgctggcggcgggctgcaagcggtatcaggtgcggcaggcgctggtggtaggcggcgtggcttcctccaagctgctgcgcgaactgctgcggcagcggctgtccaaactccgctgcccggtggaagttttctttggcgatccccgctatagcgcggataatgccgccggagtggcggagctggggctggaacagtaccggcagtggaaagagaagaacgcctgaaacaggcttatgatttgcggacagggagggacgggcaatgacggctaaaattctggacggcgcggcaatggcgctggaggtcgaaaaagaactgaaacagcgggtggaagccctgcgggagcgcggcgttgtgcccggcctgtgcgtcattctggtgggcagcgatcctgccagccagacctatgtagccaacaaggaaaaagcctgcgctcggctggggatacattcccgaaccgtccgcatgggggaggagactacccagacggagctggaagccgagatcgaaaaagccaatcatgacgaaagcattcacggcattctggtgcagctgcccctgcccgcacagctggacgagcatcgggcgttggcgctgatccgtccggaaaaggatgtggacggcttccatgcggtgaacatgggtcgtctggctcggggcgaggaatgcgtggtggcctgtacgcccaagggagcgctgcatatgctcaaggcggcgggcgtgcccattgccggcaaaaacgcagtggtcattggccgcagcaatatcgtaggcaagcccatggcgctgctgctgcttcaggaaaacgccaccgttaccatctgccacagccgcacggagaatctggcggaatacacccgccgggcggatattctggtggcggcggtgggcaagccccggttcgtgaccgccgatatggtcaaggaaggcgcggcggtgctggacgtgggcatcaaccgggtggacggaaagctctgcggcgacgtggattttgagcatgtgaaggaaaaagccggatggatctcgcccgtacccggcggcgtaggcaaaatgaccattgccatgctgatggaaaatacggtgtccgcggcggaaaaggcggcgctatgaccagcgagcggatgaccctgagcgttgctcagctgaacgaatacgtccgccggacgctggcgtcggacgtgatgctgaaaaatatctgcatcacgggcgagatcagcaatttcaagcgccatgtgtcgggacactggtatttcaccctgaaggacgaggaagcggccatcagctgcgtcatgttccgtcaggcggctcagacggtgcgctttcagccggaaaacggcatgagcgtgcggctgacgggcagtgtgagcctgtatgtgaagaccggctcctaccagttttacggcgaacggatggagcaggaagggttgggcgagctgtatctgcgcttcgagcggctgaaacagaagctgctggccgaggggctgttcgacccggcactaaaaaagcccctgcccctgctgccccggggcgttggcatcgtcaccagttccacgggcgcggtggtgcacgatatctgtaccgtcacttggcgcaggaacccggccatgccgctgtatctctgcccggtgaaggtgcagggcgagggggcggccagggagattgccgcggccattcgccggctggatcggatgccggaggcagaggtgctgatcgtgggccggggcggcggcagcatggaggacttatggcccttcaacgaggagatcgtggcccgggcgatcgcagcgtgtcgaacgccggtggtcagcgccgtaggccatgaaacggattttaccattgcggattttgcggcggatgtgcgggccgctacgccatcggcggcggcggaactgtgcgtgcagccgagggtggccctgctggacgagatcgaccagcaggcggagcggctggaacgctgcctgacgctggctttcagcgatgcggaagcgcggctgaaacaggcggagacccgcttgaaggctcgggagccggagcagcttttgagccggtatggcctacggctggaaaacgttcggcaaaggctggacagcgccgcatcccagcgattgcagcagacggaagcgcggctccgtcatgcggagacacggcttcgttcttccgggccgcaggagaccctgcgccggggctacgccgtggcgctgaaggagggtcgtctgctgaaaagtaccgccgacgcggcggcgggcgatgctgtgcggctgatgctgcaggacggcagtctgctgacccgggtagagacggtggaaaccgagcgttgaacccatggaaaggacggga

SEQ ID NO: 3282 - DNA, 1796 bp, Unknown
  16S sequences of unknown bacteria
tgttcatactgtttcataaggcggttgacgtcctcaaccttttgtccgcagccggcggcaatacgctttctgcgtgaaccgttaagtatgtcggggttttccctttcctcttttgtcatggaaaggattatggcctccaccctgtatatctgacgctcgtcaatgtcggcgtcgcgtatgcttttgtcaactccgggaatcatgctcagcatttttttcatcgagcccattttcttgagctgctggaactgagaaagcaaatcgtttaggtcaaatttattttccttgagctttttggcaagctcttcggcctttttttcgtcaagcttggtctcggcctgttcgataagcgaaagaacatcgcccattccgagaattctcgaggccatacggtctgggtgaaaaacctcaatatcgtcaagcttttcgccggttccggcaaatttaatgggctttcccgtgaccgcgcggattgaaagggctgcgccgcctcttgtatcgccgtcaagctttgtgattataacgccgtcgataccgagcgtctcgtcaaagctctttgcaacgttaacggcatcctgacccgtcatggagtctaccacaagcattatctcattcggctcaacggcacttttcatgcggcggagctcatccataagttcttcatcgatgtgaagacggccggcggtgtcgagaatgacataatcgttaccgtagtccttagcgtgagaaagagcctgctttgccgttttgaccgggtcctgagtccccttttcaaaaacggttgctcccgccttttctccgacgattttaagctgatcaattgcggcgggacggtagatgtcacagccgacaagcaaaggacgatgcccctgggaaataaggagcttggcaagctttgcggcgtgtgtcgttttacccgaaccctgaagaccgcacatcataaccacggtgggtcccttggaggcggtgtttattctcgcgtcgcttccgcccatgagagcggtcagctcctcgtcgacgattttaacaacagtctgcgcaggggtaaggctttcggtaatattttggccgattgccttttctgtgacggtgttggcaaaatctttggcgaccttgtagttaacgtcggcctcaagaagggcaagccttacctcccgcatggcttcgcggacgtcgctttcggtcagcttgccgcggcttttaatatgtttaaaggcgtttgtaagcttgtcggtaagtccttcaaaagccaaagataatcactccaaaccgtatcaaaaagaaagttcgtttataagttccaaaagggcgccgccgtcgcagtcgctgccccgcttaatcaattcggtcattttaaggacaatcttttcattgcgctcatgcctttttgaaaggccgagcttttgctcgaaaagctcaagatttttttccgccttgcggagatttccgagaacggcctgcctcgttattccggcgttttcggcaatttctccgagacttaaatcctcgttataataaaggtcgaaaatgtccctttggtgctcgctcaaaagatctccgtaaaagtcgaaaagaccggcttttttcatatccttgggcatagtctcacctgtcaaccaaatttgatttacacctattatagcagaaaatttacgtttgtcaacacttttttatcttgaaagaaaaaataaatgcggtataatgtaaataaacaaaaaggagtgataacatgaacgaagttataaaaaatattctcggccgccgaagcgtcagaaaatttaccgacagggaaattt

SEQ ID NO: 3283 - DNA, 6174 bp, Unknown
  16S sequences of unknown bacteria
gggcctcggccggtgcgagacgctggccgctgctgctggcgctgctgccactggtggcctgcgctgtgggccttttgcccgtcggcgtggggctgctcctgttggcgggcggctgcggcctgcagctggtgtactgtgtgcgccggggcgcgggcgcgaacggcaagacgctggcgctgcagctggcggcctgcctggctgcttgcctggcagcgctgctgctggccctggcctgcggcgatgcgctggaaaacaccagcagccagtggcggcagaggctgggaaactgggcccatgcggtccggtatgacaccgcctccaatgcgatgcctgaagggcagctgcataacctgcccgcctgggagccggatgacacggcggcgctggaggtcacgatggacgagccgcagaagctctacctccgcggctttgtcggccagacctataccgggcagagctggcaggatctgccggcggagacccgggcggatagcgccgacctcttctactggctgcaccagagcaatttctacggtcaaagcgtcctggcgtcggcttaccaggcgctggaggagacggcttcggccaaaatcacaattaaaaatctgaccgcctgcaaaaagcaatattttctgccctacgcggcggacactgctgcccttgcggatgaccgccagatcggtgacagcgctgttcttgcaaagaacgatacttacacggcctactattatcccgggagcatccccgaatggttcacgctgcaaaatgacctggccgatgccgcggagtctaccttgctaaagcgttatcaggtcagcgaggcagcgtaccgggactacgccgaaacgaacaatctggagattccagacgaggtgcggtcgctgctggcccaggagctgggcagcgcatctggcggcatgacgctgagccagatcaaggatacgatcctgacctatttggattcgaatatgacctatcagccggggcggcagacggagaacggcgataccgactttatcctctacaccctgcaggagagcccctatggctacagcgtccattatgcgacgatcgcgacgatgatgctgcgctattacggcatccccgcccgctattgtgagggctattatgtatccggcgatgaggcggcgacctatgccgccggccagacggtcacgtttacggaagcgaaatcccacgcctggacggagtactatctggcgggcgtcggctggctaccctttgaggtgacgccgggctatgtcgacaaggaagagctggaaggggagggcctgggcggcggtggccggacctacatgcccccgcagcaccagcccgaggagaccccggaggagaacccaacggatgaaaaccgcaccgtgccggtcttccgcgtctggtggctgctggcggcgctgggctgcctgctgctggtgctcgcagtgctgctggcggcgcgccggttgcgcctgcgccgccgtttggcggagattgccgcggcggaggataaagcagccattgctctgcgctttgcctacgccgcctggctgatgggctacgccggggcgacaccggagaccctggccgctgccgggcttgattatgctgcggcgcggcggctgcagctggaggccctatatagccagcatacgatggacccggcgcagcgtcaatggatggacgactatgccgctcaggtgctggcccattgccagaaccgctggaagcggctgcagcggtggtattatcactggatcaaatgcctgtattgagtaaggaggagttccaatgagcaaatttttgaaacgtggggtggcggcgctgctttgcctctgcctgatgctgagcgttatgccccgggtccaggcggcccaggggagcggcagcttctacttctgcgtgatgacagcgaaccgtgtcatcgtcgagccggaggcgatctcttacaccgccgggcagaccgtggaggaggcaatcgccgcttccgggcacaagctggagcggattgaggacggcagcatcgtcgccatcgacggcgtcagcgcaatgtacctgcgctattatgacggcggcggctacgacatgacgaaaccggcttccgagatcacggccatgttcttctgtgtcaacgatgtctacagcgacgcgatgattgacctgctctgcgcgatgggtcgcttccgtacggcgcagaacaacctgcaaaacgacccggcctccaaggatgcctacgccaatgctatggacgcactgcccacggcaaaagccgacacggcccgcacctgctgcgatgccctaacggcggcgatgaacgcctacgaggcgcgcatcaacggcccgaaatacaccgtgaatttccaggtcacccaggcgggggccagtgtgtcgaatgcggctattacgatgacggacgactgcggcaatgtcacgacggggcagggaagtgtccgcgtagtaatgggtaattatacgtatgtgatctctgacggggccaataaccgcacggaggggaagattgtcatctcccagaacgcgacggtgacggcgcagctgccctctggccagtggttcaagagcgccacggtcctcaatgagaacaaggacccctatgccagcagccgagacggcgaccgcgtcacctggtatgtggatgacaccgcgagtaagaccacggtctatctctatgccgagcagggcgatgttccggcaaaagcaacgcggctctatgcctgctacaccgacctggatgggaatgactgctcggagacctaccgcagctggcaaagccgctctacaaagctctccgctttgctggagcagggcatgacgggccgcagcctgacactggaggcccgctataagatgaatgagggcaaagataacgagcagacgatgatccagtccctggcggtcgatgttgtccgtgttccgacgctgaaaaagctggagctcctgcaggacggcaccgcgctctacctgcccttccagccggcggagacaaattatacctgccgcgcgacagctgcaagcgtcaagatcgacgcccaggcctatacggcagacggcacgacggtgacggtcaacggcaagcagacggacaccgtcaacctctcaagcgggaagaacaacgtcctggttaaggtcagccacaccggcggccagagccggacgtatcagatccagatcgaacgggtctccgccgtcactgtggcgctggaggtccctgcgggcgtggatgcggagctgcgcaaccggggcggcacggtcattgcgccggagtctaacggcaaataccgcctgatccccggcgatacctacgagtgcgtttcgacgaaggacacgtggtatcatgcgtccctgaccttccaggcagcggatggccagacaatcaccgccccggtccccgagacggtggacgggctgaacggcctggcgttctataacagatcacccttcaccagccgcgtggcgctgccgctggatgcggcgttccaagcatcgcgccacagctataccgccacggcgctggacaccctggcgtctgtctacgcccaggcgacgagaacggacaaggatcaccaaacggtgacggctctctatcaggcccagtcgtcgacgccggaaaaatgcggtgtcgcaaaggagctgaagatcgagtatgacgtcagcgacaccggcaagaccagcttcctgatcgactgcttggcccgctccggctatagccagcaggtgacggtccgggtgcagaagcaggtctcggatacgctgctgcaataccaggattacgcgattaccatcgcccgccagctgcagctgcagagcctggcctgcgcggcaaacggcgaaaatattgacctgctggatgcaagcggcaaggtcagccgcttcacaacgacgcaaaaagaatatacgctccaggtcctggattccgtgaaagagctgaccctcacggcggccttcccgaacgagacgtcggacacgcccatcagcggcgggtactacgcgatgatcggcgaaaagcgatacgacagcctgcagagcgtcacgctggcaccggcgtggaacgatgccgggctgcaggatgtgacgatccaggtgcggcatcaggacagcaagaccgtggtgggaacgtataccctgcatctcaagcgggtcgagccggtgcaggtgcagttccaggtcaccccggcagaggctgtgacgtttgttatcgccaacaagacgggcaagcctgtctatgctgaggatggaaaattcacaatgatccccggcaacagctatacctataatgttacctgcggcggttactgcggcaagagcgtgaccgattatctggcacctgcacaggatacaacgattcaagtggccctggagcaggctccggccaatacgacgctgcaggatttacctgctgcctggcccagcctccggcccaccagcgataataacggcatcatcaacacgcgaacgccgatcacagcggaggacaccgtcctctactgggcaaatcgtgtcgggaccggctggtacggcgacgcctgcggctgcccgatcctggtgaacgacgcgctgtatgtctacgccggcaacaagctctataagctggataagaccagcggcaaggttctggccagcggcgagatggaccacagctccaactggtgcatcaacagcgcaacctacggcggcggcatgatcttcgtcggcctcagtgacggcaccgtccaggcctttaacgcggcgacactggaatcggtctggatctatcgtgacgcgctgggcggccagccgaactgcacgatcgcctatcacgacggctatgtctacaccggcttctggcgcagcgagaccctcgacggcaacttcgtctgcctcagcactacggatgaggatccgtcgaacccgaaggaagagaaggcggccagctggctctatactgccaagggcggcttctattggactggcgcgtgcgtgacggaccagtatgtcatcgtcggcactgacgacggtgagaacggcaatagcaagggccgcgcgtcactgctgtgcctggaccgccggaccggtgcgatcctatccagcctgcagctgccccaggccggggatgtgcgctgcaatatcgcctacgatgcgcagagcggcaactactactttagtaccaaaggcggctatttctacagtatccaggtcagtgaggcgggtgtcattgacgagagttctctgcgcagcctgaatttggagagcaaggttggctccgcttccacgccgacgatttacaatggccgcgcctacatcggctgcggcggtacagaggcctatggcgcgtatagcgggcatacgatcgtcgtcattgatctgacgaactgggagattgcctaccgggtcgagacccagggcaatccgcagacaagcggcgtcctgacaacggcctacgacgagggcgacgggacagtttatgtctatttcgttgaaaactacaccccgggcacgatgcgcattctgaaggataagcccggccagacgaaaccggctgagacggtgacggaggtctacaacggcaaatcccaccaggtcgccccggcactgttcaccccgtatggggatcacacccagtactgtatctgctcgcccattgtggacgccgacggtacgatctacttcaagaacgactctggctatctcatggccatcggcagcaagcccgtctcgctggagatcacccagcagcctacgaagcagacctatgaagcaggggagacctttgacgctgctggtctgcaggtcatggcgacgtatgaaaacggcgcaaagcgggatatcaccacggcgctggattggaatacggatgcgctgacggtgaatgacacgcagtttgaattgaccctgcccctgggctaccagaaccgggacggcaaggcgggccaggaggtccccgacctgacagtgacgctgcagctgaccgtcacgcccaagcaggatccggagcccccgacgccgccgacgctgccctttaccgatgtcccggaaaacgcctggtacacggaaaatgtccgctacgtctatgagcagcatttgatgtacggcacgacggatacgctcttcagcccgaaccagaacctgacccgggccatgttcgttgcgatgctctaccggatggaaggctcgccggaggtc

SEQ ID NO: 3284 - DNA, 5034 bp, Unknown
  16S sequences of unknown bacteria
gtggcgggtggcaatcatgatctcatcgatgctgttaatggccagcagcgcggtgcggttgacgcgaaacagcccgtcgcgggcggcggtcagctcaattttgccttctttgacgacagagcgggtcatgccgtcgttttcgcacaggcggcacagccgcgcggcggcgtcgttttcatgcagcatgcccggcctgcactcccagacatagaggttctccttgcccatggagagcagtaccgggatatcctccggtgtgacgacgtggcccttgcggaaacgggcgtccttatattcgccggggatgatctgcgtcatatcatgacagagcacatgcccgacggcgtcaacggttttcatcagcttcatacgcggctcctttcgcggtctggcgggaaaagacgccgctttttccgccgcttttttccaaaagacagatgtttttaatctccatatcccgctgcacggccttgcacatatcgtagattgtcaaagccgccgcactgacggcagtcagcgcctccatttcgactcctgtctcgccgtggcagcggacgcgagcttcaatggcgatgccgtccggcgcataggaaaaggcgagatcgatgcctgtcagcaagagcgggtggcacatggggatgatgctggcggtgtgctttgcggcctgaatcccggcgacctgggcgacggccagcacatcgccctttttcatgccgccgcgctggacgagggccagcgtctctggccgcatggcgataaagcctgtagcggtggccgcccgatccgtcgccgctttttcagagacgtcgaccatccgggcgcggcctgcttcgttaaaatgggtcagttccatttgtcatcctccgatctcgtgcatattgcggcagctgcggcttgcatggtgggcgtccatcgtgtgctgctgcggtttttgcaaaatggcttgggcgatggccgcgcgcagtgcttccggcggcagaccccgcagggggtattccgccgccgcgtgcaggcagggcttgagattgccgttggccaggacgcggatgcggttgcaccggccgcagaaacggtggtgcatgggagagatcagcccaacgctgccccgccacccggggacctggtactgctgggcgacgccgttctgacctgccgggaccagctgcggcgcagcctgcaggacggtactggcgggcacaaagcaactctccggccaggcggcgcacggccccatgggcatcagctcgataaaccggacgcacaagtcattctcctgggtcagggcgacaaaatcgccgatctcatcggtattaaagccgccgatgaggacgacgtttagtttggtcccggtgaagcccgccgcctgggctgcctgcagcccgcggtgaaaatcccgcagcgttcccagccgggtgatctgggcaaatttttctggctgcagggtgtcgaggctgaggttcagccggtccagaccggcgtctcgcagtggctgggccagggcaggcagcagcgcgccgtttgtcgtcatcgccagcgtttccagcccgggcagagcccgcagctggcggcagagatcgacgatcccctgccgcaccagcggttcgccgccggttaggcgaatttttcggatgccgcagtcgatggcagcccggctaatctccaccagctcctccagggagcagatatcccggtggttctttttgcagatgccctctggtggcatacagtagcggcagcgatagttgcacaggtccgtgacggatagccgcaggtagtcgattacgcggccacaagtgtcattcatacggtctcctttcccgtcagcagcattacatgggtgggggtgattgcaatctggagcgactccggtgcctggccatttggccaggtctgcttgggtagttccatgcgcagcagactgcggccggttttgccgccgggggtctccagcatcaggatcgtggaaaacagatcgtcgatcacccgggcgacccggcaggagaaggtgttttctcccgtgcccggctggatgaaatgcgcccggacgccgacggcggtcaggtcctgcgggacggcaaactccgtgcgcagcgtgacgccccagtccaggcaccgcacggtgtgcagatcgagggcttcggcagcggagatgtttttgcagccggagagcagcgcggcgctgattgtccccggtgcggagaagagcgactctaccggcagcttcggctcactgctgccattggccaggacgcagacactgtcgcagagccgatagacctcgtcgcggctgtgggagacatagatcacatcgccgtcatacccgcgcagaagatcggcaagctccatctccagctgccatttgagatagctgtccagggcagagaacggttcatccagcagcagcgccgcgggatggttggcgaagatccgcgccagtgcgacccgctgctgctgcccgccggagagggtggcgggctttttgccctccagtcccgtcaggtggaagcgggcaatctgcgcatcggcttcagccagccgcgctgcgcggtctttttggcggcacccggcgaggatattctgcaggactgtcatattgggaaacagcgcgtattgctggaaaagatagccaatctgccgcttttggggtgggaggttgatccgccgctggctgtcaaaaaggacatggtcgtctaatgcaatatgcccccagtccggcgtttcaatcccggcgatgcacttaagggtcatgctcttgccgcagccggaggcgccaagcagggcgaggatatcgccgtctgtttcaaaggcgacgtccagctggaaggcgcccaactgtttgtgaagttcaacgtgcagcatgacgcaccccctgcagttgcttctggcgggtctcgagcaggttgaccgcgagtaggacggcggcggaaatggccatgttcagcatgacccagcggaaggcgaggccgtcgttgttggtacgccagagctggtagaccgtcgtggagatcgtggcagtcctacccggtgtgtagcctgcgaccatgcttgtcgcgccatattcgcccagggcccgggcaaaagccaggactgtcccggccaggatgccctgcttgcagtagggcaggcggatgcgccaaaaaatttttgtgtttgagaggcccagtgtcttgcctgcttgggccaacgtttcatcgaaggattcaaatgcgccgcgggcggtgcggtacatgagtgggaagatcacgacaatggtggccaggatcgcagaccaccaggtcatggcgagctttacaccgaagtgcgacagcagccacgcaccaacgacacgccttggcccgatgacccgcaggatcaaatagccaacgacggttggcggcaggaccaggggcatcgtcaggatgacgtccagaatacccttgcacaggcgggggatcttggcgatgtaataggcggcgaagagcccggcgaagaaaataaaaacggtcgagatggctgcgatacgcagagaattataaagggggaaccaatccatagcagtctccttctgtgccgggaaagcgggaaaatgcgcacacaaagtctgccgcaggtgcggcagactttgcagcgcgccgggaccggcgcggaatgtcaaggtcttgtgcggcgcggcattactgcagcgcggtgaagccgacgccctcgaaaatcgcagagacttccggtgttttcaggtattccaggaacgcctgagcggcttcctgatgcttagaggtgttcagcacggcggcgggataaatgacctggccgcacatgtccgctgtggcagagtcgacgacggtcagaccggcagagtaagcgtcggtacagtagatgacgccgcagtcaacggtgccctccgagacctgggtggtgacttccttgacgttgctgccgtaggtgatatgaccggcagcggccagggcagcctcatctagctcatagtaggcgagaatcttctgtgtgtactggccgacgggaacgtcctcgttgcccatgcctagcaggatgctgccgtccttcagcttctgggccatgtcgtcaaaggatgtaacgccattttccacgccatccggaacgcagagggtgacttcgttttccagaatatcaaagcggctgccttccaggacgaaatccaggccttccgtgttgatcgacgggtcggcgctgatgtccaactcgttcatctgcttctgaccggcagagatgaagatatcgcagtctgcaccggactggatctgggtcttcagcgtgccggaggagtcgaagttgaaggtcagcgtgacattcggagctacgtcgcggtacaactccgcgacctggttcaaggtctccgtcatagaggcggcggcaaagatgatcagctcgactggcgcagcgttcgtggtttcgtccggcacgtcgctgcccggggtatctgtctgggtggtgtctggcgtcgagccaggggcgtctgttttgccgcagcctgcgcacaggcagaccagcatggccaaggccagcaatagtgcgatccattttttcatttctattcctcccaaactgcatttgcaatgattacactgccattttgacgtcaatgcgatcgattgattaaataataccattcgacgagaagaaaatcaagcgaaaaagttccgcaatgacgaattgttgtatttttaaaagataaacgatggcataaaatttgcccggcgcagccgggcaagcaagatacagtatggcggcgttactccggaatctcccggtacatgccggccgcgtcgtccttgcggacgttgtccgccacctgcagtacttcgactttcagtgtgcggcttccgaaggcgatggcaatctcatcgccaggcttgacggagtaagacgccttggctggcttgccattgacgctgatacgggcattgtcgcaggcttcattggcgacggtccgccgtttgataaggcgggagacctttagaaatttatccagacgcatacattgcgctcctttctgggcaaaacggcgcgggtgcatgc

SEQ ID NO: 3285 - DNA, 32759 bp, Unknown
  16S sequences of unknown bacteria
cgccgaaacggcgggacgaggataatattatgcacaatcagttatctttttttgttttgtctaaatatctttttgcaatatttctaacccatgtaatatcgcttttgctgtatttcaacatcgattcttcaatttcatttccgctgaaattgctcaaagcatccaatgcgtgtccgcagacggaattgtcgctcaacaattcaatcaaaacaggaattacggttttgtttttactctttcccaacagcagaagcagcatttgtctgtccgaaccgagagatttatcctttacaagttcgagataatcatgcaaataattaaaattcccgatcttatacagcaaatcaccgtattcccacagatttgacggtctgttttgacttttgaatacaagtaacatcaattcaaccaaagcatttctgtcatatcctatcacgaacaaatcttccaacagcgatattttctcattttcaagacttgtttttttatatatatccaatatcccgtcgcacagttcgatatgtccgtgcagacttttttcgaacagttttcggtttaaagaatgatatatattatttttttcgagaaaggcgtcatactctttcgatatactgtccggatttttatatgcaagaagcctttgcttttctgcaagttggtatatgtctttttccattaactttacctcttgttgtaatagtgaaattatgttttatcaatcgaaataaaacaaaacaattttccctgcatcaactaatgcttttaaagttccagataattgagtggatggtcttacttttataaaaaaagtgtacccgtatttttcggcatatagcaaaaaatcttttaactgcgaagtgtatgaaaggtattttacatatttaatatcacctatgattttgtttgctttatctaaataatcgggaattctgtattttgcagtgtttgttaatgatataatgtgtttagtatttttaggtaatttggataatgtttctcccagttttccaacccaacgaacctttgccatactgatctttgaagcaagcgttcctgcctttattccagatgcaccaaaaaaagcgccgccaatgtaacccaaaactccgccgacaacagcaccgccaagtacccaccagccattcacttttccatatatcgcttttgatatggcggcgcctgccgctgcccctacgaccacgcctataattatacataaagcaaggcaaagcccttctcctgtatcatccttgtagataattgtactgttcgcacaatacgcatacaaattgccctttaagagttttgcaccctcatcgaattctccgtaaaaagcattcggttccggattaagccatctgcccgtgacggggtcgtaatagcgcgattgcaggtagtagaagcccgactcgttgtcgtagtagtaaccgcgatagcggaacgggtttgccgtgccgacgcgataccaaccgttcgtctggtcgagcatcttcgtgacattgccccatgcgtcataggtatattcgacaagcaagcggaatgtgtggttgtcggttccgtcttccgtgccccagatttcaattatatcgccttgaagatttttcttgtaaaaataattgtttccgaggtagttcattccgacggggcttcccgatgcgtcatagaagaagtaaatataatcgaggctgtcgccgttcgtcacttcctgtgcgattatattcgttccgtcaagcaggtaacgcgtctttattccgccgaaatttttcatcacgcggattccgtcttcattatacgtatatcgcgtcgttgaattgaatgaagcaagccgtctgccgttccaagaaagggaaattccgtcgcgataggaaagcgggtttccgttcgcgtcgtatgttatttcttttccgttatacgatgtcagcttgtctttccacgaggcgtcagaatagccgtaaacgacgctcgaaacaggttcggacgggagacttcccgttgtataggaatattcttttttcgagagaatattgccgtttttgtcgtattcgaaaacgaaagtcttgttctgggaaaagctgtcgtgacggacaagctgtccgagcgcgtcataggaataactttccgaaagagccaacggtttcgaagaatacgaacgcttgcggctttcggtcagaatgtttccgttcgcgtcataagtatatgcgatttccgcgccgtcggagaaggttatcttttcgacgagatccgtcgccgccgcgtttccgttcgcgtccgtgacggttccgcggacatattcgtatgtcgcgcttattttgcttccgcttcgaatttcttcgagaacttcggaaacggttcttccgagagcgtccgtcgtcgaggtcttttcaaaaattcccgtcggattttctgcgttcttgatgttatccaaccgcgttgttacggagttttcttcggtcgttatctcgtaaccgagtttgacggagccgaattcgtagccgaatcctattttttcttcgtcttcttctcccgcgcggatagtcagaagcgttttgtattcaatgggatatgttccgtctgtatacttgaattccgtcgaaacgggatttccgtcctcgtcgtaagtgtaaaaatacccggcattcattccgtttatccacactttttcgagaagcccgtcggcgttatatgtatatatataccgttcgcggcttccggctgcattatacatcacttgctcaattttgtcaagactgttgtaagaataagtgacggtgcttccgttcgcataggttattttcgttatcttatcgccgtcatattcatacgaaacgaccgcagtatcacccacaagcacagatgctatcttttccgcatcggcggcggtgtatgtgtaagtataagactgtccgtttgcgctgacggaagaaacgttgccgttcgcgtcataaacataatcaaccgcacgttcgccctcatcgcagatgccgtttccgttcaagtcgttatacatttttgtcaattcgtctttggaattgtactcgtaacgggctatgcttcctttcgcgtcggtttccgaggtcttgttgccgtgtgcatcatatgtgaaagtctttgtgtttcctctgccgtctttttcggatgttacatagttgtatgtctcatcataagtatattcggagtatgtataaagagacccctcagtatacgaaacggtagaaagaagagtgttgtcatagcggtcttttttcgtaacagaaacggtttttgcagttctgttttcgtccgtgttcggtgcgtcgtattcggtcacggtctccgtggtcgtctttgccgtgtcgtcatacgcataagttgtttgagtatattcggtcgccgtggcggaaagtctgccgtctgaaccgtaattgtaatttgttttgttcccgaggaagtcatcttcaacaagtatgtcgccgttttcattatattcataacactcggcggcgttcataacaagagaaatgtcgtcaaacgaaacgcgggagaaattatcagtgcttatcgcataaacttcaattcggtcagcggtgaccgtctgtccgctttctgcctgcggaggcacgaatgttgtcgaaacaaactgccagccgtcagaagaagcagctggagaaacggtatattctgcggtcttttgctcgggcacaccgttttcggtgatggtgtaataaacttttgctttcaatcccgtaaatgctgttccgttattctttaccgtattgccctttatccaaccggaaagagtgaaagaacgttccgcggaaagacctatatatgcggttgtgaacgcggaagaaatttcggaagtgttttcggaagagagaatgctctttgttccggtttttgcggaattatcggcaacaaatcctgtcgaggtccagccgtcaagaccgttttcaaaaccgttattggaaagcaggtttacgcttcttgcttcgcctttgtcaaagttaagtccgtcaaaaagtgctgtgcccgttgcgttttcaatacccgcaacaagcgttacgctgtcgcccgcagcgcattcaatgctgacgctgacaagtgaccaaccgttgttgtttgcagcttcggtcggggtctttacgaactcggacattgcacttgccgaggttgtgttgtttatgagtttgagcgccgcgccgccatccttagtttcggaaacggtgagggctccgggtttaacgaacgctctgaaagtatatgttcctgtttcgggagcggtgaaagttttggcatatccgtacatatccgtaaccgctgcggaagcaacggaaagcgaagccgcgcccgtatatgcgaattcggtgttgacggaaacggagccgcccgcatttgttccgtactccgcaaaatcgtatgcattgttgttcaaatcttttatgaggttgtagccgagcgcatcaacggaagtcgcagtctttatgttattaaagaactcggaattgtcgtcataggtataagccgtaacttctccgtcttcgacttttgcggagagtcggcctctttcgtcaaagaagttgagaatttcggacgcggtttcttttacctgtccgttttcttctttttcgcggtcgatatgagagataacggagcgaccgtcttcataagagaaagacatgatttgggtcttgaactccgtgtcggaagaggtgtcaaaaacttccgcgccgacaatccgtgaactgctataagagaatgttacttttatattgttctgttcatcaacaacggaaacaaggttcgttccgctgtaagcataggtcacaagcgttcctttgctgtccgaaacacctgtcagatttccgtttgcgtcataggtgtaattctttgtgttgccgaaacggtcggtaactgatttaacggttctgtccggattatattctatactcgtcgttccgtacatatccgtaacggacgttatgcatttgtcaacatactgtccgccggtataagcatattcaacggcagtcccgtttttctcctcttcacgcacaatatatccgaacaaatcaaaatattttacgttcccgtcgctgtctgaaagtttgtaatagatattttcgccgaaattgaaaccataaacaagcgtcagtccgagaccgtcggtatctttcattgttacttcatgcgtgttgctgtccctggaaacaaaggcaaagtatcttttcgcgcctgttgcgtcaacgtaagagtaaagtttttcgccctgtgtatatgttttgtttcccacagcctcaagtcccgtgattttttcctggatattcagtttccagccgttaccggacttcatctgcgttccgtaaaagtcgtctgttccagagaaatatgcgggcataatgctgttgtatacgccgctgacgttcgttgtctgtcctttcagagaacaaactatatcgtcgcggacaacaacaagatttcccgttgcttcatttatatatgccgtgccgccgttaccgaggtcgatattataaaatggaaaattatccgcaagtccgtgcgcactgcgataacggataacgcaagtgggaacagcatcgccagccgccgcgtcaaatgccgcgtaagcgtccgcgctgcccacattgtccgcgtcaatgataagtcccttgttttcgctttcgtttctcgtccacatacggactatggaagttatatcaacgccgtatgccgtgttttcggtatcggagttgtttataagcaccttgtccgacgaaacgtttgacattccgacggaatcgtaatgcgcattgttcttgttgaaatacgttgttgcggcatacgcacctataacaacattgcccttgccgtcggaggcggcgtttcttgtaagatttattttcgcgcttataatatagtcgtcaaagccgaccatatagtttataggcacggaaacatggaatctcgctttcttgtccgtggctgcggaatgtcccgcccaaaccacgccgtcgccgagattttcgccgccgttctgcgtcaactgtgtcttggtaacgatatattttacggtgtccgtatcgttcagctgcgggtctatcgtaacgggaaactgcgcgttgtttacccaggtcttgtccgccgtaacggtaagcatatatacgccgtcggactccgtaacaagcgttgtctcgacgtctgcgctgtatgcgcccgccgcgtccgtcatgaacgccgcaggaatggtcttaacggtctcgccgccctttacaacatcaattgagccgtcttctttcaaaacaagtgcggcaccgttcactcttattctgaaagaatatgtatagttatcttttgcgaattttaccgtgatgttttcttttacatcattgccgcgaagaatatattcaatgtctgtatcgttcagaatgtttatatatttaacggaggaaatgttcttgttgccgttcaaaatgtcatcatctgagttgccgttctgttcttcgggattggtcacgcttgcggcaaccgtgtttttgtctgcgacaagttcccacgaaacggagtagccgtctgccgtcatttcaagaagcgccgcttccgcagaggactgcgcaaacttgtatttcacacccgactcggtgttgacaaagccgcggatatccgaacccgtttttgcattttcggaaacaagtgtattgtctatgtctttccactcatcgttcttgtaataatgcacgggaacgctgtatgaagcggcaagcatactgccgtccgagagtacgaagtgttttgtatactcgtctcttaaagtcgtgtcttccgataatatatgtgcatcgtcacctgacaatgtggtcgagatcgcattgtctgttattccgggttgcgactcccgtgcaagagccaccacaggcagctgcaaagcaatgaccgcaaacagcacgaatgcgatcactcgcaaaaacttctttgttaaattcattttttcatgattcctttctgataatacaaatagtaaggataaaactgtacatatgccgtgaaattacacctcctttatacggcagtctgaatgcttggattgagtcttacaaaagagaaaaaaacggttatccgatattctgttcggcagccttttttcggctgtcctgcaaattatgtaccgcactttcccgatacgcgcatctgccgaccgagaaaatacagcgcttctgccgacagagagaatacggcaaaaacagcgatgccgaaaacggttttcggctgcctgcggcattaaatctttcaacagcctgtcatgacggagtgggtttggggggggcataaaaggagaaaaggagagatttgtttttgaaagattttttgtcggaacagagcgtcggaaaccgttttttgcttttttgcttatttatacggcaaaaaacggcaaaacgtgacaagaaaatcgtttgttttacaaaaaattcacaaaataccggttcagaaaaaatgcctataataatataatacggtcgcaaaaccaaaaacgtgtcagaaatccgtgtgaactttttgtaaaatttattttctgtcaaaaaaattcaaaaacctcttgaaaacggcatttttctgtgctataatcaatcccaaagaaaaagaaggagtgttctttaaatgctgtgtatattcttacaaacaattaacaacgaagaagaccaaaaggcatttgaggaactttataaaaagtattcaaaaaatttactgacttatgcgataggtaaacttggcagaagcggcaactttcaggatgcggaagatgccgtcagtcaaactttctgtcggataattatggctttgccgcctccgaaaggggatgagattgactcaaaagaaataaagaattatctctacgcaactttagccggtatttgtttggataaacttgaaaaaaagaataaagaaaaatccgtaatgtttttgacagacgaaattcaaaaattcaggcaaagcttggacgagttggcagacagcgttatagataaactgacattggataaggtgattgaagtgattgaaaaattgccttacaagttgaaaacgccgtttatgctgcactttgttcacggtttgacttgcagacaaataggtcttctgatgaacataaaggaacaaacggtacgtcaaaggatctgccgaattcgaaaaatcattgccgaggctttgaaaggggtgatttttgatgactgaaaaggagttgatgaaaaaacttgcacagggaatgtttgacagaattcccgacttaaacgacattcctcccgcacaggaagagttttcggacgagcacaaggcaaagatggaaaaactttttgcaaaaccgcaatggtacatggtcttttatcgcatcccaaggcgcgttttgattgctgtgctgacgttcatcatcattgtcgccgttcccctttcagtcaaagctatacgcgaacctcttttcagttttatatcgggtctgttcggcggcgaacggacggagtatttctcctcagacaaggacaaagaaatcgcggagaacaaaaaaatcaatacatatttcaaattgtattatgttcccgagggctttgaacttgtttcggagaaaaagaccgatactttgggctatttcgaatattcaaacggaaatgaaacgttctcctttgagcagaagcgggtttcttcggcaaaaccgtacataccagaaaatgcgcaagacattgaccccgaatatgcgaatacgccgtgggatataacatattacaaagttgggaacaaaaacgttttcctttggatatacggttataacgagttccgtttgaccgcggacgaggcaattccgctcgatactcttaaagagatagccgacaatgcgcttgacgaacttggatatgaggagcgaaaacaactcgaaagcggcaatattgcggtggcaaacaacggagcaactcctctcaacccgcccgaaacaattccgcaggcgttcagatttgaattgcccgaggggttaaagattaaaggttgggaagataatacttcatttgacaaaaaagtaaattacataattttagtggagtctgacaagggatataaatgtatgtccataacagtctacgacaaaacaataccattaaaaattaccgtggaagatactgcacaagatgtaatagtcaataatatcgttgtatcatgttttgataaggcacaagtatatatttggacggatgagaaatttacatatacgattgatgcttgggatgacagtatttcttcggaaacagttatcaatatagtaagaagtatatataacatggagtgattttatgagaaagtatatttcagcaatgcttgtcgttgcaataatgataggaatttttgcaatgtctgcaatcggtactgccgcaaagacgggcactcaatatgaccttgacgatcccgaacagcgccttgcttatgaaatgtcgcttgtaacaggacgtcctgcggtcgaaagagccaaatacatattaagacataacgcagaactaacactcggcgcaggtaaagcagatggatcggtaacagtaaaaggtgactcaaaaatcgtgacagatcttcatatttttatgtatatacaaagatatgaatccgggaagtggaagaccgtttacagcgacaacgaaatgttcaagggtcaattctacgtaacgatgaaaaaaacctgcactgattcttccgcaattataaaaggatatgattacagaatttcctatacgatatatgcgtataagggaatgacatatcaacagtcaacaggcacaagtcctgttgtccgctaacagatctctcctgtaaaagcacaccccgagggcggttttataccgtcctcggggtgttttatttgaaaaaatcatgttgtaaatgcgcaaacggcaagcgttgacgggttgcccgaaaaagcgttcggacggctcttatcttataaaatattataaactcaacaatgtaaaaacaaaaaatgcagccccgtcaaggaccgcattttcggcgttttttaattatcttcttcatgtttgttccgcgcctgccactttctgtcctcttcttcaagtcctatgcgcttcacttctttctgccgcttccaaagcaaactgaaatgcgcttcatctccgctttttatgcgtttcaggttatcgagatgtcggaacagaattgcaagcgttgcaacggtgaaagcaagcgttccgagcgcgtttttcgtcaaaacggcatagacggcggtaaacgccacagaggcagtcatgggaacaaagcatatataatccgtcacaagcacaatgaccgcttccgcgccgagaaaaacaaggaacagccgccaatcaaagcttaaaagaacccctgcaaggcacgcaagccccttgccgccgcgaaagccgagcagcgcggggaaaatgtgtccgagaatacacgcggaaccgctcaacgcaaacgcgagagagcattcggggaaaaggtattccgcaagccgtgttacggcaaacgctttgaaaatatcgaaaagcgcggaaaaaatgccgacccatttgcccatggttataacggcgttcgacgcgcccgcgttcttcgaaccctttgttctgatgtcaaagccctttatccttgcgataatatacgacggattgacgctcccgacaacatatccgcccagcacgcacagcagttcttccacggtcttcacctttcaaatgtcctgtcacggacattttaccatgtccatgacgggatgtcaagttgatttctttccaaagtaacacctttatttaagaatatcccaatacccgtcgttgtctttgccgacacgcactataaagccgttatctttcaacacctttattgctctgtaaacggtcttgcttgatttacctattttttcggcaagttccgcatttgtcagacaatcgtgttcacgaagaagttcatataccgcttttacgctgccggacatgtcatagacatttttttgtccatgactacgataaaatataaagcgaaaaccggtttgtgtgttttcgtattcatattttacacctgccgcattacaagcattaaacgttctttcaaagcctgttccgaaagattcgataacggaagccttgaacagcacatttacgattttgggattcaacattatcggttcggcggaatttttcgcaaaatcttcgggcttgaagcctgcggggaaaaagccggggctgtaaatcgaaaccttattgctgaaaatttctatcgcaaaacttgtgttggaataatagcacccgtgagcaaaagcatttacaatcatttctctgattgccgtttgcggtatctcaggttcttcctttcttttggaagaacccgtaatcgaaacttgccaatcaatattagacaaaacaaaagaaattccgttatctatgcactcaaaaatatttccctcaaagtgatttaacttgataaaagtatctttttgcggagttgcatagactgcggtcttcatcaaaatcggacaattctttgaaaaaagaactcgacccgcatttgtaagaaaacccgtagccgtattataaagaccgagttttgtaagagttgaaaccgcgtttttgtagtcgtatttaattcgaccgctctcattaccgtcagctattgtttttttcaaaagttcctcgtctatgtcagtaacggtttcgccggaatcggcagcctcccattcggaataatctttctgtctttgcttgaataaacgttcaagttcggaatcggaaatctttttatcctcatcagcgaaccgctgataatacttaccgtatgcggaatatggagcttttgagccgctgaaaacgacctcgataaaaggttttccgtcatccgaatatcttgttgttatctcatataaaaaggcaggcttgacattatcgcttatttcacgggacaactttctttcggtatcgtttccgatatcctgtcccacaacatctccgttatcttttactccgaaataaagagttccttttttgtgcttgttcaaaatgcttgcaatagagataattccctctttgctttcagaggttgattttttgaattcaatcaattcgctttcttttccgatattcataaactctcctccaaaatgtcctgtcatggacattttatcatgtccatgacaaaatgtcaagatgtccatgatattttgtccgaaaaaatgcctttgagacggtattataaaaatctttatctgttttaatacgaatatttccgtgaagaaaaacagactgtcacgcgctccgcttttcaatatggaaaaaaacacgggaacagactttcgcctgttccctatctgtttattgcgttttctttgatttatgaattattgagccgagataagttcggtgtcctcgttcataaggtcttttatcgcatcttttctcgacagattgattctgcccatgcggtcgatttccataacctttacggttatttcgtcaccgagagatacgacgtcttcaactttgttgacgcgcttgctgtcaagtttggagatgtggcaaagtccgtctttgccgggagcaagttcaacgaatgcgccgaagtccattatcttaacaaccttgccggtgtaaattgcgccgacctgcggaccttcaacgatggtcttgattattgcaagagccatgtcgccgcttgctttgtcaacatagcagatgtggcaggagccgtcgtcctcaatgtcgatcttcgcgccggtttcggcaacgattctctgaataacttttccgccgctgccgataacttctcttatcttatctgtcgggatcatgtaggacatgatcttcggagcaaacggagaaagttcttctctcggagcgggaattgctttgagaagaatatcgtcgatgatatgctctctgcccgctttggtctgttcgaacgccttttcgatgatgtcgtaggtcagaccgtcaatcttaatatccatctgaatggacgtgataccgtttttggttccggcaaccttgaagtccatatcgccgtagaagtcttcaagtccctgaatgtcaaccatggtcagccacttgtcgtccttggttataagaccgcagctgatacccgcaacgggacgctttatgggtacgcccgcgtccataagagcaagggtcgaaccgcaaacggagccctgcgaggtcgaaccgttggaagaaagaacttcggaaacgagacggatagcatacgggaactcttcttcggagggaagaacgggttcaaggcttctttcggcaagagcgccgtggcctatttcacgtctgcccgcgccgcggctggactttgcgtcgccgacggaataaccgggcatattgtaatggtgcatatatctcttggaatcttcttcgtcaacgccgtcgagcttctgtttttcggcgatgggtccgagggtcgcaatggtgagaacctgcgtctgacctctcgagaaaagacccgaaccgtgaactctgggaagaacgccgacttcggcatgaagaggtctgatctcttcaagtcctctgccgtcaactcttctgtggtcgtcaaagagccatcttctgacaatttctttctgaatcttgtaaagaacttcgccgtaggggcattcgggatatttttcgtcgaactgctcacgaacttctttttcaacgaccgccatgttggcgtctcttacgtctttatcgtcggtatcaagcgctttttcaaccttttcaaggcagaaagacttgatgtcctcatacatatcgtggtcgagttcggaggactgatattcaaacttgggtttgcctatctctgcggcgatgtccttgatgaagcgaacgagttttttcagttcctgatgcgcaaagatgatacctttgagcataatgtcgtcgggaacttcgtttgcacccgcttctatcataacgatcttttcttcggtcgcggcgatggtgaccatcatctgcgattttgctttttgttcaagcgtcgggttaagaacgtattcgccgtcaacatagccgaggatgacgcccgcaatgggtccgttccagggaatgtcggagattgcgatggcaacggaagcgccgttcatcgcggttatctcgggcgagtaatcgttgttgacagccatcggggtcgtggaaataacgacgtcgtttctcatgtccttcgggaagagaggtctgatgggtctgtcgataactctcgaagtcagaatagccttttcgctgggcttaccctctcttttgaggaagccgccggggatttttccgacagagtaaagtttttcttcatagtcaactgcgagagggaagaaatctattccgtctctcggttttgcggaagcggtcgcggttgcgagaacgcaggtatccccgtatcttatcatacaggaaccgtttgcaaggcctgcgaacttgcccgtctcaacaacgaggggtctgcccgcaaattcggtcttgaacactttgtaattagcgtaaatgtccatgtttttctcctttgaaatttatattttcgagggagatccgccttgctttttagcagtcgtcccgaagtgcgaaaagttcgcgctcccggataactgctgaaacacgcaaagccgaaacctgactttgccgaacaagtcggatatcccttaaataaacaaattttaatgcttcaaatacgaacaaaaaccaaggagcataagcgatacgctccttggtttttaactctttcttacttacgaagaccgagtttctcgatgatcgcacggtatctggaaatatctttctttttcagatatccgagaagatttcttctctgtccgaccattttgagcatacctcttctcgaatggaaatccttcggatgttccttcaagtgctccgtaagagtcactattctgtcagtcaaaatcgcgatctgaacttccggagaaccggtgtctttttcgttgattttgttcgcctcgataatagcggacttcttctcttttgtcagcatatctttcacctccgtatttattcgccgcaatgcaggacgcgcgaacggtgaatatccgcgcaccgacattcggtaccttgttattttaccacatatatttgcttttgtaaataggaaacctcaaactaatttatgaactatttccgacttttcaaacagaagggagcatacttgcggtattccagcggatacaatcaacaacagttttttacaatcgttttccattctaatgagcaaaatgcccttaaaatcaccctatttttaagggaatcaatgcgatttaagcgaaaatacccttaaaacacatatcaaattaagggattaggataaaaaacaagggcatacgcatagtatacccttattttcttcaatcaagtaaaatctccctgaatcccccgtgccgttacaaaaaaacagtcaaccgcagacggcgcatatcaacaaaagccttttcacggcgcaatgaatatcatgcggcgctgttcaacggcgtcgccgtcaatgccgttgaattcggctaattttttcggcgggacgcgaaattttttggctatctcccaaaggctgtcgccctcctccgccatatatgaaacaagttccccgcgctttttcttttcgcagggcgtaaacgttatatccgtaacggcggttcgggttgaaacggtgatgacggagccgacatgaagcgccgaaattcggagttcaatgcccgttgccgtcggcgtttttgttatcgacgttatcacaaggcggcaattgcttttcattgaggtgggcgctgtttcaagcggagtaaaaatcgaaaacggaacggctttttccacggagcatatctccccgtccgtgttcttatatataatgtcgcacccgaaaacgccctcgcttgccgcaccgccgcgctccgcatcgtaagaaacgctcataacgctcggacggacagcagcgtccacgagttcggcaaaatcggaaagttccacatcgtttttgaattcaaccgtgtcgttgactttgtgcacggattgaagattgacgggttttgttacgcactcggcgttctccgtcagcgaaaaagcgtcgcggacgagttcgattttttcgtttttgaaacattcggcggttatgttcacttccgcgtcgagcgaaagcacgttttccttttcggtgcgacgggtcgaaaccgttatatcggaaaggtcaaagcgcgtcaggcattccgaattttcgtcaaagccgggcaaatcaagcagctgcgaaacgggaatttttgtctcgaacgttccgacacttccgctttcgtccgcataagtcaggcaaagccgcatatccgctttgacaataagttttttgtttacgggcttttgctcggtctcgaaaaattcaacgtcaaagcgaagcattttgtcaacttttgcgtcgccagcgtcgatatcttccgtcagacgcagcgtgcgggtcgaggacgcgaccacatcggtcacatcgaccgacgttttgagaagttctgcacgtgattttgtttcgtcgtctggcaattccgttgcaacaggcgcataaacgcttgcggagatgaccaccgccgctttggcatagagtttttgcgggctgagcgcacgggcggaacggtattccacgcttgccgaaacggttgcgaaaacattctcttccgaagcgccgacctgcgcggaatacgaaaacggcaatcggtggctcacggtctgcaagccctcggcggcgtcggaaatgtaaactatacgaaactcaacgtttccgtcggcataaagtctgtcccctctcacggtctgcgaacgcaaaaacggcgttgcggtaacgccgacaactttcatcaccgtggggcaataatcgggcaaaaggatctcaccctctgcggcggcttctcccgagagggcttgtatcaattcgttgcaggtaaatgttttcatacgggtatctccttatgatatatagatttacttcatttatcagccgcaaaagaacgtgctgcggcttctcgttaatctatatgatatacctttacgaataatacaaaaaaacttttttgcgtgatatatttttttcgaaataggtattgacaaattttacatatcgtgatataatattcacaaataaaatcacaaggggtgagtaatgaacaaaaacatcacattaaaagtgagccgtgggctcttcaattcaaaatacttgccgctgctcggctgcggcacaaggtatctggtattatacggcggagcgggaagcggaaaatcggtttttgccgtccagcgttttcttctccgattgctctccgaaaaagggcggaatttgctcgtcgtccgcgcggtctccaacacgaaccgcgattcgacgtttgcggcgttcaaacaggtcatttcatcatggggtctgtacgaccttttcagggtgaacgaaagcgatatgcgcatacgcgcggtaaacggcagcaccgttgttttcaaagggcttgacgattccgaaaagttgaaaagcataacttttgaaaacggcgttctgaccgatatatgggtcgaggaagcgtccgaggtctcgcagtcggatttcaaccaactcgatatccgtttgcgcggaaacggtccgaaaaagcaaatagttatctcgttcaacccgaccgatgtcaaccattggctcaaaaagcggtttattgaccctttcgacgcaaatgtgaccgttgttcacggcacttatctggacaacgcttttctggacgacgattacaaaaaactgcttgaaagttaccgtgacagcgacccttattattacgcggtctattgccttgggcaatggggcgttttcggagaaagcgtttttaatgcggaaagagtgaacgcacgcttggcgtccctcgctccgcccgagaaaagaggatattttacatttatatataacggtgcggtgatttccgagcctcggttcatcgaatccgaaaacgggttcattgccgtttacgaaaagccgaaagcgggcgaacggtatatcatcggagcggacaccgcgggcgacggctcggacagttttgtggcgcaggtcatctccgtttcggagggcaagcaggttgcggtactgcgccgcggctttgacgaagacgttttcgcacggcaggtctggtgtctcggaaaagcgtacaacaacgcccttgtggctgttgaaacgaacttttccacctatccgacaaaggaactcgaacggctcggatacacaaaccagtttgtccgcgttgcggaagatgagttcacgcaccgtcccatgcacagcttcggctttaagacaaccgccgtcacacgtcccgtcataatcgcggggctgacggaagttgtccgcgacgggctggggcttatatcggacaaaacaacactcgaagaaatgctgacgttcgtccgcaacagaaaaggacgacccgaagcgcggcagggcgcacatgacgactgcgttatggcgcttgcgatagcgtattacgtccgtgcgcagaccgtggtcgaacggtctttcgacctgaccaagatgtcgcattggacgcaggatatgctcgaagattacgaaaacggaaatgaaattgaaaaaaaagacatggagcgcttgtgggggagtggcgcgccgcaaggattcaggaggtaaaagaattgcgcatccctaaacacaggaacatcgacagatacgttataacaagaatgattgaagactatccgaaaaacaaggaggaactcgaaaaaacggaagacgatacaaacgaacccgacgcgtttttggggctttgcaaaaaaagccgccgcgaacgcataaaattggaatgtgcggcggttgacagagcgttgcaatggactgacggacaggataacaacatagcatatcgccgtcttttgaaaatggtcttttggaaaaagacgcacagctgtctaggtgcgcgcgacgttttgatgatgtcgcgttacgaatgcgaccgttttcttgacggcttccgcgccatagttgcgggagttacgggcaggctggaaccaatcggaggataaagaaacagcagtggctgtaaaaatacagccactgctctcttttgaaaataagagaagaatctcactttatcccgtaatactctcttatcattttgaatatttcttcgtggggtatggttttatcaaaaagatgaacatgatatacatatttatcgtcaatccaataccagcaagaagcattcttaaaataacttattgttacttcgtcattgattttgactattgtctcaatatcggaagacgaaaaatttccgagaattttattatcgtgaatgctgataaacattgcattttctttattttctgtttcacactcgacatcgatatacaaatattctgcccaacttatcgaataatcctgccaataggaaacccttattccgtcaggcaatctgaagccgaattcttccggcaatgtttcgggaggaagttcaacgtcccaaatatcagtcggtcgttccgtttcatcaagttcgcctcttaaacccgcctcaacgatttttcttgtctcatatccgatctcatcaagaaaattggaagcaatctccttgacaacgccgagatacatcgtatcgtccgcctcaagcctaaattcgtaacggtaatccagccatataaacaaaatcttgttatcgtagcgatagtattttatgtcccaaggcgagatctccatatcatcgctgacaagcaccgccccgtcaggaacatacggagcagagacggaaaccattttttgctctattgaaaacgtttttacgccgtccgaaaactcataaaaattgtgagtgtcggtatggtcttcggaaacaagcgaatagccgacaggaataaaatacggctgataatcgctctcgatttttgcgttaagcgcacgttgtcgctcttcttccgaagcgaatatttccgttctttcaccgccgaacgtctgcgagaaaaagcgaaagagcggttcgcgtatcgccttgaccgaaagcggcacggcaagcacggtcaacgctatgagaattgctatcaaaacacgcttcggaattatgtaaaagaccgtgaaaacacgctttttttcaagaagtttttccattcgctctttgtgtcgttccgaaaaatcgggaacgttgtacgacgggcgaatcacgtcgaacgagttgcccgcaacagcacgggcgacatctctgtaaaaagtcttgtttttcatttgcttccgtttttccaaagataatgcagttaagacaagtccgcatcgggcggaatctcaacaacatttcctctttatcattttattccgtaatactcttttatcattttgaatatttcttcatgggatacggactcattccaaagagttatatcatacacatatttatcatcaacccaatgccagcacgaaatattcttgaaataacttacggttatctcatcattgattttaactttttcttctacgtcgtagaatacggaacttccgtaaagttcaaggtcacgtatactaatattgattgtgctttctttattctcattttcacacttgaccttgatatgtaaatatccgtccaaacttatcgaataatcctgccaataggaaacccttatgccgtcaggcaatctgaatccgaattcttccggcaatgtttcgggaggaagttcaacgtcccaaatatcagtcggtcgttccgtttcatcaagttcgcctgttaaacccgcctcaacaatctttttttcctcatatccgcgctcgtcaagtacattgtcggctatctttttaagggtatcaagcgaaatcgcttcgtccgctgtcaaacgaaactcattgtaaccgtatatccaaacaaaaacgtttttgccgccgtaccgataataggttatctcccacggagtgtccgcatattcaaaatcaatattttccgcaccgtcgggtatataaggtttttcgacggatatcctcttctgctccatcgtaaacgtttcttttccgtttgaatattcgagcagatactgtgtttcggtcttttcctccgaaacaagttcaaacccatcgggaatatagtatacgccgaaatattcctcgatttttgcgttaagcgcacgttgtctcgcttcttccgaagcgaacagttccgttctttcgccgccgaacgtctgtgagaaaaagcggaagagcggttcgcgtatcgccttgaccgaaagcggcacggcaagcacggtcaacgctatgagaattgctatcaaaacacgcttcggaattatgtaaaagaccgcgaaaacacgcttcttttcaaacagtttttccattcgctctttgtgccgttccgaaaaatcgggaacgttgtccgacgggcgaatcacgtcgaacgagttgcccgcaacagcgcgggcgatgtctttataaaaagtcctttttcccattactcgatgttccttaaaaaaatccccaatcaaacggtctttaccggtcattctttttgagttccgccgccaaaaatcgctttactctcgaagaacgctttcttgccaccgcctcggaaacgccgagaagttcggcaatttgagcaaatgacagtccgttcatataatgcagaacaaacgggtcggttatttcgacgggcagttctttgagtttttcgacggcgttttcatacataactttgctgaacactttttcgtccactccgtcatcgccgacggaaacgagatcgagttcgtcaatacttccgacttccgtttgatttgccgttctgcggcggcgcaaagcgtcaaagcaaacgcttcgaacggtcatgtacaaataacttctaacctcgtcgctttcggcgtcctcaggtgcgggaagcaccttgatcatacggcaaaaagcgtcgtgcagcgcgtcttccgcgtcctctttgttgctcaggataccgagcgcgtaatgatacatggttgagcaatacagttcgtatattctggtaaaactcgccttttccgcttccgtcgcaagcgtttccaaaaacattgcaagcatttttaatttctcccccggggttttcttctctctttaacttgtattatatcacacgcccgcatttttttcaatcttattttcgaattctgcaaaaagctccgataaatatatcacaaagttcattatttcgcgtgtcacatttttgcgtttcaaacgttacggacaaattttccgcacccgaacagcgaaatgtcggacggagaaaaaccgtacactcacagcagaattttctgaccgacaaatccgaccgtcattcagacaaactcagtctgacaaaaccttgcaaaaatatcttttgtcacttattttctcttgacagcgcgggccttttgcggtattatatttttacaggtatacaaatatataacaaaaaagagggacggaaaaatgaaaagaagttttttgaatgttttttgcgctgtcgccatacttgcggcggttatcttgacccttgcggcgtgcggaggggacaaaacggaacagacaacggcggcatttgacgcggaaaacgcgttttcgcgcctgctttcggaagtaaaatacgcagaaacgctttcggacacaagttcttcggcggattttatgttttccgacctgccgcagaatgccgaaataaagatgtacacctgtgaaagcggaagccatcccgacgaactgataatgatgaaagccgcaaagaaagaggacgtgcaggctcttgaaacagcggcaaaaacgcaccttaccgaactcacggcgcagttaagggattacaacccgcaggaagttccgcgagttgaaaacgccgttgtttgcacaaacggactttatgtttttgtctgcgttaccgatgacgtcgaaacggcaaaagcgattctgaaataagcggtacggaaatgaatgaaaaagaaaaaactcttctgacgccggaagaacaggagcgacgccatcaggttgcggaacagcagcgatgcaaggcgcgcgccgaacgggcacggaaaaaaagaagagcggaaaaaataaaactgatcataggcattgcgtttgttacgctgctgaccgcggcggctgtttttataattacccgatacgttttgcccgacgcgggcaaagacgcgcggcagccgaaaacgtcgccgtccgaggagcagacgtcttcttcctatacgacgcaaacgccgacaacggcaccggaaccgacacatgactatcccgaactgaaaagcaaaaacggcacgttcaacacatattcttcgggcgcgataagagttgacaacgccgcgttcagcgtgtgcggaacattgagcgacagcgtaacctcaaaatatgccgcgctcgtttccgaagttgcggacagccttaacggaaaaacaaaagtctactcgctgataattccaacatcatacggcgtgacgctccccgacgatataaaaacgcagatagccaactacgccgaccagggcgaaaacatcacaaaagtcttttcgaagatgtccgaaaacgtcactcccgtttattgttacgacgacctgatgacccaccgcgacgaatatctgtatttccgcaccgaccaccattggaacggcaagggcgcgtattacgcctacgcagcgttttgcagaacaaaaggcattgagccgtacacgctcgaagaacgagagaaaaaagagttcgacggcttcctcggcacgatgtatcagaacaacggcaaggacaaaaacctgctccctgccgacacggtcgaagtttttttgcccgtcagcgcaaacgcgacgatgaaatttacaaacacggaaggcacaacatacgactggcccattgtcaaggacgtttccgaatggtcgagcggcgcaaaatacaacacctttgcgggcagcgacaacccgataacggagttcacaaaccccgacgtcgcggacggctccgtgctgatagttgtcaaagaatctttcggcaacgcgctgcttccctacctcgttgatcactactcaaaaatctacgagatagactaccgctattggaaaggcaaccttgtctcctttgccgaagaggtcggcgcggacgacctgcttttcgcgaacaacataatgatgacgtccacaagcctgctcgtcggaaatttgagtaaaattataaagtaaataaaaaatcgcccttgaatcgctgattcggttcacgggcggttttttatcacaattcactcatttacggtttttcgccgctcggcatatttccgcgcgcaaggtctcccacgataaacggaagaaaacagaacggaacggtctgcgattttttcggagcgggcggtgcactctgttttgataccgtcgcggcacagaccgttataagattgaaagacaaatattcgaagataaggctgattctcgttctgcccgcaccgaccaagcaaaattccggaacgaagatgacagcagagaatacaagcgtatcgagaagtttgcggataagacggtatatgcttccgaaaaatattacaacggttgtatggcaaaaaaacagacaccttgtcgataacagttccgtctgcgtggcacatctgacgcggagcggcggagtgaatactcgaaaaaacacggacttaaagttataaatatagcaaaaaacctgtaaaaaaacacaaaagaaccccgagccgcaagcggctcggggtctgctatacattattatatatttttgcgattgaatatgctctacctatgaaaaagtcactttcggcgcaatcagaaccacgggctccattcgccggggtcggggtcttttccgccgtcggtaagtccctcatatttgacggttatattattggcggagcagtacgcgtcggcgtcagaacctttcgggcaagtcacgacaagcgaggacggacagccgtcaaagaggtcagagccgaacgttttgacagcggcgtgaagacgcagagccataagagacgagcagtttgcaaaggcgtaatcgccgagcgacaccgcattgtcgggaataacaagcgagacaagcgcggtgcagtcctcaaaggcggatgcgccgacaactttcagtgtcaacggaagcgttacggacgtaagagacgagcagccgtcaaacacggacggcgcgagcgtttttacgccctcgggaacaacgacggaagcaagagacgcgcaattcaggaatgcgtggctgccgaggtttttaaggttgttcggaagcgttacggacgcaagttttgcgtcgtttgcgaacgcgaatctgcctatcgaagtcacggttgaagcaagagcgacttccgtcagttcggaacagttcgaaaaggcgtagtagccgacggatgttatgccgtccgacacaacgactttctttatctgagagcggtaatccgcccacggaacggttgccgatgaataactgttcatatcacctgagccgctgacggtcagcgttcccgacgtgaacgaataggttgcgttgttgccgcatgaaccggaatagtttgcggctgaggtcacgacaaggcagacgcaaacggagagtataatgcagaccgcaagcgcggcggcaagcagtatctttgcgcgtttcttcatatccgaatcctcacttgattttgttgtcgttgattatattggaaagcacttcgcgtgcaaattcgtattctttgcctttcgttttgcttatgcttatcagggatttttcgttgaaaacacgaacaccccaatacatcggagttgtccaatatttcaggctttcgctgtttttgaaagcagaaccctcggcattccagaccgtgccgtcatacagcagaggttcgtccgttaagtccgaaatatcgccgaaatagccgacttccgtcatctgcttcaagcccgcgtcgtccaccattatcagcataacggagcctgcggtgtacatattggagaagtttctgaggttgtcctttaccatgtcggcgtcgtgattttcgccgataaaataattttctatctcaattctgacctgtccgtcgcccgtatagtcgcggacatacggttcaagagcctttttcaggtttgttttatcctcggcgtacgatatcgggtcggcggaaagataatatacaacaacgtcgatgtcaacgcggccgatacattgagaaagaccgacaccgacggcaagcagaacgacgagagcccccaaagtatgccatttgtaatagtaccaaaaattttcgagcttgcttttgaaactcttcttctcttttttttcggcggtgctaccgtttgtcatttgcaaagcctttccgacgtaaaaaatacgccttataaagtgattatatcatatacggcaaaaaatttcaacatttttttgcaatcatgcagattttttgtaattttcacaaagcgcggacaatgagattgtagaaaatggacaaatcctaaatcaggatttagccgaagatcgcggaaatgacaccgagatgttcaagcagtatctcaatgccgataagacataggattatgccgcccgcaagttcggctttgtttttgaagcgtgtgccgaacaggttgccgactttaagtccaagcgcggaaagaccgaacgttatcgcgcctatgcagggcgcggcgatgtaaacgggaatgttcgggataaccgtgacaaaagaaattccgacagcgagcgcgtcaacagaagtggcaaaggcaagcacaagcattgccttgaacgaaaacgacgcatctacactttcctcttctttcgaaaaactttcgcgtatcatgttcgcgcctataagacagagcagcgcaaacgcgacccaatggtcgtatttctgaatgtattcttcaagttttttgccgaggaggtaaccgacggtgggcataagcgcctgaaagccgccgaaccacgcgcctatcagaatatagtgtttggggcgcagtttctgcacggaaaggcctttacatatcgaaacggcgaaagcgtccatcgatagtccgacggctatcattataagattgacaatatccataaaaatcttctttctcttatatatgtaaagaatacgcttttccccgttgggtttgacgcagataagagtttaatacgcttctgccgtcagcgaatgccgtaagcaacgcagccgtcttcgcgcatatccacgggcgaagtcgaacgttccgcccatatctcggaaagatcgtaactgccgtttcttgcggacgtccacgggtcggcgactttaacattgccgctttccgcatcgtagccgtaaaggaaaacgcaatgagttcctttgttgcagagcagtccctctccgacggcgatacatacaacgccgtcgttttcaagagcggaaagcaagtcctcatattcgaatatattcagcgtagtcgctccgtaatgctcggcggcaagtctaatcgccgaaccggaagaaccgctgaacgttttgcagaactcctcggtgttgtcgtaaagccaagttgcgacctctatcggggtcacatttattccgatgtaagaaagagccatcgccacggatgtgggcgcgcagccgttgcgtcccatggtatagttgccgaaacgggcgttgcaccatctgtcttcccattgcgaataatatttgaaaatacccgctttaccgcgaagccgcggcacatcgtcggtcttcttctttccgcagacggaacaggcaaattcggcgcgtccctcacctttttcggtcggttcggaaattatttgtccgcgctcccatttatgatacgctttcagcgtttttctcttttcaaaaccgcatttttcgcagtattcgcggttatacccgtccgcttcgcaggtcggcgccttttcctcggtttttatattatgtcccgttgcgggcagcacggtttcttcggtctttccgcaggtttcgcatatcttgcgaatatatccgtccgtctcgcaggtcggggctttttcttcggtttttatattatgtcccgttgcgggcagcacggtttcttcggtctttccgcaggtttcgcatatcttgcgaatatatccgtccgtctcgcaggtcggttcgagtttttccgtgcggtatgagtgcggaatgacggcaagaacccgaacgtgcgctttctcgcacacaatgcattttcttgtcaatgttcccgtttcggtgcaagtggcgggaatgcgggtatcttcaaatatgtggcaatggtcgtcctcgccgccgaacgcaaccgaatagaacacggtcatcgcgtccgctatatcgacatcgccgttgccgtcaatatctgcggcatcaagcgcggctgccgccagtctttctttttgtgcgacgtgataaaaaacaaacattgcgtccgctatatcgacctttccgtcgccgttgacatcgccttttgcaagttgcggcaacggcggctcgggctcggtcgtcggaggttcggattccgtcgtagtcggggtgaaaggctccgtcgttgtcggattcgacggtgttgtcggcggctcgggctgcgtcgtcgtaaaaaacgggtcgggcggcaatgtcgggtcaacaaaagagcctttcagagccgaaccgtcggcattttctcccgcaaaaagaacgagcgaaaacgcaaacacgaccaaaagcaccgtcggcaatatgcaaaacagacttttcattccttttttcattcgtttttttccttttttcttatggtttttgcagaatttccgcaacagtgcgggcaactctgcccttttgagccaaaacggttctttgcgttatgtcggctgattatacaaacctgacaaaacgccttttatttattctgcgcaaaacccgccgaggcggctgtctgccgcccgacggggatccgaaattctcaggaactgcaaaaaatacaggattttcagtttctctttggggataggaaaaaatgttcagaatgggtgaatcgagtccgaaggcgtacataggtacgtcgagaggcgagattcgcccgtagcaaaaaagacgcttttttcactttttacagaaccaaaatacaaaaatagatatttaaggtcttttgcttatcttttagacaattactattttgtatttttcagtcttttttgcggtctgggcatttttaacatcccccgacggattcagatatttaattctttggttcttacctgttcttctaccttttcgataaaagcggaaagcggcatagaaccgaggtcgccctctttgcggcttctcaggcttacggtgttttcttcctgctctttttcgccgacgactatcatatacggaatcttttcaagctgcgcttcgcgtatcttgtagcctatcttttcggcgcggtcgtcgagttcggagcgtatgccgcggtcgatgagcgttctgtttattctcgcggcgtaatccgcgtatttctcggaaatcggaagcacttttacctgaacgggggcaagccatgtcgggaacgcgcccgcatatttttctataagcagagccagagttctttcatagcagccgagcgacgttctgtgaataatgtacgggtttttcttcgtgccgtcgcggtcaacgtattccatgccgaagttcttcgaaagcatctggtctatctgaatggttatcagcgtgtcctctttgccgtgaacgttctttatctgaatatcgagtttcggaccgtagaaagccgcttcgccgacaccaactttgtaggggatttcaaggtggtcgagaatctttttcattattccctgcgcctcgtcccattgttcgggtgtgccgatatacttctttctgtctgcggggtcccattgcgagaagcggtaacttacgtcctcgtaaagtccgagcgttttgagcatatatatcgcaagttcgagacagtgacggaactccccttcaagttggtcgggagtacacatcaggtgtccctcggaaatggtgaactgacgcacgcggataagtccgtgcatttcgccgctgtcctcgttgcggaaaagcgtcgaggtctcgttgtagcgaagcggcaggtcacggtaagagcgcgccttgttcaaatatgcctgatattggaacgggcaggtcatcggacgcagagcgtatacctcttccgtgtcggattttgcggggtcgcccataacgaacattccgtccagatagtgatcccaatgccccgaaatcttgtaaaggtcggattttgccataagcggggtcttggtaagcagccagccgcggcgctgttcctcatcctcgacaaagcgttgaagaagctggattattcttgcgccgttcggaagcataacgggcagtccctgtccgataacgtcaacggtggtgaatatgccgagttctctgccgagtttgttgtggtcgcgtttttttgcctcttcaaggcgtgcgagatgttcttcaagttcggacgctttcgggaaagaaacgccgtaaatgcgttgaagcatcttattctttgcgtcgccgcgccaatacgcgcccgtgcagttggtcagttttatcgcctttatctttttcaggtcgtaaaggtgcggacccgcgcaaagatcgacaaaatcgccctgtctgtaaaagcttatctcttcgccctgcggcaattcgtttataagttcctgcttataaggctcgtccgcttcgagtttcaatgcttcatccttgggaagtgtgaagcgttcgagggtatagccctctttgattatctttttcatctccgcctcgatgtccgaaagaatttcgggcgtgaacgaagtctgtgaatcgaaatcgtaataaaaaccgttgtcaacggcgggacctatcgtcagttttgccgacgggtaaagtctttttaccgcctgagcgagaacgtgggacgtggtgtgccaaaacgtttttttgccctcttcgtccgcaaaggtgtaaagtgtcagcgtgtcgccgtccgaaagttttgccgtcagatcgcatactttgccgttaatgccgcagcaaagcgcgctgcgtgcaagtcccgcggagatctgcatggcgcagtcgtaagcggtagcgccgtccgcaacttcgagcgcggagccgtctttgaggattattttcatatttcttacctcttttatatatgaatgttttttttacgttaaacagggtcggcacacaatgcgccgtcttttcgatcaacggcaaacgggtaaaagtttgaatggaacttttccgtttccgtcaatattcgaacgatacttccttgccctcggaaagtgcctgagcatctttgagaatacggtcgagcagcgccgaagagacataaaaatgtcctgcgccgttgacgcggcagaagtagtaaagaccgtccttgccgagcggaacaaattcgactttggaatcgttgccgtttttgccgtaacaggtcacggtaacagccgctttgccgccggggtcggaagcaagcccgagattggaaaccgaaataatttccctgtacaggttctgcatatatttggctgtcagttctttgccgttatagtagccgtgatacgtcacgcttccgtcgtcgcctatatccgcggagacgtcaaatttgaacgtcctgccgccgccctttacttcaaaagcggagaggtcgttcagatagcggataaaaacaaggctttggcagaatttgtccggcgtgtaatcgacgaacccgaaatattcgtccgaaacggcgtaaataacgttcgtatcgtcatacatcagataaagttttccgttttccttgccgccgataagatatgttgaataaagcgttatttttttgctctccgttgcggtcgagtcataatacgggttagtcacgccgtcaacggtcttttgcgaaacgtctacttcaaagccgatacgcacaacgggtgacgaagacgtaaatccgtattttttcagatcttccgccgtcggggcaacgttcacaacaccgtccgccgaaagcgaagccacgctccgagccgcgccgcgcacattggacgtgttcgctccgaacaggaacggagatgtcatgaccatggaatccgcataaagattcgcgctgttttccttgtccgtcgcctgacggaactcgtaatttttgctcttgtcgttgtaatctatcgaaaggctgataaaatccgcttcttcatagggtttggaaacggttaggtcgaaaaatccgctttgcggcttcatcacacgttccgcaaaatacgtattcacgcaccacacggtggtttcgccgtcgataagaaaataatatgcgccgccgtcgggcgttttgtcgcctatcaggaacacatcggtaaagccgcgtgtggaattgacggaaagcgtcacggagggattgtcaagcccgtaaacggaaaggtctttgacgtccgcttctatcagattttcggaatatattatctgaacgcttgtgaaaaggttggagacggtctccgaaagcagcggcacgctctccgcgcctttcattgtcactttgccgtccgaggaacggacgagttcatattcacccgtcgagttttttattgtcacggacgctatctgacgcgcgtttatggtgtaaatctcatcaagttcacgcgcataggtgggcgtcacgtcgccgttttgcgttacgtccgtatcgccctttttcggaagaagctgcacaagcagaaccgccacgacaagaacgataacaccgataccgcacgcgcctatgcagataagtcttttttttgtgttcatcacaggtatttcctcttgcgccaagtcacaacgcatacgaccgcacagcaggcgggaacgagtgcgatgcaga

SEQ ID NO: 3286 - DNA, 6038 bp, Unknown
  16S sequences of unknown bacteria
ttgatgccgccataataatgcgtgtccagataagcgatctccccgctctcatacagcgggttctgcttcaggtccaggcgcggggaatcgatatgcgctcccaggatatgcagcccttcctccagcgggcgatcgccgaggtgaaagagcacgatcgatttatccatcatcacatagtagaccttgtcctgcggcttcaacgtctcctttgcgtcgatgatctcacgcaggctgcggtagccatgcgccttcgccatgtcaacagcggcagcggcgcattcccgctccgtcttgttttctgagatgaaccggcggtattcctcgcccagctccatcacttcctgcagctgtgtctcgctgtaggtttcccatgcgtttttcttatccatcatttcattcctccaacagttcaagtgaacgatccagcagctgcggatcggcagatgagttctcgatgacgatgccgccatgtccctgtgtgcaaagcgccccgcgctgcttcagcagatccatcagatgcagcaccgtgccgcggttgccgtcgatgagcgcgacatgcgccggcagcagctcgcggagcacagggcggtaaaacacgaagtgcgtgcagcccagcacgatgctgtcgacctgcgtgagatcatagggcgccagatatgccgtcaatgtctccttcagcgtatcccgctcatgaagccggccttcctccaccagctcgaccaggcggggacagggctgtttccagatcgtatgttcattctggaagcgttccatcagccgcgcgaatttctgttccttcagcgtcagctgtgtggccgtcacgatgatgcgctgatgcgcgccgcgctcggccgccaccttcagcgccggctccatgccgacgatcggcagctgcggatacagcgcgcgcagctcattcacacaggcgctggtcgccgtattgcacgcgatgacgatggccttgacccggcattcgatcatatgcgtgcagatatcgatgcacagcctgcggatatccgcgcgttccctgacgccgtagggcgcgtgggcgctgtccccataatacaggaaatgctcatgcggcaggcagcggcgcagctcgcgcagcacgctgatgccgcccagcccggaatcaaagatgccgatcggccggatatcctcatccttcgctgcacgctgtccgggcgatacctcatccagcagcgcgcctacagcggaaaagaccgcttcatgcagcggctgatgatccgcgtccgcaagcgaatgatctgcgccaggcacccgcagacatgatgcggggcattgcttcagccagccgaggtcctcctcatccagaaacggatcctgatccccatagcagaccagatcatcctcatggatataaggaaaggtctgccgcagcggggtgagcatcacacagcgctcctgcgccttgcgcagcatgccggccacgatggtgccgaagcttttggcgatccacacccgacgggcataggaaagctgatccaagatcgccttggcgcgttcatgggcgatcggcaggcacgctgccacgctgtccttcatccgctgccgatcaatcggcagctcaccgaaggacagacagagcacatcgcaccctgcctgcagcgccagctccctggcccgcttcagcagcgggcgatcgaacgtatacccgaagcccggcagcagcacgacgcaagtatcgctgccctgcgcatacagcgcggcgctgttttcttcggcatagatcatcctcagtctcatctcatcacatccacttctcagcatccattgtaatgactcaggcgcggaaagtcaaagcaatgtgcgcccatctgcgaaaaacaggcagaagctcctgcctctgcctgtcgttgttctcgatcacgcggcgcgtttctgcttgtccgcgaactgtgaattatacagctgttcgtaaacgcccttcttcgccagcaggctttcgtgcgtgccctgctcgacgatgtcgccatgctggatgaccaggatgagatcggcgtttcggatggtggagagacggtgcgcgatgacgaagctcgtgcggttgcgcatgacgcgctgcatcgcctcctgcagcatctgttccaggcgggtgtcgaccgagctggtcgcctcatccaggatgaggatctgcggatccttgaggatcgcgcgggcgatcgtcagcagctgcttttccccctgcgagatgttgttggcctcctcattgagcatcgtgtcatagccatggctcagcgtacggatgaaatgatgcacattggccatcttcgccgcatcgatgacctcatccttacgcgcgttcagacgcccatagcggatgttgtcatagatggatccgctgaacagccacgtatcctgcaggacgagcgagaacagcgagcgcaggtcctcgcgcttcatgtcgcggatgtccacaccgtcgatcttgatgctgccgcccttcacatcatagaagcgcagcagcaggttcatcagggtcgtcttgccggcgccggtaggcccgacgagggccaccatctgcccctgcttgacctcgatgttcacatccttcatgagcagcgtgtcatcatagccgaactgcacatgctcgaagcacacattgcccttcactgcggaaatgtccgccgccggatccttttccggcacttcttcctcttcttccagcatgccgaagatgcgtcccatggccgcaaaggccgcctgcacctgtgccgaaagctgagagatctgcgacagcgggtcattgatctgccagatgtagcggatgaacgcctgcaggctgcccacccggatggtgccgtcgatgacgaagaagcagcccagcaccgccaccgcaccgatcgtcagatacgtgcacagcgacaccagcggcgagatcaggctggagacgaactgcgccttgaagctagcagcgcacatccgctcattgacctcgcggaaatcttgctcagcatcctcttgcttgccatacaggacgatctcgctgaagccgccgtacatctctgtgatcgtcccgttcagctcgcccagcgtcgtctgctgctcatcgaacagacgctgcgagcgcttcacgacgaaccgggtgatgagcagggacacgggaatgatgatgagcgcgaccagcgtcatcacggcgttgatgctcagcatcatcgtgatgacgaacacaaaggtgagcacggcgccgaccaccctggtcagcgtctgctgcagcgcgttgctcagcgcgtccacatcattggtcacccggctgagcacatcgccgaagggatgatcgtcgaaatagcgcaccggaagccgctggatcttctgctgcagcgcattgcgcagatcatgcatcgtcccctggatcgcatccgtcaggcagaatgccgtgatcagctgagagacggtcttgagcagatacagcccaagcaggacgagcatgatcctcaggatgatgtcaaagtgcacgtgcgcgccgctcacgccgttgatgatgtctaccgcatcatcgctcagctgcgaggtgatcagcccctccacgctgggattgagcgcgaaggtcagctgagagaccaccaccatgagcagtgccaggaccgccttgccccggtaaggcttcatgaaccgcagcacgccgcgcatgcacgccatgacgcctgctttcttattttccataagccagttcctcctcgctcagctgagaagccgcgatctcatgatagatctgacagctcttcagcaattcgctgtgtgtgccgatgccggccaccttgccttcatcgagcaccacgatgcggtccgcatccatgatcgtggacacacgctgcgccacgatcatcatgatggaatccttcacttccttcttcagctccttgcgcagcttggcatccgtcgcaaaatccagcgcggaaaaggaatcgtcatagatatagatctgcgggcggcgcaccagggcgcgggcgatggacagtcgctgcttctgtccgccggacacattggtcgccccctccacgatgcgctcatcgaagcgatgcggcttctcttggatgaacgcggccgcctgcgccacctcagccgcatgcgtaagctccgcctcatcggcatccttcttgccgaagcggatattgtcggcgatgctgccgcggaacagcacggccttctgggccacatagccgatcttggcgcgcagctgctgcaagtcatattcccgcacatccttctgattgatgcgcaccgtgccatcgctgacatcatagaagcggggcaccagcgacacgagcgtgctcttgcccgaaccggtcgagccgatgaacgcgatcgtctcgcctttgcgcaccgtgaagctcacatccttgagcaccgcctcttccccatccgggtaaacgaaggtcacatgatcgaaagtgatctcctcgatgtcgccaagaggctggggatccaatggagaagtgacgctgggtgccgtgtccaggacggcctggatacgcttggccgatacgctggcgcgcggatacatcatgaacaccgtgcagaacagcatcaccgacagcatcgcatggaacagatattccatgaaggccaccagcttgcccacctgcaggatgttcgcgtcgatcatgccggccgccacataatagatagccagcgccgccaggttcatcaccaaaaagaacaccggctcggtcgacgacatcagcttgaacaagctgcgggactgcttcatgtaaaagcggttttcccggtcgaagcgttcggtctcatggctgtcgttgttaaaagaacggatgacccggatgccggtcagattctcccggaagatccggttcagccggtctaacgacccctgctggcgctcgctgatcggcgcggatgccttgcccacggccacgacgccgatgacgatgatcggcacggtggacgcgatgatcaaggaaagatccaggctcgagctgatggtcagcgcaaagctcaccacgatcatgaccggcatcagcagcgccgtacgcaggatgacattcatgaaggtcaagatctgaaacgcgtcgttattcgtccgcgtgatcagagaagaaacgccgaaccggttcatctccgcatgggaaaacgactgcaccttagcgaacacatcgttgcggatgtcgcgggtcaccgccgtcgagatcttcgcgcagcaaaaccccagcaggatcgtcccgcacacgccgatgagcgagatcaccgcgatcaccgcgccgctttgcagcagataccccttgtcctgccgcagcaccccttcatcgatcatgttcgagaccatcgtcggaatgcccagctccaccagcgcgaacccaaacaccgataagatgttgagcagcaccagccatttgtagcgtttcatgtaatgtaagatcagtttcattctttcctcacctcttccctttcgactatccgctccattctatcatatctcgacaaagataaacagagggcagcagcgctttgtgaaagaagcgtgaacattccacatgcagcgaaagaaaaccaggacgatgatgaacatcgtcccggcgctttcactcctcttcttccatgaactgatcgatacaggcgaccgatcttcggtaataatcgtacaatgtgtccagatacgtcctgcccttctcctccagatgatagtacaccttgacctgacggacagacgtattcttcttcgtgctgctgatgtagccattgtcttccagccggtataagaccggatacaggatcccttctctgagccgaaagaagttccccgtgcgccgggcgatctcctgagagatctcataaccatagcggtccccgcgggtcaggctcttcagcgccagcatctcaattctgaaaaaatctgttcttttccgcatatcaatacctctaagcttctctgtttatcatatcacaatttccgatcgaaaatcacctgattctccataaaaaaagaaggatccgcagatccctcgttactattcacagtcagccaaaacctgtcaagtggaaaactaaagaaattgttt

SEQ ID NO: 3287 - DNA, 11645 bp, Unknown
  16S sequences of unknown bacteria
cgcagtgaaaatttagcccaggagattgcaaaggtactgattgaaataggatacgaagtgcctaagtctgctgcgagcggctatcgcatagaagcttacgacatttccaacacaaacggtgttgattcagttggcgcaatggtggtgtttgaaggcgcaaagccggtaaaaaaggattacaggcgctttaagataaagacgatagaaggaccgaacgattacgcgagtctgcaagaggttatatataggcgttttcggcgtgccgagcagggtgatccgggcttttcaagcttgccggacttcctgtttatagacggcgggcagggtcaggtgacagctgtgcagcaggtgcttaaagcgatgaaaataagtgtgcccgtcgttggaatggcgaaagatgatcatcataggacgcgggcgcttgttgcgggcgacggacgcgaagccgagcttgcagcaaggccgcttctttttaaatatataggcgcggtgcaggaagaagtgcacaggtttgctatagagtatcacagaggtcttagaaataaaaaaatgcttacttccgtactcgatgaaatagaaggaatagggccggcgaaaagaaatgcgctgctctcccattttggcagcgttgattccataaaaaaagcgtctttggaagagcttatggctgtgaaaggcataacaaagacaaatgccggaaaaataagagaatattttaattgataaaagttaatgttaatgatataattatggcgaatatttgaatacggcaatgccgtaaattaagtttctatttaatttggagggaaaaaacatgacagataaggaaaagtgcggctgccacgatcacgactgcgattgtcagcacgaccacgaagaagccgatttcataacacttgaatttgatgacggcgaagaggtggaatgtgaagttataggcgtattcgacttcgagggtaaggattatattgcgcttatggctgaagaggacgatgaaagcgttctttatatctatggatataaagaagttggagacgacgaatttgaactcgttgacatcgaggatgacgatgagtatgagagagcccttgccgagttcgacaaactcgttgcagaagaggcatagataccgaaacggtatagatcctgaaaaaataagggccgcatacgcggtcctttactaattctgcggtatatagccgggctttgtgcagtataaagcgggaaacctcagatgcgtaaatttatacatattcagcggtttgtctttgaatgtataatcgaaccgatgccgagtacaataccaaagatgataattgtgatgtaatacgaccttacgccattgtgcacggtgccgaaaatggctgcgactgcgagaagcagaaataaaataccggtaaaaagtctctttttatcatacataaaacgaacctccaaaattcaaactgtgaattttcactttatgtattaaagtataccataaaaatatacggagcggaaaggaaaataaaaatgaaaaaatacgatatcatcattataggcgcaggagcatcgggagtatttcttgcttacgagcttacaaaaattaaaaacagcgcttctgtgcttatgatagataagggagaaagcctggaaaaaagggtatgtccgattaagacgggcaaagtcacatcgtgcgtgaaatgctcgccatgtcatattatgaacggttacggaggcgcgggtacgctttcggatgggaaatacaacataacgacaaactttggcggggatcttcataaatatgtgggcacggatgaggcgatagcgctgatggaatatgtcgatgaggttttatgcagcatgggcggagcggatgcgaagctctattcgacgggcagttcagacctcaaaacgagggcgctcagaaacaatctgcatttgcttgatgcaaaagtgcgccacctcggcacggatagaaatgtgcagatactcggcaagatttttgagtacacaaagagcagagtggatatgatgttcaggacgggcgtgagcgatgtcgtgagaaacgacgacggcagcttcacgatcaagaccgaaagcggcgaagaattttcgtgcggagatctcgtgctggccacagggcgttcgggctcgaagtggatagccgagacctgcaataaattcggtatcgaacaaaaatcaaaccgagttgacataggtgtgagagttgagcttccggcggaggttttcaagcatattacggacgaagtatatgagagcaaaattgtgtataagaccgataaatacaacgatatggtgcgtacattctgtatgaatccttacggtgaggtggtagcagaaaatacaaacggtattgtaactgtgaacggacacagctacgctgatccggcgctgcgcacagagaacaccaattttgcgctgctcgtgtcaaatacatttacaaagccttttaagaacagcaacgaatacggcgagtcgattgcccgcctctcaaacatgctcgggggcggtgtgctgcttcagcgctttggggatcttgtaaagggcaggagaagcagtgagagacgtatggaaaaatgctttacgagaccgactcttaaagctacgccgggtgatctttcgctggtaatacctaagcgtcagcttgacgatataatcgagatgatttacgcactcgataagattgcgccgggtacagcaaacgaagatacgcttctttacggcgtggaagttaagttctacaattcaaaggttgaggttgacggcaatctcgaaacaaaggtgaagggtctttacgctctcggtgatggctcgggcgtgacgcattcgctttcacaggcgtcggcgagcggcgtgcatgtggcgagaattttagcagaaaaatacaagtaaatttataatggagtgcatatgaaacgactggcaataggaatactcgcacatgtggactcaggtaagacgaccctttccgagggtcttctttatactgccggagaaataaagaagcttggcagggtagatcacaaaagtgctttcctcgacacaaatgaaatagaaaaagaacgcggcattacgattttttcaaagcaggctgtaattggacttgcaggcacggaaattacgcttctcgatacaccggggcatgttgatttttcggcagagacggaaagaacgctgccggtgctcgattatgcagtgcttgtgataagcggagctgacggagtacagagtcatacggagactttgtggcgtttgcttgcgcattacagtgtgcccgtttttgtgtttgtaaataaaatggatctcggtgtaaagagcagagatgagataatggcggaactctgcagcaggcttggcgacggctgccttgatttttctgaagctgcggtcggaacagatgagttttttgaaagcgcggctatgctcgggcaagagctgatggatgagtatcttgagaggggcagcattgaagaagcgtccttgaaagcggcaatcgcttcgcgtgaaattttcccttgtttttttggctcggctctaaaaatggaaggcgtggctaaattcttagcggcgcttgatcggtatacgcttgatttaaacggggcgagaagcggcgctttggcggagggcgcaagtgatttcggcgcgcgggtgtttaagatttcagaggacgagcgcggacagcgccttacgcatatgaaaataacatgcggcggcctgaaagtgaaggagtttgtaaactgcggcggacaggaacagaagataaacgagctgcgcatctattcgggagcgaaatataagagcgtgcccgaggtgtttgcgggtaatgtctgcgcagttccggggctaacgggcacatttccgggacaagggcttggcagtgagcccgatgcgggagatttgatgtcggagcctgtgttcacatattcagtgattttgccggatgatgttgacgcgcttgcggcgctcgcggtgcttaggaaactcgaagaagaagaaacaaaaatgcatatcatttggaacgagcggctgcaaaccataaacgtacagataatgggcgaggtgcagcttgaagttttgaagcgcatacttgaggaccgctttgggctggcagttgaatttggaaacggcagcattatatatatggaaacgatagcaactgcagttgtcggtgtgggacactatgagccgctcaggcattacgcggaagtgcatcttttacttgagcccgctgagcgcggcagcggtatcacgattgcaagcggggtgagtgaggatgtgtttgaaaagaactggcagagacttgtgctcagtcatattgccgagaaaactcatatcggtgtgctgacaggatcgcctgttactgatatacgaattacacttgttgcgggcagaggaagcaaaaagcacacggaaggcggagatttcaggcaggcgacgtatagggcggtgagacaggcgctgatgaatgccgaaagtgtattgctcgaaccgtggtatgaatttactcttgaagtaccgcaggatgctgtggggcgcgcgatgacggacttgcagcagatgggagccaagtttgaaatgccaggtgcaaaaggcggaatgtcagttatcacagggcgcgcccctgtggcagccatacgcgattaccaaaaaaatgtcgtttcttatacccacgggcgcggacgtctcagctgcttgtacggcggctatgcaccgtgcgtcaatgctgaagaagtggtggcggcaataaactatgaccctgagcttgacctcgaaaacacagcggactctatattctgttatcacggcgcagcacagctcgtgaagtggtacgaagtgtacgaacatatgcagataccgatgatgagtttgggcgcggaagctgaacaggcgcagcttgaagctgcggcgcgggatgcggagcggcgcagcagagagagaagcagttcttacgtagacgatgacgagctgcgccgcatattcgagcgcacatatggacagataaaagaaacgcgccttgcacgcccggtgatgaggcgtgatgttcctgaggtaaaataccgcgggaaggaaaagcctgctggaaacgggcctgtttatttgctcatcgacggctacaatattatatttgcgtgggatgatcttaaaaaaactgctgaagaaagcttagacctggcacggacgcggctcatagaccgtatcagcaattatcaggcgtacaagcagttaaatgtcataatcgtctttgatgcgtaccgtgtaaaagatgctgtgcgcaagatagaaaaagtgcacggactcaccgttgtttatactcaggaagcggagacagcagatcagtatatagagaagacaagcaaggtgctgagcaaggattacagagtgcgcgttgcaacctctgacaatctggagcaggtgataattctcggccacggcgccagcagagtgtccgcgccggaattcctcgaagaagtacgtgccgcggaagcagaaatgcagcaatacttaaaataaataacaataaaatgcgcttatggcaggggatatgatgctgtaagcgttttttttgtttttgccgctgccttttgcatatattttttgtttttgatttaattcaagttaattcaaaaaatattttgtaactctgtagaacagcgttttatatcttatttatgttatacactgagcgcgagaaacatattttatctgagggagttaagtaaagaatatgaaaaaatagcgtggaaagggcacagtttaatgaaaaaaagtaaatgtaagtgcggattaaagtgcatactgttatttttggtgggggcgtgcgtttattataatgtggaaatctgttttcgcggacatagtcactggacaatggctgtactcggcggcatactgtttataatcatcggcaatataaacgagaagggcgcagcttcgcgcaggataccgctgtttgcgcagggattttttgcttccatcctcatcacggcgtttgaattggctgcgggagtggtgcttaacatctggctgggactcaatatttgggactattccgatttaccttttaattttcttgggcaaatatgcctgcgcttcagtcttatctggattgcagtcgggattattgctgtcgtgcttgacgattatttaaggtacttgctttttgatgaggaaaggcctaagtataaaatatggaaattatgaagatgcaggcttaaagctcaaagcgtacaggtaaaacagagtgtcggcgttctataaagaattgtctttatctaaaaataattaaggatagttaaagttttaactttacaaatgcgcgctggggttgtataattacggcggatggtattctgacgaaaccgtaccgcgtgcttaatattttattcatactgtcttgcagaaaggcagaacacgaatcgaaaggatcgggattctgcggtagttatgaggaggtatgatgaataaaaacgaaaatttatctataggatttattggcgcgggcagagttggatttactttggcccgttatttttatgaaaaaaatctcaagctttcgggatttttcagcagagcttacgagagtgcccgcgaagcggcggagtttactcagagcaaagcttacaaaaacatcgcggagcttgcagcggagagcgatattatttttataacaacgcccgacgcagctatttgtgaagtttattcagagcttaaaaaatgcggactcaaggataaaatattatgtcatacaagcggcgcgttatcggcagatgtcttttccggcatagaggagttaggggcgtgcggatactcggtacatccgatatttgcagtgagcgacaagagaaattcgtataaggaaatcggcagggcttactttactgtcgagggcagtgatatgaaaatgccggaaatcaaacgaatttttgcaaagctcggcaatagctatcaggtgataggtgcggaaaacaaggctaaatatcacgcggcgctagtaatgtcgagcaatctcgtcatcgggctttatcatatggcgggaggtttgctcaaagaatgcggattctcagaggaagcagcgcaggaggcgctcaaagccgctatttttgaacaatgcggaaaatttgtgcaggatgggctgcgaagatgcgcttacggggcctgtagacagaaatgatgtagggacggtgcgcaagcatcttacggctatgtcggagatgtgcgggaagaatgcgataatcgacgtatacaaactgctttcgagagagcttattgaaattgcagaggcaaaatatccggagcgcgattacagcgagctttcgcagtcgatcggtaaagaaaaatagaaaatgatttaagataaaaggagttaggtaaataaaatgaaaaatacagttttaacatttgcaaaggcaaaggaagacggcgttaagctttcaatgctgacatcgtatgattattcaatggcaagactcgttgatgaggcgggaataaattccatcctcgtgggcgattcacttggaaatgtaatgctcggatacgaggatacaacgcctgtaacaatggaggatatgattcatcatacagcggcggttgcccgcggcgcgaagaatgctcttattgtcggcgatatgccgtttatgtcgtatcagacatcggtttacgatgctgttgtaaatgcgggcaggcttatcaaagagggacatgccaatgccgttaagcttgagggcggcgtagaggtatgcccgcagataaaggcgatagttgaggcaggtattccggtatgcgcgcacatcggactcacaccgcagtcgataaatgcttttggcgggcacaaggtgcaggggaagagtgaggaagctgcaaggaagcttatggaggatgcgcttgcagtacaggaagcaggtgcttttgcagttgtaatcgaggcagtgccggcaaagctcgcctcgctcatcacaagcaagcttgatatcgtaactattggcataggtgcgggagcgggctgcgatggtcaggtgcttgtttatcaggatatgctgggaatgttttcagacttctcgccgaaatttgtaaagagatatgcggaaatcggggagataatgaagaaggcgttcgcaaagtacgacgaagaagtaaaggcgggaatatttcctgcggaagagcacggatataagattgacgatgatgttatagaaaagctttattagttttattaaataaggataggctgcgcggcgcttttcatctgccgcacagcttttcaatacaggagaaagaaatgataaaaattgtacacactgttaaagaagtaagagagcaggtgaaggagtggcgcgcggagggtctctctgtgggacttgttcccacaatgggatttctgcatgaagggcataaaagccttattgacagagcggcagcggataatgacagaactgtggtaagcatctttgtaaatccgatgcagtttggaccgaaagaggatcttgcgaattatccgcgggatctcgaggcggattcaagactctgtgaagcggcgggtgcggatcttatttttaatccggaacctgaagaaatgtatggcagcgggttttgctcgtttgtggatatgacagggcctacggcggagctgtgcggcaaaagcagaccgattcatttccgcggtgtatgtactgttgtgagcaagctgtttaacatcgttatgccggacagggcgtattttggacaaaaggacgcacagcagcttgcggtaataaagcgtatggttgcggatttaaacattccggtggaaataatcggctgcccgatagtacgcgaggcggatggtcttgctaaaagctcgcgaaacacttatctcaacgaagaagaaagaaaagcggcattgatactgagcaaaactatatttatggggcaggagctcgttaaaaacggccttacggacgcggcggagcttgtgcggaagatgaaagagaacattgaaacagagccgctcgcaacaatagattatgttgatgtcgtaaatttcgacgatatatcaaaaaaagacacgatcggcgacaacactctcgtagctatggctgtatatgtgggaaaggcacggcttctcgataattttataatagaaaagaaataaggagtaaaaaatatgcttgttaatatgcttaaaggaaaaattcaccgcgcgaccgtggttcaggcagagcttgattatgtgggcagcattacggtagacgaggatcttctcgatgcttccggaatacatgaatatgagctggtgcaaatcgtggatgtcaataatggcaatagatttgaaacctataccatagcgggagagcgaggaagcggtatgatttgcttaaacggggccgcggccagacaggtgcaggtgaacgacaagataatcatcatgtgctacgcgcagatggacgaaaatgaattgaagtcgcatgctccgaaagttgtgtttgtggatgatgaaaataagatagtgagaacaacatgctacgaaaaacacggcttattgaaagatatgatttaaaaatcttgcttaaaatactgcattttggtataatatcataatatgaaattaagatgagaaagcagtgaaaaggaagaaaattatgaaagatattctgttaaaagaacttttccgaaatacagatgcgtatgcggacaaagaggtgactataagaggctggataaggaataacagaagctccaataaatttggatttatcgagcttaacgacggttcgttttttaaatccgtgcaggttgtttacgaagaagaatttataagcaattttgaggagatttccaaggcttatgtagctacggcgctgcttgtaaaaggtacgcttgtgcttacgccgggagcaaagcagccgtttgaaattaaggcgaaggagatttctgtggaagctgtatcgacgcctgattatccgctgcagcctaagcgtcattcgatggaatttttaagagaaattgcgcacttaagaccgagaagcaatacatttgctgctgtttttagagtgagatcgcttgtagcttacgccattcataggtttttccaggaaaaaggctttgtatatgttcatacgcctataataacgggaagcgactgcgaaggtgcaggcgagatgttcagagtgacgacgcttgatatggacgatattccgagaaatgaagatggaagcatagattattctcaggatttcttcggcaaagaaacatctatgactgtatcgggacagctcgaggcggaaacttttgcgctggcatttagaaatgtatatacatttggtccgacattcagagctgagaattccaatacggccagacacgcctcagaattttggatgatagagccggaggtggcatttgcggatctcgcagataatatggagctcgctgaggaaatgattaagtacatcataaattatgtgcttgagaatgcgcctgaggaaatggaattctttaatagttttatagataaaggtttgcttgacagactgaaaaatatcgtggagtcagattttgcaagaatcacgtatacggaagcggtcgatatgctgctcaaatcgggacaggaatttcaataccctgttgagtggggcatagacctccagacggagcatgagagatatattacggaaaaaatatacaaaaagccggtgtttgtaacggattatcctaaggatatcaaggctttctatatgcgcatgaacgatgatggcaagacggtagccgcctgcgatttgctcgtgccgggagtcggtgaaattatcggcggttcgcagagagaggaacgctacgatgtgcttactgcgagaatggctgaactcggattaaaagaagatgactattggtggtatctcgatctcagaaagtacggcggcgtaaagcatgccggttacgggcttgggtttgagagaatcataatgtatataacaggaatgagcaacatcagagacgtgcttccgttcccgagaacgccaaagacggcggaattttaacagcagacttaagaactttgtgttccggccggaagaaaaagcattgcatatcgggaggcagagctctggctgtgatcaaagcttcgcacaccgattgctataatttcggccttgacgctattttagctcatttgtgaagaacagagggcttaaattgccgccgccctttaatagatttaatgattaaaaaatatcggtatagtttggaaaaactcggctatgccgatttttttatttagtcatcttattgaaaaaggtagtatgacatatgtaaattagatcagtcgttgttgcggcaccaaggcgagctgaaaatatcaaagccgtaatgaatacaggcgcgtgcagccagtttttgcggcctaatcagtatagctgacattggcttgcgcgatattgacatctgggcttgcacgtcttagcagcggttggccgctgcgattgtgcggctggatctgcacggcagctattacatagagcttgcgggagcttagctttttataaggcaaatcatgggaatatgctttacaaagaatatataatttggtattataattaaatatcaattttcaggagaggacatcatggaagatcagaaaaaaacgcagctatttgaacagacccctataccaa

SEQ ID NO: 3288 - DNA, 9687 bp, Unknown
  16S sequences of unknown bacteria
tcaggtgattttttatggcgtatacctttggttttatcggctgtggcaatatgggcggcgcactgtccgccgctgcagcgaaaacgctgccgggctgcgacatcctgttggcagatcacgacaacgccagagccgaagctctggcgggcgaattgggcgcatgcagcggcagcaacgaaaccgccgcggccgagagccactttctctttctgggtgtaaaaccccagatgatggaagatttgctcacctccatcgcgcctgtgctgagcgcacgcaccgacccgttcgtcctcgtcaccatggcagcgggcatgaccatcgcccggatccaggaactggccggcggggcctatcccactattcgcattatgcccaacaccccggtctccgtgggatcaggcatgatcctgtataccgccagcgcgaatgtaacggcagaggacaaaaccgcgttcctgcagaacatggccgccgcaggcgtgctggacgaactgcacgaagaactgatcgacgccggctgcgccatttccggctgcggacccgcttttgtggatctgtttctggaggcgcttgccgacggcggcgtggaatgtggccttccccgggataaggcgctgctgtacgccgcgcagatggtactgggcagcgccaggctggccctggagagcgacacacatcccgccgtgctgaaggatcgggtatgcagtcccggcggcagcaccatcgttggcgtgcatgccctggaagacggcgcgttccgcgccaccgtcatgggtgcagtaagtgccgcttatgccaaaaccatggaattggggaaaaaataaaccggcaaatcaacaggccctgcggcagcgccgcagggcctgttgcaatgaattacagaaacgtttccaccgctgcccggcgggcaaagccttcttccagttcgtgctggtgatacagatagcccgggtccgtgtaaaactttgcccctgtgggacactttttcacacaggcacagcatttgatgcagatactcttcacctgggaaacatccaccggatcgatactgcccatggggcacagcgctgcgcacaatccgcagccgctgcacttgtccagatcggtgagcggcttgaccttcaggatattcaccgctttgccctgccggtcccggggcgtataatagggccgcagcggttcctccccccgtacggccaccgctgtttccggcagtgccgacagcgcggcgatcttctccgccgcagcgcgggcaaaatcttctgcccgcgccagatcctgtttgtccggccgcccggcggccagcgttcgggaaaaggaatgttctcccacaaaggccgcgccagccaccgcacgcagcccgtcctgttccaaaatattccgcagctcaatcaatccgtcatcgaagttgcggttgccaaacaataccacaggaatggcaagagcgccgctgccgcgcagctttcccgtcaaatacttcagcagcacattgggcacccggccggcatacaccggcgtacctatcacagccagttcaccgggaccgaagcgctgctccgcttcccgcgcctccggtcgggtaaaatcaaaccgttccactgatgcacccaaataccgtcccagcgcttttgccaaagtacagacaactttctccgtcgtccccgtgccgctgaaatacagcgcccgcaccactgtgatctccatgccatcgctcccttttcttttttctgatcatatcacatttccgcgcaaaagggaacggcccgggagcattccggactggtataattttcccggcgtttttttgcatcttttcattgctccgcgcagcgtgatttgctataataaaaaacatgtccgagtgacagaaatccattttcgccctcaggggcgttttttaatttgaaaaagatagagagaactaccatgactactttgaaaaaacgggagatcgacctgaccgagggccgtatttccacacaaatgatccgctttttcatccccatttggtgcggtatttttttccagcagatttacattaccgccgatgccgtcatcatcagcaaagtcgtgggcgaatccgcattggccgcggtgggctgcaccagcactttcatcaacctgctcattggcttcttcgtcggcatcggcagcggcgctacagtcgtgatcgcccagtatttcggcgcgcgggaaaacgacatggtgcgccgggccacccacaccgcactggcgctggcagcaatcatcggcctatctttcatggttctcggtttgttcatcacgccctggcttctggaactgctgcaaaccccggaagacattttcgacatggccgtgcagtatcttcggatctactcgctgggcatgctgcccagtgtgctgtataacatgggctcaggcatactgcgcgcagtgggcgacgcccgcaggcctgtgtatatcctcatttgcacagcggtagtcaacatcatcctcgacctgctgttcaccgccgtgctgcggatgggcatatccggtgcggcactggccacggtgctctcccagacgctggctatgagcttggtgctgctgtgtctggcccaggagcggtcgctgcctgtgcagcttcactggcgcgaattgaaaccggatctgcgccttctctggcgtatcacccgcatcggcctgcctaccggcattcagtcgaccatgttcgatctgagcaatctgctgatccaggccagcgtgaactatttcggcaccagcaccatcacggcctggacagcgtatagtaacatcaatctggtattctggatgaccgtcagcgccatgggtaccaccatcaccacgttcatcgggcagaacttcggcgcaggcaaactggaccgactgcatcagggcgtccgggtggggctgggcctttcggcgctgggctgtgtaatcattaccgttgtcacggtcgttctgcgctatcctctcacccacctgtttgccaccgatcctaaggtagtgcagatctgtgtgcagatgctgctgatgctcacccccacatatattacttatatgtgcatcgaagtattttccggcgtgatccgcggcgtgggggaagcgctgatcccgatgatcatcacgggcctttccatctgcgtgttccgcgtcgtttggatcctgtggattctgccgctccataacactttgggcatgatctgcatcagctatcccatttcctgggtgatgggcacaatcgcctttttcatctattataaaaagggaaaatggcttactaaacgccttccctcccaaacgcaggaacacaccacttcatcggcatctctttaaaaaataaagcaggcggtatggctgaagccataccgcctgtttgttttgaactgttatttccccgtttctgctaaggtaaaactgttggcaatggcgccaagataggcgccaaaactctccgaagcctccgtaggacattcgagaatcaggccatagcagcccttatcaccatgattgacaaaataggccaccaaatccgtgatcgtcccattgtccatttcactgccgcgcagcgaaactacatcagacacatgggccagcgcgccggtttggggcgcttcaaaggtatagtcatcctcgtctttccggaaaagctccgccaccgcatccgctttctttccatcgtaataacgaactgtgaattctacggcatcgttggcatggggattccattgcggctcgttgtcatcgcgctcccatccttccggaatggcaagcgtatagccgtttccagtgtagaccgtggctgtgacggtatccgtggtgccgtcctcctgctgaacctgcagttctacggtcttcggctcctcctgttcagaatcagtccgggggcggctgaagggattcgatgcagcaccctgctgcgtttggccggccggctcctgcatgctgcttccgccgccctgctgcgtaccgtccgtgccgggctgcaccggcatggcacagcccgcggcagacacaaccagtgcagccgcagcggtcaggatccatatgcgctttgatttcatatcaaacgacctccttatcggtctcttttcctctctttcggcgcaggaaagatagactgcaaagttattatatccaaaactgcctcagatagcaagagcgcaaaagcgcccaagacggctttccgccatctcgggcgctttcttttttcattggccgccgctttttacagcagtgtggacaaatatccgcagcccaaaatcatcaaaaagcagcaagccgacagcgtgccgccagcggcggaaatcgtttcggccacgcgccgggatgcgcgtttgcgggtagaaaaaccggcgcacatcaccagaataccagccaaaaagccataaaacagcagcatgatggtcgtttgcatagatgtttcctctctttcttttaccgcgctgccttcttcggcggcggcaccatcgtggaacttaccttccccagcggccgcacaggcaaccgctgcgcttccgaatcaggcgctttctgtggcagattccggcaccaaatccgtttcatacgaattgtcatacacagccactgtcgcatttccgtcctgatacctgctttcatacagcgcgtcgtgctccgcgcaggtgcgcagcgtcacatattcgttcaggatccccagatcgttcagcgcctgaaccgttgcggtcatgtccacgctcaggtcaatgtatgccctgccggtatccaccgacgaaccaattcgataattaaactgcagattatttacatatctcttttccccgtcctgtgcctgctgttcggcgtcactgcgtcggtcggccacgaggatgcgctccgtacgtcccgccgcagcatcttcacgcagggccgccgccagggtttgcgcttcggcctccgtcagaatacgttcctgctccacatcgatgacacccgcattgtaataggtgaaacagccgccggtcagagtaacggcttcaccgtccacttcctcgccagccacgggacccagagcgtttttcgtgcggaattctgcatcatccaccagcgcttgggccagtgccgtcaacgaggacgcatcttccaggtcgctttcacgcaccgtcatatagtcataattccgctgcagcaccgtaccgtctttcaaacggtaactcagactgacatacagaggcgaattgccgctgccgtcgctgtagtcggtattccatacatcccgctgcgctgtgctgcggtgatccacaatgccttgatgcagcgcgcgcaccttttccacagcctcttcgccctgcacggtggcactggcagcatcgttgccgctgacggtcacatgaacgaaatcaatctgcccgacctgtggcacacggctgacaaacccagtcacatccagctgtgcgcccagcgccaccagcagaatcaccgctgcgcacaccacactgccgcgcaggctcttttttaccacacggaaagatttctgcagcagcatctgtgccaccaggaagcccacagcacccacgacgatcatacacaccagccgcacgggtacaccgctcagacggctattcataaagaccagcccatacagtccctgtccgatcgtcagcgccgctgtcagagccacgccgtaacggaacagcaccttggcccagcgcacggaaacaatatccccagcgctctcactgcggcggcggcgatacgccgcatacgccaaaacggcaaaaacaatgcctgcagccgcatagatcaccaaaacggggatcccgtgcagcgatgctgtgctgaacgaataatccgctgcattatagttccataccacagataccgagtcataaagtctggccagcggcgtcagccattccaccactgctgcgcggtccgtcatggaaaagccatacagaaacggctcaagaaacatggagatcgaccaccacagcacaaaagccagtacattgagcacaccataaaataccggcagcgccagcaggtttccggtaaacatggcacaaaatacagcgaaggagtagaaaaacaactccatggcagttaatcccagcagccacgccagcagcatgcccggacagaacacatggcccaccagcgtcacgcacgccgtgattccgcacaagatcaggttgggtaccacgaaaaagagcagcccgctgatatagttggtgaggaacaatccgctgcgccggatgggcagggagtgcatcagcgaaacactgcgggccgaataaaggtaggaaaacacagccatagccactgccacaccgtaaaggcaggctaccacaggccccgcgcttgtcatgaaagcgcccaggatctggatcacatcattgagtttcggcggccagtcgctggagagctgcatgcccagcagcagcggcatcgccacaaaccaagcagcggaatatacgatccacagcgggctgaagcggatcacatttttgcgcagcagcgtcagattaaagcacgatgtctttgactgcatagtccacacctcccaattcgtagataaaaatttcttccagggacagcggcagcgcttccagcagcagcggctgaagcacggaaaggcgcgcagtcacttcctcggcgctgccgcggacaatcagcgtttgcacccggccggtagcgctgcggtgaagaatctccaactcctccggcagagccacgtcctcgccggagggcaccatctgaactttcactgtaccgccctgcagttcttccagcgagcgctggagcagcacttttccgtgatccataatgcccacgtggtcgcacacgtcctccaattcgcgcaggttgtgggaagaaaccagcaccgtggtgccccgctcagccacgtcattgaggatcaggctccacacctggcggcgcatcacggggtccagtccgtccaccggttcgtccagcaccagataatccggcatcgtgcacatagccagccagaacgccacttgcttctgcatacctttgctcaggcggcggatcgtccgcttttcatcgatggaaaacacttccttgaatttctcatagcgttccatattgaacttcggataaaatccccggtaaaaacgcatcatatcccgcacatcggactggagaaaatagtaccagtcgtccggaatcgaagcgatgcgcgctttggcggaaggattctcgaaaaccgcctccccgtctactgtgatctcgcctacatcctgacggtaaataccggtaatgtggcggatcaaagtggatttccccgcgccgttgggacccactaggccgtacaccgcgccgttgggtacagtaagggtggccccgcccagtgcggcaaagccgtcaaattcctttctcacattctgcacgtcaatcatggctgctctcctttccttccttcagcaattccatcagctcctgctgcgacgtgcccagatagcgcagctccgccgccagttcccgaaagcggtgtttcagttcttccttgcgccgctcgtccgttcgggcatctccgctggcaaaggagcctttgccgggaacggaatagatatatccctcgttttccagttcattgtacgccttttgaatcgtgtttggattgatagccagctccgtagccagggaacgcaccgaaggaagcttgtcaccctctttcagcgcaccggtaacgatcaggcgcttcagtccgtttttgatctgctcatagatcggcctggcatcccgatagttcagactaatcaatacccttcactcctttcctgctcagagtgtatttagtgtattatctgtgttagtacagttactatatcatttgtttttccgtttgtcaacagcgtttttgggagaagcgcgccgctgttccgcaagaatgcagaaaacgcggaaaacatcgttttccgcgttttttcatccattttgccgaagggctccgcccccttctttttctgtttacagcagcgtcacaccgcgctctgcgcagatacgccgagtctcctcatcccagatggaggactgcacttcgccgatgtgagcgctgcccaacagcagcatgcacaggcgggactggccgataccgccgcccatagtatcgggcagctccccggagagcagcgccttgtggaagggcagtgtccggcgcgcatcacacccggccaaagaaagctgacggtccatgctttccgcattgacgcggatgcccatggaggacacctcgtaggagcgctgcaaagtatgattccaaaacagcaaatcgccgttgagtgcccagtcgtcatagtccggagcacggccgtcatgaggcttaccggagcgcagcgcgccgccgatctgcatcaggaatgtggtcggatggtcttttacaaaggcgtcctcccgctccttcggcgtccattcgggatattgatcctccagctcctgcgtggtaataaaagtaatgtcccgctgcgtggcaggcaggatattcagcgccgggaacagtgcgcgcatggttttttccgtgtcacagatcgctcccacgatgcgctccactgtctcctgcagatgctgcagcgtacgctcttgcggcgcaatcactttttcccagtcccactgatccacataaatggagtggagattgtcgagatcttcatccctccggatggcgttcatatccgtgacaattccgctgcccacatcaaaaccatagcggtgcagcgccgcgcgtttccatttggccagagaatgcaccacctgagcatgggtgccggtggcccgaatatcaaattccaccgggcgctccacgccgttgagatcatcgttgagtcccgtggcggcatccagcagcagcggcgccgacacgcggcgtaaatgcagcgcaccgctcagggtatcttcaaacacacgtttggtcatggcaatggccacctgggtatcataaagccccagcaacggccggtatttttccggaatagtacagttgttcatatcaatttcccctctttccgtacagcatttcacgttctctttttgtcttctctggcccgcaaaaaggccgggcgctttttcacttcctgtgtcggcggatggtatgtgtcctcgtagcgttcgatcagctcttcctggccgcgcttacccagcgcccagtaaatcgcttttttgataagatcataaaacaccacaaacaccggcacaccgatgagcagccccacaaagccaaacaggccgccgaacagaagcgtggagaacagcacccagaagctgctcagtcccactttaccgctgagaatcttcgggcagataatattgccatccacctgctgcagaatcaaaataaagatgataaaccagatacatttcaccggatcatccataaaaatcagcagcgccgaaggaatcgccccgatatagggtccaaaatacggaatgatatttgtgatgccgttgaccactgcaatcagcgccgcgtctggcaagcccataacaaggcacgccacatacacaatcacgcccacgatcaccgaatccagaatccggccgctgatataatccgtgaaagtgcggtcaataaagcgcagctctttcaccacagcggcatacgccttgtcagggaagataccgcgcagcaccattttcagctgtgcgcgccattttttgcggctggtcagaagataaatcgccacaaccagaccgatgaacaggttcaccagttccgtcagaattgta

SEQ ID NO: 3289 - DNA, 6516 bp, Unknown
  16S sequences of unknown bacteria
agtttcggcgtcgccggtgagcatgacggaaaatttgccgagggatgcctttaaaacaagagagtagttgttcagctcgtcgccatacttcttctcggtatcggtgagcaccgtcacggccgcatttccgagaggaaaaacatctcccctgctcggaacggttatcgagagatttttttcttcggcagcgtccaaaacatcggaaaaggttgccgtttcggcagtaacatcgggcatgagcaaatcgtcgatttccacgttttcgataacgtcgtcaagaccgcctatatggtcggcgtgagggtgggtggccacggcatatttaagccgcgaaatctttttcgaggaaatataatcaacgacggttttccccgattcgtttgttccgccgtccacaagcatactttctccgccgcaggacaaaagtattgcgtccccctgccccacgtcgataaaatccaccgaaagaacatcgggtgaaaaggtgcctgccgtgccggatgaactttcaccgcaggaggcaaagccgaaagcaacaagcaaacacagcagcagcgaaccgatttttttcattttttctcctaaaaatatcccccgaaagaatcgagggacaaaattatttttttgaaattgccgacggaattttcagaatttcgtaaacaatcatcggtatgaccgaaaggccgagcaccgttccccattttccgtattcggtaaggctgacgagaccgaaaacctcggtgacgggagcaatcagcaaaaccgctccgatgagaagaatagaaccgaaaaacgtataaaggaaaatcggcgaaaatctgtggcttttaaaatcgacgataagacggtttgaacgaaccgacaccatggcaaagatttggccgagagaaagggtggcaaaagccatggtctgagaaagagcaagattttgctcccgcccgccgagagaaaaagccaaaatggtcagaattgcggtgagcacaccgcaaagagcaattcgggcaatactgtttttggtgaatatatccccgccgtttttatcggaaatgggctggacattggccttgttaggcattgcggcgcccacggaaatggcgggaattgccgaggttatcatatttatccacaaaatatgcatggccgacagcggcacaagacgccaaatcacaatggcgaaaagaagcgtcagcacctcgccgagattgcaggcaatcaaatagcgaatggccttgcggatattcgaaaaaattccgcggctttcggttatggcgtcggacattgcagaaaagctgttgtttgtcagcacaacgtcggccgcgccctttacgacgtcgggagccgattcgacggtacagcccgtgtcggcagaggaaattgcgggagcgtcgttaacaccgtcgcccacaaaagtgacaacctcgccgcaagccttaaaggcattgataattcttgttttttgatcgggagaaattctcgcaaaggcgccgaaattttcaacgcaaccggcaagctcttcatccgacatttcttcgatttgttccccggttgcaatctgctcgggagatgaaattatacccatttcaagagcggccgcggcggcggtggcggggtggtcacccgtcagcattacgacctttatgcccgcgtttttacaaagctcgacggcattttccgcccctcttctcggaggatcgtaaattccgagaagcccgccgaaagaaagtccgttttcgaattcctctcttgtgggattcgtcggctcggactcgagagccttgaaggcaacggcgatgacacgaaggccggtctttgccatttgctcatatgccgcggtaattttgtcggcatccggcaaaacgcagcaggccataacctcctcgggcgttccctttaccacggcgacgggctttgagtcaatcatgttgaccgaggtcataagccgtcttgtcgggtcaaaaggaatttcgcaaaggcggggatacatgctctcgatcgtgcgcttgtcgccgccggcatatttttcggccgcggccacgattgcagcctcggttgcgtcgccctgacggacaagcctgtctccgaccctttcggccgaagcgtcgcaacacatggtcgccatcataattatattcttttcggcggcggaaatttccgaagatttaagggcggtaagatttccaccgcagtatatgtgcgtaagctccatggaattgtgggtcaaaagaccggttttatcggtacagacaacggtcgttcctccaagggtttcaaccgcagagagcgaacggacgacgacatccgacttaaccattcttttaacaccgattgccattacaagcgccacaatggtgttaagtccctcgggaattgcggcgacggcaagggcaactgtgggaagaagggtgttgaggaaattggaaaaaatccccccctcttcctttccgaaaaccgtgccgaaaacaagtatcagcgcacagatcgtaagggcaaaaactccgagaattccgccgagctctttaagtcttttctgaagagccgttgaatttttatttttaccgtaaaccgccgacagcttcgccttttcggtaaattttccggttccgaccacaacggctctgccgctgccctcggtcaccgagcaacccgcaaataccatgtttttctgatccgcgaccgaggtaatgtcatgctcaagctcgcctgcaaatttgaccgaatcgaccgaaactccggtgagcgaactttcatcgcagcgaagtccgtcggcctcgatgattcttgcatcggcgggaatgtaatttccgacagaaagcagaattacatcgccgggaacaatgttggtggcgggaacagacgccgtctttccgtttctgacgactgtggcggaggggggcgaaataaactttagggattcaaccgcagcctctgcccccgtttgctgcagcgctcccgtgacggcgtttattacaacgataagtaaaatgattatcggctcggcaacggaagtggaaatgtccgagttttcgggcgttataagcgcaattatgaaatacagaattgcggcaacggtcaaaaccacggtgggaacgtccttaagctgtgacaaaaaaagctctttaaaggtgcgctctctttttttatcgggaagattttttccgtatttggcgagtcttgaattgacttcggcgcccgaaagaccgttttgagaatcggtcttaagctcgtttaacacatctttagccgaagatgtatgccaaatcatctgatcaatcctttgcttgtttatcggcggctataatgaaatagtatatcggctgtccgccgtcgattaccgtaacttcaacgcctccggcctttgcttcgcaggcggcaacggcaagattcagggtttcttcatccacatcagcaccgtagaaaagggttaccgaggcggtatcttttgtgacaatggttttggtaagtttaccgacggcatgaacaagatcgtcgtccacaaaggaaatttttccgtttttaagagcaagtatctcgcccttctttatttcctttccgtcaaaatcggagtctcttgccgcaaaggtaaccgaacctgtggtggtgcgctcggcagcttttcccatggttatgaggttgtcttcaaccgacgcttcttcgtcgaattcgatcatggcagaaatgcccatgggaaccgaaagggtcggcagcacgcaaacgcggcggcttgcgaggggaatggcctgttcggcggccattatgatatttttattgttggggaaaacgaaaaccgtttcggcgggagtcttttcaatagccttcaaaatatcgtcggtggacggattcatggtctggccgccctccacaacggtatcggcaccgaggtcggtaaacagctcgctcattcccttgcctgcggccaccgccacaaatccaaagggcttttcgggagcgaccgactgaattttctcgccgtcggaagcctcgggagcagcctcgggaacagcgggctgaacgccgttataggtcagtctgacgtccttcacaacaccgtattttatcgattcctgtatcacaagaccggggtcgtttgtctcgattttaacaagaacgctttggcttgaaacggtcaccgaaggacggcctgcggtttcaagataggcctgaagctttatggggtcgttctcggatttgccccttgcgatgacaaactcggcggtgtagagataatcgggttcggactttttggtctcgacgttttcgccctttatcatctttccgtcgcgaataaccgaaagcattccctcgagaatataaacatagccctgtccgcctgcgtcgacaacgccggcctttttgagaacgggaagctgttcgggggtgttggcaagggcgacctttgacgcctcgtatgcgcattcaagcacctttgatgcgtccttttcggcagccgagaacgccgctgccttttcggcagacactctcgcaacggtaagaacggttccctcggtgggtttcataaccgccttatatgccgaatccacaccgcttttgagcgcggcggcaagctgagccccgtcggccgtttcaaggcccttaaagccctttgcaattcctctgaaaagcagcgaaagaataactccggagtttcctctcgcaccgcgcagcagcgccattgacgtctttttcgcaaccgaagaaagttcggtctcgatcgacatcgaaagctctcttgaggcgttgtttatggtcatggccatgttggttccggtatctccgtcgggcacggggaaaacgttgagctcgtcaacatccttgcggtgtgcggtgatattttcggcggccgaaatgaccgcgtcgcggaactgtatgccgtttattgtttcggacaatgtaaacactccaatctctttgaaaaactactctttcatctgttcaacgtggacgattactctttccacctttattccggtggcgtcctccacaacataggtgaccttgttgattatgcttttggaaatggctgctatgttaagaccgtaaaccacgcttatgtgaaggtcgacaacaatggactgacggtctcccctcaccttaatgcccgtgtcggcaaaacggcgctttacaagctttgaacgccaccatttcatgcccttgggaatcatgttggtaactccgtagcaggaggagacggcatttccgataagcttttcaaaatatctttgggaaataccgatttggccgagatgtgtttcatacttaatcataataacactccttttttgtgtaatcagctgtttgtcacagtacagttttcgagaccgttaaaggggtcgtcgggaacgggcgaaagcccggatgaaattttatcggaatatatgaccagcccgttgcgatggcaaacgggaatgaccgacatttgttcgttaagacaggaaagcccctcggcaaccgagccgtttccgttgtgcattttataaagcgcagtttcaagagaaactcttttgggagccgaaccgtcgtttgcggtgtcggcgtcggcagcgtctgaaacggtttcatccgacgacgtaacgtccgacggaaggctttcgaccgcgcccgagtcggaggagaaattgagggttataagccctccggcggtggcgacggaatatgcgtcaagattgtcggggatttttatttcgccgatgtacaggtcataggaatgatactgtatcgccgacttgtattcctcaaaggaaagccctttaagcgtggtctcgatacctgccgatttgagatattcggaaattttggtcgcgagaagcaggcgggcgttgttttcggaattgtaaagaagagttaaatttatactctttcccgacgaattgaccgccatatcccccgcctgctgcttaatatagccggcgtttttcaaatatgcggccgccgaatcgctgtcccttgccgtgttaatggtctgaagccccgaaagctcggaaatgttcgaatggaaaagtcccttcgcggcaacggcataaccgaaataaaccgaatttgtaatttcggttcggtcaattgacgaggaaacggcgcggcggagattttcgtcgcttagtattcccgacgaggtgttgaccccgagatagacaaggttctgcatggtgacggcaacggtcgttcctttcatggtgggaatgtcgttggagcttaaatcggaataatatatgtcgacgctgcccaccgacgttccgtggtttaccgcgtcgtcgtcgggaagattgacaagatttatttttgcgatatttacccttccgccgatccaatccggatttgcctcaagataataattatcgttttgctggccgaaaacgtacctgccgctgccaaccggcggaacagacttgttatccgcgtcgacctgcttttcggtttccctttcaaaaacgggaaaatcaagcatacggacgatatactcatcggtgtttttcaaggtcagctcgacggtgtaggtccccgtcgccgaataaccgattacat

SEQ ID NO: 3290 - DNA, 8869 bp, Unknown
  16S sequences of unknown bacteria
ccgttcatcattcccgttccaacaacttacctatgagacccctccattggctttcccccattgagttcgttgtccaatatgtttgacaaacctacaggatgaaccgccgttttcagttttcccggaaaatttccattttctcccgcaggggatacgccgtcacaccgtcgccgtccagatcttcccggtgcatatccacggcggtcaactgggaattgtcataggtacggtagtagtaaacgccccggtcggcgttcatgcagcccgaatacaaggtgatctcgtactggccgtccggcagacggcacaggccccgttgctgctccaccgcgcccagaatatggaaaaactggctcacgctggaaagttcatcgtccccggactgagcgttcagacaggcgaaggccgcccgcacgaaacgggactgggacgaaagatcgccgggcagccccatagcgcccatgccccggctgtactcccagaagggcagctccttagcaaagcggaactccgggccgtcgggcgaaagccgggcgtagttgttcagctggaacagctgcatggggaagggcggattgttggtcagcacccgggcgggattctcgtaaacgtggagcccgtccgccgtgctttcgatcaccagacaggtctcccggtccgccagcatccagtgaagctgggaagcgggcattcccgggcagaagggttcgtccgtcaggttcagcttttccagcgccgcgcgggcctccgccgccgtggcacaccgtcccagcagccacgggatcagctcgaactgcgccacgttgtccttgccctgcacaggcgcgtgatacacggcgctgcccacgaaattcagcccagcaatcgccagccccttttcgttcaccgcgtcataatacagcgggtagccgtcctgcacatgggccatgccgatcatggcgtagtgctccgtccacttttctccgttacggaaggcaaaggggtacttccgaggcgtgacggtcacgctttccccaaagctgcgttcataatccagattgcgtccaaaataaaaatccttcgtccgatatgcggcggcggtacacatgatttttcatcctttcagtgttggtttgtccttgccccaccagtataccccgttttttctcccggaacaatggaaaagccgccgaaaccattgcagttttttgccgccggtgatataaagaaggaggaaaaagatttttcaagggagggacttttcatgccctgcactaccttattggtcggcaaaaaagccagctacgacggctctaccctgatggcccgcaacgaggactccggcgcgggacgattcaccgccaaaaaatttatcgtcgttcatcccgacgagcagccccggcactaccgcagcgtcatttccaaggtggagatcgacctgccggacaatcccatgcgctacaccgccatgcccgacgcggttcccgtgcagggcatctggggcgaggccggcatcaacgaatgcaacgtggccatgagcgaaacggagacgctcacctccaatccccgggtgctgggggccgatccgctggtggaaggcggtatcggcgaggaggacatgctcaccatcgtgctgccctacatccacagcgcccgggaaggcgtgctgcggctgggcgcgctgctggagcagtacggcacctacgaaatgaacggcatcggttttcaggatctggacgagatctggtggctggaatccgtcggcggccaccactggatggccaaacgggtgcccgacgacgcttacgtggtcgtccccaatcagcagggaatcaactactttgacttcaaggacgcgctgggcgaaggaaaaaatcacctttgctccgccgatctggcggacttcatccgggaaaaccatctggatctgggcttggacggcgtagaccctgcggaagcggaggacttcgacgttcgggccgcgctgggcagccacagcgacgcggatcactgctacaacacgccccgggcgtggtatatgctgcgctgcctgaatcccactaccttcgtgtgggacggccccggcgcggacttcacccccgaatccgacgatctgccgtggtgcatggtgcccgagcgcaagatcaccgtggaagacgtgaaatacgtgctttcttcctattatcagggcacggagtacaacccctacaaccgtcacggcgacctgtcccgccggggaatgtaccgccccatcggcatcaaccgcaacaatttcgtggccatcacccagctgcggccctatatgccccacgatctgcagggcgtggaatggatcgctgtgggctccaacaccttcaacgaggcggtgcccttctatgctcacataaacgccacccccgcctatctggcgaacaccaccggcgatgtgaccacggagagcttctactgggccaatcgcatcgtggccgccatggcggacgcgcactatcccgcctgtctcgcccatgtggagcgctaccagctggcgctgtccactgccggtcacgccatgctcaagcgctttgacgagcaatatctggccgcgccggagaaggacgccgccgcctacctgaccgcctgcaaccagcagctggccgacaaggcccggaagctgaccgacgaccttttgtcgaaggtgctgttcagcgccagcatggaaatgaagaacggctttgcccgttccgattcctgacggggagggggccggcatgagcggagttctcatcagcgagaccacccgggaggaacgggaacgtctggtggctgagtcgctgggcaacatcgacgctgcctgcgacggctgtgccgcgggcgtggtcgaaatgtatcaggattacatcgacggcaaaaaggagttgcgggaggtcaacatggagtaccgcgcccgctacgtttccgggatgcagggacccggccgaaccggctgccccgaagggaaatattgacctgttttctgtccaaaaccagcgcccctgctttttctccgcaggggcgcttttctatggctgaatcttctcccaagtcagcagttccgtaacataccgccggttttcacggtcatcgtttacaaagtcatatttttcgccggtctgggcgttcaccacgcataccgtagggttcccataccccataaacgccagcgactccgggtcttcctgcgggtagaagggcatattcagcgaaccgcgggtgattcccttcgccgcccacaccgggagcagcacaaattcctcgctctttcgctccgggtcgatcatagccatgtagccgaaccgcagttcctccagcgaataaacatagccgtctctgacccactgctcgaaaatttccaaaatttcctgaaattccaacaacggaagatcgtcctcatccacgcctacttcctttgggacgcaaaggttcacgccgattcgatcttccagcagcgcgccaagcgtcacgttggccggaacggacggcagaagttcctccgccttttcgccggggacttccagacggaagttctgaccgatcagatagggaatcccgtggaacgtgctgtaaaacgccattcggaaccggcgctgtccttccccggcggtttcgtcccgcagaagaaatgcttccagctccctttcctgcatttccgggacgtcggctttcagggtgcgaaggtaggtttccgccgccgtttcccggcagaggggttcggcctgcgccgctgaaaattccgccaccagatgattctccgtgttttcttccacgagagctgacgcgtccagccccgcataaggcccgccccacgtgatccgcacggccgggacagcttccacctccggcacgatgatgggtacgtcgatggtcactgtgtctccgtcccgcagatttttgccgtctccgtgccggatcacatactcccccacccagcgttcaggcagcgtttcgcgcagttcccgaatggaaacggctggctgcgccgcttccgccccattcatccacaggaaaatcgcgcataccgtcgccagaactccgcttcctttcatcccgattttctcccttgcttctttttttcccatttatccagacgaaccagcaggggaaaaagtttcgccgccatgtttttttcatccaaaaacccgcccggcgcagttttcttgcaccgggcgggaaattttctttttaccgcaccaccgcttcaaagctgaagcggaacacaagcggcttttccacattgagcagatattcctcgtgggttctcgcgccccagctgtcgtcgccgcccacgcccatctgctgccgggccacgcgcaccaccgtattgtataccggcggcaattcgttgggatgacgggcgttttccagctcgtggggggtatagggcagcacggaggtctccatgccgttttctgccgcgcacaggaaccgcaggccccggccgcgatagtccgtcacttccgcccagcgtacgccggtacggttgccacattcctggggcagcacgtagcgggagacgttctcctgcgccgtggtctcccacaggcccagcttcgcgccatggcagcgatccacgtagttttcgcccggccccatgccgtaatagcgcacctgatcgtactgcgcgtccagcgtgaacagcatcccgaactccggcatgtcgcccagttccttcaccgggtcgtagcgcagctccgcgtccacccggccgcaggggtgcacggtgtagcgcaccgcgcactgggccgccggggtggtgggcagcgcgtagagataggtgatgctcacgccgccgtccacctcgttctgcacctgcggcttgtccatgggcagacagtacagggacgccagcttccactgaccgtagcgctgaggcatccgattgccgtagtcgttttccgtgggagcgcgccagaagttgggcatgggcgcggctttcagcatctccacgccgcctgcgcggtaagagatcatcttgccctgcgttttgctgaacagcacgctgaaatgctcgccggtcacgcccagattgttgaagccgtcgaccacgcggaccggcgcggcgggaacggcggtcttcttttcctccacccgccagctgccctgaccgaaggctacctcatatcccgcctcggcccattccgtagcctcccgctggcggaaggacagggtcacggtgtactcgccgccccgggtctgttccgggaagggcacgggcagggtggccgtctcgccgggggccacgtcggtcttgatctcccgacgggcgatctccctgccatcccggctcagcgtggcgacgcaccgccacgcggcggtgctggtgaacaggctgtgattgcggatggtgacgctgtcccggctcacgtcggcaaacacgctctggtagttgtacttgacctcctgcatcttgggggactcgctgccgtcgccgaacacgatgccgttgcagctgaaatcccagtcggcggggcgttcgccaaaatcgccgccgtagaaatacgcgtccttgccgtaacgatccttcacgcggatgctctggtcgatgaagtcccagatgaagccgccctgatacaggggctcttcataggcgtactcggtatatttgtgcatcgcgccgttggagttacccatggcgtgggtgtattcgcacaggatgaagggcttgtcccggtgctcctccagatactgacgaatcttccagacgggggtgtacatctggctttccatatcggtggtgtcgttataccgccggtcatgggccgtgccctcgtaatgcaccagccgggtattgtccagcgcccggaagcgctggctcatggcgtagggcacgctgccgcccagcgattcgttgccgcagctccagatcaaaatggaaggatgattcttgtcccgctggtaggtggactcgatccggtccagcatctggtccttccagtcctcccggtctccgggaacggcgaagctcaggggcttttgccccgactggatgcgctcccacacgccgtgggattccagattggtttcggcgatcacatacaggcccagctcgtcgcacagggcgtacaccgcgtcgtggtcgggataatggcaggtgcgcacggcgttgatattgttccgcttcatggtgagcagatcccggcggatatgctccgccgtcacggcacggcccctctcggcgcagaaatcgtggcggttcgcacccttgaacacgatgcgcttgccgttcaggcacatcaggccgttcttcatttcaaaccggcggaagcccacgttctggcggatgacctccgtcacccgtccctcgccgtccttcaccgtcaccagcagccggtacagcttcggacgctcggcgctccacttctccggctcccgcacggccagctcggccacggcttcgccgtccgctccctgaacggcggcagaagcgatttcccgctcgccgtccgtcagacgaagttccacctgccacgggcccttgctttccatctgggcgcacagctgcagcgtgccgtcccgatagtcgtcatccagcagagcgcggatgctcagatcgcgcacgtgaacgacgggcacagcgtacagatacacgtcccggaacaggccgctgaagcggaagaagtcctgatcctcggcccagctgcccgcccaccagcggtacacccggcaggccaacttgttccggcccggcagcagatagggggtcaggtcaaagtcgctgggggtaaagctgtcgctgccgaagcccacgtaccggccgttgagccacagggccacgcagctttccgctccctgaaaggatacccgcaccggcattcccttcatgctttccggcagctcgaaggtcttcacatagcatgccaccgggttgaaacgctcgggaatttcgcccggctcaatatcctcccagccgtcccatgggtactgggtgttgcagtactggggaacgccgtatccctccagctgcacgtgggcaggcacggcgacgtcggcccagtcggcgcagtcgtactccggctgctcgaagccggggatcagctgcttttcattgacggcataaaaaaacttccaatatccattcaggctcatccgcaggcggttttccccggcctccagatcttccagacaggcgaaagcctcatggtcggaatgggcgggaaggcgattttcacagaagaactccgggtttttcagcttttcagaatgaaattccatctctggtatcctcgcttttttcgtcgttaggatcgaatttaacattggccgagcctctgttgtgttcaaagttctgcatttgctttccttcctcctgccgcccggaaaaattttcacagattcgatcccttcatttttcttgacctgcccttcggttttatgctatcctttgtgggcaaaacggcctgacggcgcgtcaggcggcggcggagcgtttttctcccgtcgcgaaacggaagggagttcaatcgttcatgtatcagaccggcgtatatttcggcagatttttacccccgcacagaggtcatctctatcagatcattgaagcctccaccaagtgccagaacctgatcgtggtgatttccgacaacgcggagcagacccgcgccctttgcgaggcggacgggctgccggatatttcctaccggctgcgcaagcagtggttttctcagcaggtacaggatatgccccacattcaggtgcgggtgctggacgaaagcgacattcccctctatccagagggctggcaggagtggagcaagcggatgcgcgaggtcgtgtgcgcgcccatcgacgcgtttttcgtgggcgacttaagctacagtgagacgctggccagctattttccggaggcgaaggtggagctgtttgaccccagccgcacccgctatcccatttccgccacggagattcgcaagaacattttgggcaactggcactacattctgggcgcggcccggcccttctttgccaagaaagtgctgatcgccggcacggaaagctgcggcaaaacgaccctgaccaagtgtctggccaagctgtacaacacctcctggtcggaagaagtgggccgctactatgcccgggactatctgggcaacgacgagaccatctacaccgacgaggacttcggacgcattgcgcacattcagtacgagcaggactaccacgccctgcgttcggccaacaaggtctgcttcttcgacaccgacgccacctacaccgactatttcagcgaactgtatatgggccaccgcaacgagctggtggagaagtacattgaccacacccgctacgaccggctcttctacctgctgccggatgtgcgctgggtggcggacggccagcggctcaacggcgacgaagaccgccgtcgcattctgaacgaccgtcttttgcaaatgtaccgggactacggtttcggcgacaagatcaccatcatcagcggcgactacaacgcccgtctccacaaagccatccaactggtggacgaccttctcaccggcgtccgcccttagcagggggtgaccccctgcaccccgtactgcgcgctgtgcgcgcaggggcgtagagggacatgcaggttggctggggttttaccaccgtggcacgacaggtgccacggctcgcgggtctggtgcaaattcccgctagttgcatagcaaagaccgccattcggcgatgggcctcatggctcgcttcaaaaggccagcgtggatttgatttcacgctggcctttggcgtggcaaaaaagtcaggccgcaccgttacatccccctacaagagcagagtatgccccacgccaactgtgccggggcagagcggcgataggcagcgaagggaaaaaggcccgcccattttgacggcggaaaaaggcgagcac

SEQ ID NO: 3291 - DNA, 9084 bp, Unknown
  16S sequences of unknown bacteria
ctgggacattttcttccggcagtaaaaatgcgacagatacatcctttggcgcaggctattccggaaagaccgagggcaatggctgggacgatgagacgaaagagacgatcggtcagccgaagccgaagaagaagccatccgaagcggcctcgggcggatcctcaggtggaccggcgacggtcgaaaagacgatgggcaaggccgaggcttataaaaagcaggagaaaccactgtccgagcgggtcgcagcgatggagtccgtgcaggcatcgaagaaaccgtggtggggggactggaaggatctgttcaagactgcgggatatctgatggcggctctgcttctcattgtggtgtggtggaagtcccagactaattcggattcgatttttgactggatcggacagaagatttccaggacgtcgagttctgcgaattatacttttgcttttgatgatgggggcggatacgtggatgagacagatgcgaacggaaatacgacctttcggacctattacaggacagacgatacgatcttttacaaatgtgaatatgatggatccggaaacgagacgaaaagagtatggtacagggcagacggcacaaaagagcgtatacttgaatatgattcacagggcaataacgtgaagtccacatactatgacgaggaagaaaatcagacctccacggtgacaacagagtatggagaagacggccacagctctgcccagacaacatatgattcggaaggaaggaaaaaatcctatacgacctatgaatggaccggagatgaattaaccaaacaggtggataccagctatcagcaggatggaacgatatccggataccgtgttctggaatgcgatgacaatggcaattatgtcagcgatacccagtatgacagcgagtggaatgtgacgttttatacgaccgactatcagtacgacgccgatggcaatttgctgcagtgtaccgagtacaacggagacggcactgtcagcaagaagatggtctactaccagcaaaacgtaggagacacgttctggaaggtgcgctggtacgacgctgacggtaatctgaccttcgattccggggcataggactgaacctggagggagagcattatgtacaagatgaaacgatgcccttattgtggcaggcagatcgacatggcggcgatcggcatgaaattcaaggtggcatacgggagtccgtttcgtacctgcccgaagtgccataaggagtatattgatcgggattaccaggaggtagcattggaaagtgcaaaggcaaaggcattcaggatgccgaaggtgcgtccggggatcctctggtttgaggtacttctgctctgctcgcttggcatgcagctgaccggtgcatatgcgtctatgacgacggtgattccgatcctcgcagtggcggtcattctccttgtgtgggagctgcatggaagcgcgaagcgtcagagcgaatgggagaaggagcttgcgaaggagcttgaggcatcgaaagagcggctgcaggatccggcgtatctgatggaactgaagaagctggactatccggtgacggaggacatgatctggcaggcaagaaaccgtgtatatggagaataacaaatggcaatcgcagtagcattccgctttcgtgagcgggaatattatcaggaactgaataccggagacgagctgctcatggggtgtcacaaaaaagacaccgtgcagattccgaattcgaaggaacatttactgattatgaaaaacgtgggcgatgaggtaaaggcggcggcagcagagccgctgcgtctgccgggttcgctcctttcgtgcaatgagctgatggtgctgagccggtctgtagaggcgaccctgtatctttccagagtgattccgcgcagtgccaaagcggtgaatcttccttataatggaagcatccgggtcggacggcatccggacaacgatatcgtcgtattttatccgatcatctccggacatcattttcagctgcagctggaggccgggcaggtgcacgtacaagatcaaaacagtacaaacggtctgtatctgaacggaaaaaggatctcaaaggcgatcatgaagtcgggagatgtgctttcgatctatacgtttcgctttatcctgcaaaatggaatgctgtattttgagaacatcggaagctcgatccgggtttctgaaaacatcgagaagatggaccggcctgcagcaccggacgtcgtcatgccaaaggccgcaccgcaaaaggccgtgcagccaaaggcgccggggcaaagtccggccgcaggcggtatcaagcctccgaaagcggtttcgaccgcggtctatccgcagtatcagctctccccgcgtatccgggagcagctgccgcacgagccgatcatcctttcttcggctccgggacatggcgcatcgatcggcgggcgaagaagcaattttgcctatctcatcagctccggcgcgatgctggccgcgagtctggcgacgggaatgctcactcctgccgcgcttctgatgcgtgcagccggtatgatttccccgctcgcaaatatggcgatgtacaataagatgagcaaggaagagcggcagcagctcgaagaatatgagaagatgcggcaggagcggtatcaggcatacatcgattcgcagaaagcgcgaatctgcaaggtggcggatgtgcagcggcgtattctgaccgcagaaaacccggctccggctgcctgcatggatacggtaaaatcattaaagcggaacctgtgggagcgcatgccgtcggattcggatttcctgaccgtgcggctcggcatcggaaaggtgaagctctgtgtcgaggtcaagagccgggcgaatacggacggctttgtgatggaggacgacgagctcgaagagctggccggtcagatcatcgaagagacccggtatgtggaaaatgtaccggtgcgtgtctcactgaaagagcagcgcacggtcggtatcgtgggcgaaaaggcggatgtcttttatcagctgcgcagcatgctcgtggagcttgcgaccatgcacagcttccgggatgtccgcatcattggcctgttcgaggaggactccatgaagacctgggggctcatccgctggctgccgcatatctgggatgagagcgggcaggtgcgctacatcgcatttgatgagaaacggcgccacaccgtctgcgaactgctcgcagatatgatccggagacgaaagcttgaggcacatccggaaaacggaacaaagcagacacaggtactgccgcattacatcattatcgcggagaatcagaagcttttgcaggatgagagtatttacgaggatctcgtatcaaacaaccaggcactcggtatcacgacggtcctgctggcatcccggctgtatgagctgccgcagacgtgtcagtatatcgtcgatctgtctgaggcatcggcgctcgcctatgagcgggaaaagtacgacgagcgttcaatgttccggccggatgcgcagattcataccgcagatttgaaggcttttgcgcggaagctggcggcagtcgagctgaaggatcgggcgtcggaggcggagctgccgtcctcgatcacgtttctgcagggatatcacgcgagacgcgtggaggatctggacgtattttcccgctgggagcggagcgaaccacaccgtaccctggcagcaccgatcggtatgatggcgggcaggaagctgttttacttaaacgtgctggatggcaatgaggcacacggcccgcacggactgctggccggaacgaccggttccggtaagagtgaactgctgcagtcgtggattctctcgatggcagtctcctatcatccgcacgatgtcaattttgtcatcatcgactacaagggcggcggcatgtccgatctgatggagccgctcccgcacgtcgtcggcaagatcacgaacatcagccggaacattgggcgctcactcgtctccttaaagagtgaggtgaagcgcagacagcagctcttcgcggaatacggcgtcaacaatatcgagaaatatcagagagcctaccgcaacggcgaggcgaaggagcgcctgccgcaccttatcatcgtgacggacgagtttgcggagatgaaaaaggaagagccggaatttatgaccgagctgaattccattgcggcggtcggacgaagtcttggtgtccatatgcttctggcgacgcagaagccggcaggcgtcgtgacggatcagatcagtgcgaactcccgcttccgcatctgtatgaaggtacaggatgtggcagacagccgcgagatgctgaaaagaccggatgcggcgcggatcacacaggccggacgtgcgtatgtccgggtcggcgaggacgagctctttgagctgtttcagtccttttacagcgcggcaggctattcggagacgatcacagataagatgagcacggaaaatctggtgcgcgtcgtcggtgtgaccggcaaccggatcaatccgctgccgaagaagaaaaaagaggccgtggagctggatgagctgacagcagttatcaaatatattaaccgtgtatgcaaagagcatggcattgagaaaatggcaggaccgtggctgccggagcttccggactggcttacactggaggagctcggggtcactggcggattcgacggcacttcgtggaacccgccaaagggtcttatcgtaccggtcgggcggtacgacatcccggcggcgcaggcacagggcgtgcaggcactggactttatgggcgtcggacattacggcgtatacggctcgaatgtgaccggaaagaccttcttcttaaagacggtactggtgggactgtgccggtactatacaccttcgcaggtgaatgtgtatgtcattgatgccaatacatggagcatgaccgagttttccggcatgccgcaggttcggcaggtgattttaaattcggaggcagagaagctgcagagcttcgcaaagaagatttatctggagctggaagcgcgaagaaaagcattccagaagcatgcggtcagctcgctggcggcataccgggaggcggtggcaaaggatactccggcgattgttgtgatgatcgaccagatcaagccgatgttcgagcagtcaccggagatgagcgaggtgctgcaggagctggcggcttcgggcgcgacatacggtatttaccttatttacacgacgcatacgagccttggcttaagctacaagttcacgcagctgatcaagggctgtgtgaccttccagatgccggaaaaaggcgattattcgcagctggtcggcccgattgcgggcatcagccttccgaatgtacagggacgcgcgctgatgcggggcaatccaccggtggcatttcaggcggccgtctatgcagatgcaaaggaagatacggcgcggcatgagcagattctcgcgctggcggaacagatgacagcggcgtggaatgcgtcacagcatccgcaggcagaggctgctgcagccgggcaggaaccagtggcagaggctgcggcagcggcaggagaagcgacctaccatggcgaagtgacttatcacggcgaagcagagccgaaggcggcgccggtaccggaaaaagcagaagagcagaactacgataaccgcagctgcattccgatcggaacgtattcggacgatatggaaccggcctttctggatcttgcggagcagacgatctgcctgatctgtgcggagcatccggaacatagcagagcattcctgaaacggctggaaggcacgcttcggaaaaagccggaggagaacagcgtcgttcttctgaacgagatgacgtatgccgaagtccttccggatctgaaggaaaagctgaatgagcgtctgaagcttctgaaccagaataagaaaaagaccggcttcgttgaaaaggactggattttgacctacatgcagatatgcgtactgattgaggatctgccgaagctgatggcagtgcttccggaggccgatcagaagacacttcggatgatcctctcaaagtcggcagggcttggggtcattgtgttgatggcggtaacaaaggaagaactgctggcagagaagaaggacatcgtactggattttgcgatgaagaagcagtttgcagtgatagtggatggcaatccgatcgagtattccgctttccagatagaggaagatgccgttatggcagatatgctgctggatgaggatgagtcagcggtggtacaggatggaaggattcgctttgtgagaagcgtctgagaggagaagcagatggtatgagagcatttattattgttacggtgcaggacgagtcgcacagcttcacctacgacgtggaggtgccggtcaatgtcccggcgcgcaagctggcgggtgatatcgtcgaagcgttgaattattaccaccgctcgtcaaagggcgaaaagctgctgccaaaaagcagctacgcgatcgcgaaccgacgtaccggaaagacgctcgacccggcgaagacgttttatgaggcgggtgtctggcagggggatgagctggtgctgctgtgatagttattctcgtgaggatcaaatgtctttatgattgcaacgctgtaagatagatagaatgaaactaaggagggagaccatgaatcagaaaacggtgctgacaccaatgcagttatttttctgtgcaaagctgatggatgcggtatactatgattatgcatatctggcggcgatgccggatgtacaaaaggagtacgcgctgcatgagcaggagacgatggaggagctggaggatcagggaatgatcgagcgcgacttcgatgacaatgtggagatggcagaggacttgcgcgagctgctcaccccggtctttttgggagaaaaagaaggaagactggatgtggaaggaaagccgtcttgcaggttccacagcaaggatggagtgattacgatgactgtgctggaaaatggaaagattacgatttccggatcgtcagagggtgagatgagagtgcttttaaaaagcgggcaggacatcacggtgcatggcgcggatgtaaaggtcggccagacagccagatcgtatacagcagaagagctgcaggatccggcagctctgaatgcggcagtacagttactgaaaggagaggtgtgaagtggcaggaaatatttatatcaatgaggatgcggcaaatgcggatatcgcaaagatccgtgcagcgataacccgactggaggaagcacagagcagtatcaaaaagctgagcaacagtgctgataatatgaccggtcagaccggcgaggcgatcaaggagaagtgcaccacgctggattcacagatcaggtccctgaccggaaacttaaattatacgatccggctgatcaagggagcgatacaggagtatcagcagaaggatgccgagatggcgagcgcgattaagagcggaggaggagtttgattatggcagacattaagattgattacgacggactgacgcaggcggcatcgtccctgaagaatctggcgacgacctacgacggactttgcacccggatgaagacgatgacaggacagatttcttcgacctgggagggcagtgcgagcaaggcatttacggagatgatggataaatattatcagcagggctcgattattaagagtgtcattgatgccattgaaggttatgcgacgacgacctgtgcgcattttcaggaagtcgatcaggagtgcgcggcacagatccggaattcgttttaaccggatatttgttttgctgaaataggaatatagaatcgaatgctatggaaaggaataattatgttattacatattgatacagcggttttaagaagtgcagtatctgttgcggagcagacgaattcgtcgatctccgatgcagcatctcttttgaaccagatcacagttcatgaggactggatctgtaaagagcgcgatcagatcaagcagatgacactggcgaataagcagacagcgcaggatatagagaaccgcgcagagaatttttacaaggcgattcagaatgcttcccagaaattcgacgaaaaggagcaggagatcaacacgcgcatcaatggtgtggacgatatcatcggccaggtgatcaatgttgtgccgggtattaccggaggcagcaccggcggcgcagctacggatgcaattgcgatcagcagctcgaataccggccacagcaatatttcgatcggtaacttcaaaaatatattcagttcattggagggataagagatggcaggaacggatattaaattaacgccggaggagctgattgcccagagtacggagctgacctctttgcagacggagtttgagtcggtattttctcagctgacgagcaccttaaactcgatgaacgacagctggagcgcgacattagccggaaattttgccgggaaaattcaggcggctcagaagtcctttaccagtgtggcaaacatgctggcaaacggctcctctgcagcacggctttccgcgagtacgtttgcatcaccgggtacggtgctggcgatgctctcaggtgctgatacttccggactggattcgctttccgatctggcaggctggatcagcgaaaacggcgatcagctcgggacgcttggcaatctcgtaaaaagtccggatgaactgtttgaggctttaagtggaatgacagggattgattccgatacgacaaaggatgtgcttggaaaacttctgtcaggcgattacgagggtgccctgaaggtagccggagataaaggcattgagaccgtcgctggatggatgtcgaatggattggatccgagcagctgggtcggaaagctgcaggaaatgaccggcagtacgctcggtctggatcttggactggacaagctggaatcctcttactatgagcatgtggcaaagggagtacttggcaatgcagttaatatcgttaaggatcagtattctgagggcggcggagatccggcctatcagctgaatcagctgacgcagtttgcgtggaatctggggccgggtggagtaatcgagacagcgggcgacgcagcctttgatgtcgtat

SEQ ID NO: 3292 - DNA, 2544 bp, Unknown
  16S sequences of unknown bacteria
ggcgaggtcgcggagatgtgcggctacagcgacgtctattcgttcagcagagcgttcaagcgcgtctgcggcgtttcaccatcgaaattttaattctgaaaggaatttataatatggaaaagtacagaaccctcgtgataggctgcggatggcgcggatcactgcattcggaggcggtcgcgaaccacccgcgcttcgacctcgtcggcacctgcgacattgatatcgcgaaagcggacaatatcgcggacaagtacggcgtcgacaaatcagcgagattcgtctcgagcgaagaggcgataaaaactctgaagccggacgtcgtgataaacggcgcgtggcccggcgaccgctgggtgatctacgaccagtgcgcggaaaacggcgtcaggcaccttgtcagcgagaagcccttcgcgaaagagcgcgcgggcgttctccacatgaagcacacggcggaaacgtcggactgttccctgtccttcacgcaccagagaagattctcgcccggaaacatccggatccgcgagcttttagcggcgggagcggtcggaaaggtgaccagacttgacctgctcgcgttccggcatctgctcgactgcggggtgcatacgctcgaccttgtctcgtcctacttcggggagataaaggtgaagcgcgtcctcggcgcgctcgacatgaagggcatggtaaactggttcagggtccccgcggagggcagcttcaacggcacgctgatctacgacgcgccggaaggaagtctcttctcgggctacaataacgagataacggcgtctatgctcgtcggagcgaacatgggcagaccggacgagagcggcgtgaacatctacggcacgcgcggcttcatggagctcggctgggagggcaacctgttcagatacttctcggcggatatgcagtcagagctcgacgagcacgcgaagctcacgcagggcgactgcgagagcggcaacatacaccgcatgtgggattacctcgctgacgtctttgacggcagagagaaggacaatatcctcgactggcgccacggctactacgcggcggagatactcttcgcgctctacgagtcggtaaggcgcggcgagtggattgacatggccgagtacgaggcgtcggcggcgaccccggatgagcgcttctcacccgacccgttcggagacatactgaaagcacgttcataaacaggcgcgcccggacgccatcggaatatccgggcaattttcagaaaagaaaaggaaaaatcatggaagaaaagaaaccgacaaaagaagacacagcgagagtaaagggactcggctgtctgcgcgacaagcggtatgacgacgttttcaacgtccgagtgatcaccggctacggaaagctcgacaccgccgggatgcgcgcgatatccgacgcggcggagcgcttcggcacaggcgaggtcgcgctcacgacaaggcagaccgtcgagattcagggagtgaaatacgagaagctcgacgagctcttcgcgtttctcggtgaaaacggtctgtcgaccggcggaaccggcgcgaaggtcagaccggtcgtctcctgcaagggcacgacctgcgtctacggacttgtcgatacatattcgctcgcgaagaagatcagcgaaaagttctatttcgagatgcacggcaccgcgctgccgcacaagttcaagatagcggtcggcggatgtccgaacaactgcgtcaagccgcagctgaacgacctcggcgtcgtcgggacgagacgtccggctctcgacacggagaaatgccgcggatgcaaggtatgtcaggtagaatcggcttgcccggtcggcgcggcggtcaaggtcggtgacaagataacgatcgaccgcgaaaagtgtctgatgtgcggtcgctgcacgaggtcgacgccgaacagcgtcggcgcgatatgtccgttcggcgcggtaacgccggaaatcaccggataccgcgtcttcatcggcggcagatggggcaagggctatcgcatagcgaaaccgctcccggtcatcctcacgaccgaggacgaggttatcggaacgataacgaaggtcatcgacgtctacaaggcgaacggaaacaaaggcgagaggttcgccgacacggtagaacgcgtcgggttcgacaagatatccgccgaaatactcggcaaataaaaaagacgggagctccgctcggagttcccgttctttttgttttatcagaatctgacagccgcggcgatgacctcggcgaccgtcacttcacctgcgggtctgagggttctatcctcaaagccgctgatgattccgttcgacaccgcccagttcacggcgtcgattgcccagtcggacacttcggaaatatcggtgaaatcagccgaagcttcaacgttttccgccctcgccacgcggaagagcatgacggcgagctgctcgcgggtgatcttctgatcggcgcggaatgtttcgtcctcaaagccgtttacgatcttctcggacgccgcccatctgaccgcttcggcgatgtcgctctcctcgtc

SEQ ID NO: 3293 - DNA, 7961 bp, Unknown
  16S sequences of unknown bacteria
tgccgatatgttgggcagttatgatgtgaaatactgtataatcggccatagcgaaagaaggcagtatttcggcgaaacagacgaaacggtaaatttgcgccggaaaacctgtttaaaacacggcatacaccctattatatgcgtaggcgaaaaccttgaacagcgtgaaaaagatattacaaaagaagtaataaaggggcaaattgaaaaagatttggcagatttcaccgaagaagatatgcttaacacaattatcgcctacgagcctatttgggccataggcacaggtaaaaccgccactgcagagcaagcggaagaagtttgcggatacatccgcagtataattaccaatttgttcggaaatcaaaccgcagaagccgttacaatccaatacggcggctctatgaatgccaaaaacgcaaaagaactgctttcaatggaaaatatcgacggcggacttatcggcggcgcatctttaaaggcagatgactttgcacagatagtttcccgggttgaataaggagtgatttatatgaaaaagccattggttctatgtataattgacggtttcgctttcagagaaagcgccgagggcaacgccataaaggcagccaaaaagccgaatttagacagaatattcggcacatacccgataaccacattaggtgccagcggtttaagcgtaggcttgccggacggccagatgggcaacagcgaagttggacacacaaatatgggtgcaggaagaattgtctatcaggaattgacaagaatttcaaaatccataaaagacggggatttttttgaaaacgaaactcttaaaaatgcgattttaaaggcaaaagaacaaaacaaaacagtgcatattatggggcttatgtcttccggaggtgtacacagtcatattgaacactgctttgccctgattgatatgtgcaaaaaatacggcgttgataatgttgtggttcacccgtttatggatggcagagatgtaagcccaacaagcggcgttgaatttttaacggaacttcaaaataaattaaattctgccggtatcggcaaaataggcgctgtctgcggcagattttatgcaatggacagagacaaccgctgggatcgtgttgaaaaagcctacaatgccattgtaaacggtgagggtgaatattgccacgacccggtaaaacaccttgaagaatgttatcaaaacaatgttacggacgagtttaccattccttttattgcaaacaaggactgcacaatcaaagacggagacagcgttatattctttaacttccgccccgaccgtgcaagagagataacaagagcccttgttgacaccgaatttaccgggtttgaacgcaaaaccgataatttacacttaaattatgtgtgttttacacagtatgacgcatctatgccaaatgttgatgttgcatttaagcctcagagccttaaaaacacattcggcgaatatatcagcgataaaggcttttctcaacttagaattgccgaaacagaaaaatatgcacatgttacatttttctttaacggcggtgttgaggcgccttacaaaaatgaggacagagcccttatcccatctcctaaggttgcaacctacgatttacagcctgaaatgagcgcatatcttatcacagatgaacttttaaagcgcattgacagcgacaagtacgatgttataattttaaactttgcaaactgcgatatggtaggccacacaggcgtatttgatgccgccgtaaaggccgtggaaaccgttgaccggtgcataggcaaactgtatgacaagatgattgaaaaagacggtgtgttgcttataaccgccgaccacggcaatgcagaccaaatggttgcagaggacggcacaccatttacacagcacacaacaaacagggtgcctttctgcgttgtaaattatccctgtgatttgcgtacggacggggttttggcagacattgcccctacaatgcttgaaattatgggcgttgcccggccggaagaaatggacggaaaatcaataattaaaaatttctaaaatatttacagaaaagacaaagagcttttaaaaagttctttgtcttttaattttcttatttttttattaaccttatagaaaatatgccgattatagcttataattaaatgatggaaaaggagtgtgaagcatatgtacaaaatatttttggtcgaagatgacagcggtatagccggcgcaattacacagcgggcaaaagcatgggattttgatgtttacacccggcaaaatttacatgatatacgagaagaattcgcaagttttaatccccacttggttttgcttgatatttctctccccttttttgacggctaccattggtgcggcgaaataagaaaatcatcaaaagtaccgataatctttatatcctccacagccgaaaaaatgaatatgataatggcaatgaatatgggcgccgatgattttatagcaaaaccatttgacataagccttttaatgaccaaaatcggtgcattactgcgcagaacctacgatttttcccctgccgcaaaaatttatcggcaccgaggagcaatactaaacccggcggacagtacatttatttacaacggggagaaaatttcactttccaaaaatgaattccgcatactgcttattctgatggaaaacaagggcaaaaccgtaagcagagaaaaaatgatgaaagccctgtgggaaaccgactattttgtggacgaaaacactctttcggtaaatgttaaccgtctgcgcaaacgccttgaccgggcgggtctgcatgattttataacaacaaaattcggtatggggtatattatagaggattaaattatggctcttataaaaagatatttaaaagaaaaaagaaatgatatacttatattcattttgacaatcggcatattcgccatgtttatggctctttatttactgccttttaaagccatagtttacccggtgttactgtcggtgtttttgtactccggatatattgccgttgattttataagtgtaaaaaacaagcatgatatattaaaaaatattgcaaattcaccggatatgaacccggagcttttgcctgcccggcacagtatagaaagccgggatttatacaaaattatcgccgcattaacggaaaaatacaacgattttaaagccgacagccggcggcggtataatgacatgatagattggtacaccatgtgggtacaccaaattaaaacgcctatcgcttcaatgaaattgcagttacaaaatcgggatggggaattttccggcggcctttcaaacgatttattccgaatagaacagtatgccgacatggtacttacatttttaagggtacattccgactacaacgactatgtcataaagcaacgggatcttgataaaatcgtcacttgtgccgtaaaaaaatattccggcgaatttatattgcgaaaaataaaacttgtgtactcgccccttaataccctgattgtcaccgatgaaaaatggctgatgtttgttgtggagcaggttctttccaacgctttaaaatacacccatgagggcagtatatcaatatacatgagtgataaaaacaaactttgcatcaaggatactggtatgggcattgccccggaggatttgccaagaatttttgaaaaaagctacacagggcaaaacggcagaacaaacagaacatccagcggtttggggttatatctgtgtaaaacaatttgcaataagctggggcataaaatatatgcaaaatctactcttgggcgtggcacctgcataacaatagattttggcaaccaaaaatccgactttgagtaattcttacaaaaatgttagatttacatggggatttgtaagacaattctatggttttacaatcccctgttttgttacaatatagtcagaaatcacaaggaggatttttgtaatgagtattttagatgtacaaggcctgcaaaaaacttatgtgggccgttttggaaaaaacaaaacagaagttttaaaaaatgttaattttaccgttgaaaaaggtgaatatgtggcggtcatgggtgagtccggctccggtaagacaacgctgcttaacataatagccggcattgacagccccaccgcgggcaaggttttaatcgacggaaaagaattttcaaaaagcagtgaatcccaggcggcagcctaccgcagagataatttgggatttgtgttccaagagttcaatcttcttgatacctttaccatagaggacaacatatttttacctcttgttttggcaggtaaatctcatgaagagatggaatttaggcttgaacccattgcggaacagctgggtatcactcaccttttaaaaaaatatccttatgaaatctccggcggacaaaaacagcgccgggcagttgcaagggcattgataacaaacccaaaacttattttggcagacgagcctaccggcgctttggacagcaaagccacagacgagttgctaaacctcttttccgatataaacgaatacggacagacaatttttatggttacccactcggtaaaagccgcaagccatgcttcaagagttttatttataaaggacggccgggtattccatcaaatttataagggcgacaaaaccgacagccaattctacaccgttatatccgacactcttactttgcttatgacaggcggtgaagaaaaatgaagttaggtttttaccccaagcttgccgccgacagtataaagaaaaacaaaaaattgtatctgccgtacattttaacctgctgcggcatttctgccatgcagtatataatgttttatctgtcgtattataccgaaaactccggtatgatcagcggaagaactataaccacaacccttaattacggcataatcgtaatagtaatattttcaatcatatttttaaattactccaattcttttcttttgagaagaaggcaaaaagagttcggtatttacaacattttaggtatgagcaagaaaaacatcactcatatatacctttgggaaaacataattatatatcttatctcaacggttttcggaattaccattggaattgccttttcaaaatttgcggaattacttcttacacgccttataaaggacaacatttcttatgattttaccataaacaaagacttgatctttgtgtgtgccgctgtatcggcttttgtgttccttttactttttgtaagaggaataatagccctttggaaattgaacaccctttcgctgatgagaagcgaaaatttcggcgaaaaaccgccgaaagcaaattatttgatagccgttatcggcgttttaatgctctgcgtcgcctactatatagcattaaccacagaaaagcccttggacgccattgtgatgttctttgtggcagtaattttggttgtaatcggcacatacatgatttttattgccggctctgttacaatgtgtaaaatattacagaaaaatcaaaagtactattatcaaaaagaccactttgtggcggtttcttcaatggcgtacagaatgaagcgcaacggtgcagggcttgcctctgtctgcattttaatcacaatggttttggttatgatgttcggcgcaggcagtttgtacatcggcacagaggacagcttacacaccacatatccccgtgattttacatttgtaatgtatgcaggcggcgaccaggaaacagccaatgaaaactttaatgtattttgtaacgacatagatgaattttttataaaccataatgacaatcgtgaagatatacagaaatatacctatgcccactacaatatgaatgtaaccgacaacgtttttgaccgggggttcgataaaccggcggataaatatgcggaagtttattttatctcccttgcagactacaacaaatactgcggagaaaataaggttcttgaggacaaccaggtacttataaacacgatatacactcagtacagctattcaaaccttataataggcggagaaagctatgacataagagaatttgtgccgacagacgatttgtttccaaacagagataaagcctatttaacgcctaaaatttacattattgcaaatgatataaacaaaattataagcggtttcgacaacgaaatcactcaccacacaaaatttatatacagatttaactcaagcctttcacaagacgagcaacgtgggttgtttaacgatttgtataacaatatggttgctaacaataaccggggcaagtatggttccggcacatcctgggtcgttgaaagccttgcattggacagggcggatttttacagcatatacggcggtatattcttcttgggcataattttgtccacactgttccttgtagccacagttttaataatctactttaaacaaattgccgagggctacgaggacgaaagtcgttttgcggtgatgaaaaaaatcggtatgacaaatcgggaaatacaaaagaatgtaaattcacagatgaaaacagttttcattctgcctctcgcctttgcgatacttcatctttgctttgcggcaccgattataatgagaatgctcaccatattctcggtagaaaacacaagcctaatcttaattacaatggcggttattgtggcaattttccgggtgttctatataactgtttataaaatcacatcaaatgtatattttgaaattgtaagtaaaagcaacataaaaaaatacggctcaatttgagccgtattttaatttaattcaattaaagttctgcaaaatatttgatagttcttaccatctgtgatgtgtaagaattttcgttatcataccaagaaacaacctgtacctggtacaaatcttcatccaattttgcaaccattgtctgtgttgcgtcaaacaatgaaccgtatctcataccgattacatcgctggaaacaatcgggtcttcattgtaaccgtatgtctcgcttgcggcggctttcatagcggcgttaatgccatcttttgtaatatccttgcctttaacaacagcaacaagaattgttgttgaacctgttggaacaggaacacgctgtgcggaaccgataagtttaccgttgagttccgggataacaagaccgatagcctttgcagcacctgttgagttaggcacaatatttgcagcgccggctcttgctcttcttaaatcgccttttctgtgtgggccgtccaaaatcatctgatcccctgtatatgcgtgaattgtactcataataccggactgaataggtgcgtaatcgttaagagccttagccataggtgcaaggcagttcgttgtgcatgatgcggcggaaataatcgtgtcttcctttgtaagaatgttttcgtttacgccgaatacaactgtcggcaaatcattacctgccggtgcggaaataacaacctttttagcacctgcgttaatgtgagcctgtgattttgccttagatgtgtaaaaacctgtacattccaaaacaacatctacgccaagttcaccccaaggcaaattattggcgtcagcctctttatagattttaagagttttgccgtcaactgtgattgtgccggcttcgtcatctgcggaaacagtgtgaagattttcaccgattttaccgcaataactgccctgtgccgtatcgtatttgagaagatgtgcaagcatcgacggctttgtcaagtcattgatagccacaatttcgtagccatcggcaccgaacatctgtctgaatgcaagacggcctatacgaccgaaaccgttaatagcaacttttactgccataataaaattcctccgtaaaatataataaaattgcttaataaacttgttaaaaatttaacttacatatatcttatatcaaaatcgacattttgtcaacactgtctttttgaaattcgacaaatctcgcttttatttttcctcaaaataggtata

SEQ ID NO: 3294 - DNA, 15343 bp, Unknown
  16S sequences of unknown bacteria
tcaactttattgttttaccaaagaattattgatggatgtgccccttcccagatttcttttgggctaacaggcgtgtagcagcacaatctctacttcaataattctttaagtaatttttcatgcgggtaacaggacttgaacctgcacggggtgtcccaccagaacctaaatctggcgcgtctgccaattccgccatacccgctcaacgaatttatcttatcatctgtgactgaaaaagtcaaatcaaaaggcactgctcatcgcaatgcctttttcacataattacagttcatctacaccattcgcaaaatcacgcttgcagcgcttttcactgctacgtgactgcctgccttactgctccagcaccagttttgccgagccatacataccggcatcattaccaagtgttgccagcacaaattttgcgccgcggcagccgcggaaggtatatttgagatagtatttctttatgtagtccaggatgaccgggcctgctttggacacgccgccaccgatgacaaatacttccggatcaaccgtagatgccacattggcaagtgccagccccagatattttccgaaacgttctgccacatctttggcaaatgcatcgtctgcttttactgcatcccagatatctttggcagtcatggtctctggctgaagagttgttcccttagtatcagcgccctgacggatcatccattttgcaagagtcaccattccattggcagatgccagctgctccaggcatccctggttgccacatccgcaattccagtccacagcatcttccacatgaatgtgtccgatctcgccgcctgcgccgttggctccggtaatgatctttccatcaatgatgattccaccgccgacaccggttcccaatgttaccatgacaccgctcttatgtccggctgctgcgcccttccacatctcccccagagctgccacattggcatcattgccgcccttgctcacaaggccggtcagttcggtcagttctctggtgacctctttatagccccagccaaggtttgcggtatgcggcacaatgccctctgcattgatcggccccggaactccgataccgataccagtcactgaatccttctcaattccacgctcttccagcttcttctgtactgcttctgcaatatccggcagaatggcttttccttcattctcggttctgctgggaatctcccatttttccaacagctcaccatccacactgaacagtcccatcttcacagtggttccgcccacatcaattccaaaacagtattctttcatccctttatcccccatggtcctattttttattgcggctaatactctcctgcactctgcgatacagctcctgagctgcattatagcccatcttcttctgtctgtggttaacagccgcagactctacaatgatcgccaggttccggcccggacggatcggaatcgaatgacaggtcactttattaccaaggaactcggtgtattcctcattgagtccaagacggtcgtactctttgtccttgtcccactcttccagtttgatgaccagatcaatgctctgggtctcacggacgctttcaacaccatacagagtcttcacatcaataataccgataccgcgaagctcgatgaaatgtctggtgatctccggtgaggttcctaccagcgtatcatcgctgactttgtggatctcaaccacatcgtcggtgatcagacggtgaccacgcttgatcagctccagagccgcctcactcttaccgatgccactctcgcccatgatcaggataccttcaccatagacatccatcagaacaccatggatagaaatacatggtgccagttccacgccaagccagcggataacttctgccatcaggtcagatgtgatgcgatggctggaaagcagcggcttgtgatatttctttgccagttcgatcatatcctcatccggttctgtccgggtggaatagatcacacacggaatatcgctggataaaaactgctcataattggccagctttacatctctgtccagactcttcagataggtatactctacatatccaatgatctgtacacgctcacttgcaaaatgctcaaaatatccggcaagctgcagagccggacggttgatctccgggctgctgatctcgatctcatcggtagatacttccggcaccagatttacaagctgcagcttctcgatcatcttatttaactttacggatgacatattctgtactccttttcttcacgcggctgaaccgtttccagccttcatatagtaaaagtttaacacgtttaattctgcttcgcaacatggaaaaactcgtagacctgacgggctgacagactgttcatcccctctacctgcgccagttcttcctcgctggctgccttcagatcatccagagtctggaatgccttcatcaatgccctccttcttgccggaccaatacctttgatatcgtcaagcaccgaatgcacctgctccttgcttctaagagaacggtgatattcaatggcaaaccggtgggcctcatcctgaatacgtgtcaccagacggaagccttcactgtcccggtcaatagggatctccacattattaaaatagatgcctctggtcctgtggtggtcatcctttaccataccacatacaggaacattcacaccaactgcatccataaccttcagcgcgatgttcacctgcccacggcctccatccatcatgatcagatccggataagtctcataatgagagagtcttctggtcagcatctcttccatactggcataatcatcagccccctgtaccccacggatccgaaactttctgtaatcagaccgcttcggttttcctttttcaaatacgaccatagagccgactgtctggaaaccgctgatattggatatgtcgtatgcttccactctggatatctccggcagattcaaaagacctgcgatctccttcatggcaccgatggttctcccttcttcgcggcggatccgctctttatcctgatccaacaccatcttcgcatttttctgggcaagttccaccaacttctccttctcacccttcttaggcacacaaatatgcaccttctgacctttccgctcgctcagccaactctcgataacttccgcttccccgatctcatactgcatcatgatctctctgggaatatacggagttcctgcataaaactgcttcacaaatgctgccaggatctcttctttcttatcatctgccgcaatatgcagacaaaaatgatctcgtccgatgagacgaccatcccggataaagaacacctgcactaccgcatcttcccggtctttcgccatagcgatcacatctttatcttccatatcactgttcgtgatcttctgcttctgcgcgatcttcttcacacttcccagcagttcccgatattcaatggctttctcaaactccatctcttctgccgcctgctgcatcttctcttccagttctttcaaaattggagcataatttccattgagaaaatgtaatgcttttttcacggattctccgtattcttctttggaaatgtagccctgacagggggctggacactgatgaatgtgatagttcagacagggccgttcctttccctgcatcttcggaagctgccggttacaggtacggattccatacagcttgtggatcagatcaatggtatcctttaccgcagctgcgctggtatacggtccatagtattttgctttgtctttgtacatctgtctggcaaacagcactcttgggaaatcctcctgaaccgttaccttgatgaaaggatatgccttatcatccatgagcatggtattgtatttgggccgatgctccttgatcagattgcactccagaaccagagcctccagctccgaatccgtgataatatactcaaagcgcgcaatatgggtgaccatctgctcgatcttcacccctttattgcggctggactgaaaatactgccgtacacggttcttcagcgaaatggccttgcccacatagatgatcgcatcccgctcatcatgcatcagatatacgcccggcttggacggcagttttttcagttcttcctcaatattaaatgccataattatttactctgcaaaaatcaattcttcctggtgatattcatttgcttcatctctcaccttatggaagatctccataaattctttaccggtaatggtctccttttcgatcagaaatgcagagatctgatccagacactcacggttctctgtgagcagacgttttgcttcctcataagcttccttcagaatccgcataacttcttcatccacataggatgccgtctcatcactgcaattcaggacacttccattgtccagatacatgctctctctggattccagtcccataagaccgaacttctcagacataccatactgggtcaccatggctctcgccagattagtcgcctgctggatatcattggatgctccggtggtaacagaatcaaatactacttcctctgctgcacggcctcccatgcatacgaccagacgggcaagaatctctttcttggacagaaggaacttctcttcctccggtgtctgcagtacatagccaagagctccgctggtacgcggaataatcgtgatcttctgtaccggctcagcatccttctgaagtgcactggtcaatgcatgaccaacctcatgataggataccactttccgttcttcttcacttaagatcttattcttcttctctttacccatcatgaccacttccatggcgtcaaacaggtctttctggcagatggcttttctgccattcttgacagccatgatagctgcctcgttgatcatatttgcaagatctgcacctactgccccactggtcgccagtgcaacagctgccagatctaccgtctcatccagcttcacatttttcacatgaaccttcagaatgtcctcacggcctttgagatccgggcgctccacgatgatccggcggtcaaaacggcccggacgcagaagtgcctgatccagcacctctggacggttggttgccgccagaatgatgcaggcctgattgctctcaaatccatccatctcagccagcagctggttcagggtctgttcccgctcatcgttgcctcccatacgagaatcacggctcttaccgatggcatcgatctcatcaataaatacgatacaaggtgcatttttcttagcttcttcaaacaggtcacggacacgggatgcgcccacacctacgaacatttccacaaaatcagaccctgccagagagaagaacggcacatgtgcttctcctgccacagcctttgccagcaatgtcttaccagttccgggagggcctacaagcagtgcacctttcggaagctttgcaccgatctcggtatatttttccggattatgaaggaagtcaaccacttccacaagagattcctttgcctcttcctcaccagctacatccttaaatgtgacacctgtctctttctcaatataaaccttggctttgctcttaccgacgcccatgacgcctccgcctccgcccatacggcgcataaatccgctgaacagaacccacagaagaatcatcggtaccacaatggacagaatattcagcgcaatgctgatcatagcatcattctggatatatggctggatctccacattcttctccctcatcaaaggcagaagctctgtatcattcgccatcttacctgtataataagtaagcgttactccatctttatctttttccttcggtgtgatcttccacgtagaacccgtatcctccacagaagctacctcatctgcctccagcatatccaggaatttatcatatgtaatctcctgggatgttgcctgtgtgtactgattgttaaacagtgcccacaccaggatcgcagctattacaaagacagcaaacatcaacatattctgtgtgtttttcggtgctttgccgccattgttatttccattccctttattgtttgggggtgtattgttattcatctttctcctccttgtgcgtaacacttcttattatagtgaaccttcttttataaatcaatacacctgttcgcaaaaaatccgtactttttataaaataagtataaaaaaacaaaaatttttaaatggtatttttattttagaagcgatataatataaaatgtttttttaattacattcaggaggatttaaccaatgccagtaaaatacgtatttgtaacaggtggcgttgtatccggtcttggaaaaggcatcactgccgcttccctcggacgactgttaaaagcgcgcggttacaaagtaaccatgcagaaatttgacccttatatcaacattgacccaggtaccatgaaccccgtacagcatggtgaggtattcgtgaccgatgacggcaccgaaaccgatctggatcttggacattacgagcgttttatcgacgaaaatcttgataagaattccaatgtgaccaccggaaaagtatactggtccgttcttcagaaggagcgtcgcggcgattacggcggcggaaccgttcaggtcattcctcacattaccaacgaaatcaaaagccgattttatcggaattacacatccgaagatatgcatatcgccatcatagagaccggcggtacagtcggtgatattgaaggtcagccgttcctggaagcgatccgtcagttccagcatgaagtcggtcatgaaaatgcgatcctgatccatgtcacactgatcccttatctgaaagcatccggtgaaatgaagaccaaaccgacccaggcttctgtcaaagagctgcagggtatgggaatccagccggacattattgtatgccgtaccgagcttccgctggaaaaaggcatcaaggacaagattgctctgttctgtaatgttccgaaagagcatgttcttcagaacctggatgtggaatatctgtatgaagcaccgcttgccatggaacaggagcatctggcacaggctgcctgcgaatgtctgaacctgccgtgtccggaaccggatctgtccgactggaccaatatggtagataagcttcgtcatccgaccacagaggtcaacattgcactggttggaaaatatattcagcttcatgacgcttacatctccgtggtagaagcactgaagcacggcggtatcgacaatcgtgctgttgtaaatatcaaatggatcgattccgagaccgttactgaagaaaatgcagatgagctgtttggtgacgtgaccggtattctggttcccggcggattcggaagccgtggtatcgacggcaagatcaccgctatcaaatatgcccgtgagcataagatcccgttccttggcctgtgccttggcatgcagctgtccatcgtggaatatgcaagaaatgtagccggactggacggtgcccatagcatcgagctggacccgaatacccagtacccggtgatcgcactgatgccggatcagaacggtgtggaggatatcggcggaaccttacgtcttggttccttcccatgtgtgctggataagacttccaaagcttacgaactgtatggcgaggaactgatccatgaacgtcaccgccatcgctacgaggtcaacaacgattatcgtgcgatcctgaccgagcatggcatggttctctccggtctgtctccagatggacgtatcgtggagatggtcgaactgaaggatcacccgttcttcatcgcaacccaggctcatccggaactgaaatccagaccgaaccgcccacatccgctgttcaaaggatttgtggaagctgctgtgaaagcaaagaaataaatcataacaaaaaagctgccgtccgccggttctcccggcggacgacagcttttcttatacatttatgcgaacagtttcttaatctcacctctggaacctttcaaggatccctgtaccatctccggctttccgccgccttttccgctgaatgcctcgttgagtttttttgcaaactctctaacatcggtggaactgcttccaatgatatatcggtaaccgtcctcatctgttcctatgaatgcagcgcagattccctgacagcactcgcaggcatcatttacaaaattccgcacagcaatgttgtccagttcttcttcaaacaggcagacaaatttatcatccgccttgatctcttccagcttgcctgccaggtaagaagcctgcatctgattaagcttcatgcggatctggtccatctgctctttcatatgaagaaccgcatccccgaccttctccggcggtgctgacagagctatcgatacggcggtcacaccctcctgcttcttccggtaatcttccagtgcccggtcaccgcactgaatagtcatacgacagccgcctctgtggcggtcacagctgatcactttgattatacccacttcaccggtgcggcttacatgaggtgcacagcaggcacacatgtccacatccccgatacggacgatccgcacctgtccttcgatctcgatcttgctccgataatccatggaagccagttcttccttagttggatacagaatctccaccggaatattatcccagactgcctgattggccagtgtctccacttcccgcacctgctccgatgtcagttctccgttaaaatccatggtggtctcggctgctcccagatgaaatcctacattgtcatatccataccgacgatgaatgatgccggacagcatatgctctcctgtgtgctgctgcattctggaaaaacgttccttatagtccagttcaccttttacttctgttcccacagcaaccggggcttctgtctcatgatagatcactccatttttctcatgggtatctgtcactttgattccatcgatccaaccctgatccccgaactgtccgcctccttccgggaaaaataaggtgcggtccagaactacccgatatccttcctttttccccttggcagtaaccttctcctcacaggacagtaccgtggcaataaattctctgccatggctgtcgtgataatataatttttctgtggcatcactaccggatgccagatgtttttcttccataatatctgtctcctctgtcatatgccttgaattaagcatgtgtctctttcaacaatttatccagtgtcggctccagtccgaattctttttcaatggcatcgatctctgcccgtgcctgctttttcgcagaacccggaatcactgcacgcaccgcacggatcaacagattcttcggtgtgtgggacagatccacaaactccagcagctgtgtccggtagccgctctctgtcagcagatttgcacggatcgcatcggtcatcaatgccgctgtccgttcttttacaattccgtatctggtcaggatcgacagattctcactcttcatctgcccattcagctcatgctgacaacagggcacagaaaagatcagctttgctttccagcggatcgcatgatacagggcataatccgtagccgtatcacaggcgtgaagagataccaccatatcaatgggctcatcgctctcataaccaccaatatcaccgacttcaaaggtcagccggtcatatccatacttcttcgctgctttgttgcagttggcgatcacatctgccttcagatccagtccagtgatcttcacatcccgcttcttcagttccaccagataataatacaggatgaaggtaagataagattttccgcatccaaaatccacgatccgtatggtctgatctgtgggaagagcatcgatctcatcatcgatcagttccacaaaacggttgatctgacggtatttgtcatacatggtgcggacgatcttgccttctgccgtaaagattcccatatccaccagcggcggaatgatggttccttcctccagcagataatgtttcttccggttgttttctgtctgtgccttaggtgcctgggtggctgccacccgctttttactgccggtaacttttcccttcttagaaatgcggatcgtatgctcccactctccatcccaaccgctgcactgacgaaatgcctgttccagcgcctgttgcacaaatggtctcacctgatcggctttcagattttcgtgaaatacctgcttctccgtatattgctccgcctgccagccattggtctttcggttcagcacaactttccggtaggcagctccctccgactctttttttatagcattacttaaaataattttatataagccatcactccagaggttctgaagcgcactctcaagctctgtcatctgtacttccatccattcactccttatgcccatctcctgacggacgcttttgtgtcagtatagcacagttttttccatcatccaagaactacatccaatgcaagcattaaagtaaatccaaatgcgaacaacagagtaccaatatccgaatgaggttcctctgacatttccggaatcagttcctccaccaccacatacatcatggctcccgctgcgaagcttaacagatacggaagtgccggtatgatcagtcctgctgcaagtatggtgagaaatgcccctatgggttccaccgcaccagacaggaccccgtagacaaatgccttccccttcttcatgccttctgcttttaatggaagggaaatgattgctccctctggaaagttctgaatggcaattcccactgatagtgccagagctccaagagctgtgatgctggtctccccggacatccatccggcatagaccacgcccactgccattccttctggaatattgtgaagggtcacagccagcaccagcatggtcgtacgctgtaattttgtccttgcgcgttccggcccttctgcttcttcgctgttcatatgcagatgcgggatcacatgatcaagcaacagcaaaaataaaatgccaaaccagaatcccgctactgccggaatcacctttgcaataccttctgatgtcacctgttccatggccggtatcaacaaactccagatcgatgccgccaccataactcctgatgcaaatccaatcaatgcccgttgtaccaacggatgaatcttccctctcataaagaatacgcatcccgctcctgccgatgtcccgaggaatggaataagaatacctttgatcacctctaccgtcatatatctttctcctatcttattattagtctatgctaacctacttgtcttagttactccggagccttcaccaggaccccggagtgattttaaataatataatcgtgattctgttcctggctccagtccaccagatcctgcagagtcacatgatccaccaccccacggatggcatcatccagctttctccagagcagaatggtggtacagctgtccatacgattgcacaccggtgcgccttcttccagacagtctaccgggcttaaacttccttctgtcaaccgaagaatcatgcctaccgtatattcttccggctttttcgtcaggaaatagcctccctgaggtcctctgacgcttctcacaaaaccagctttgttcagaactgacatgatctgctccatatatttctcagatatctcctggcgctctgcgatctctttgactctcaccggtttgtccgaatccgacaagaccatatcaagcatcatgcgaagggcatatctgcctcttgttgatattttcattttctgtctccttattgtttttccagaattttccgcacctgcggcagcatctgggtgcttcgtttcaaaatgccccgcatatgggcgatggcaattccataattggtgatgggcactccctgatcttgcgcacatttcatacggaaacgtacttccctctcattaagcatacatccaccgcagtggatcaccatggcatagggggacagatcttccggaaatcccataccggagctggtctcaatgttcagctccttacctgtatagcttctcagcagacgcggtagtttaactgttccgatgtcatcgcactgccgatgatgcgtacagccttccgagatcagcactgtatcgccatccttcagctgatcaatagctgtcacaccctgaacagcctcctccagaagtcctttataacgggccatcagaatggaaaatgatgtaagagggatctcttccggcaccacttcagacacctgggcaaatacctggctgtctgtgatcaccatagccggcggctcctgaaatacctgcaaggcctgtgccagttcatggtcccgcacacagactgccgctcctcctccatccagaatatcccggatcacctgctgctgaggaaggatcagacgccctttaggagctgccttgtcgatggggatcaccagtatgatccgatccagcggtttgatcagatcccgtaccagagccttttttccgctgtcttcctgacccagatgagcaatgcactccttcagttcctgaatgcctgtcttctgcagggcactgacgcagatgcctgctgtcggaatcgatccgtcagaatctgtccgcagaagtttttcttctgcattttcatccagcagatcacatttattccaggcgatcagatatggaatctctttttttcggaacagttccatcagctccttatcgcagggtttcagttcttcggtactgtctgccacaagcactgccacatcggtccggttgagcacctgtctggtcttcctgatccgcagttctcccagagatccttcgtcatcaaatcctggtgtgtcaatgatcaccaccggtcccataggcaacaactccatagcctttgtcaccggatcggtcgtcgtgccacgcacatcggacaccaccgccagattctgaccggtcactgcattgaccagactggattttcctgcatttctccggccaaagaatccaatgtggatccgttctccggaaggagtttcattcatccccatcccgtatccctccttttcatatatctattatagggaatttctatccataatacaatcggaaagttttcactttcctattgtgattttccttttcatattgtatcttataaaagacagcaggttcattattcagagtaataagttctgttgtcatgttgatatgttgataccatcaagaggaaaggattggattatggaaaatacgcattcgatcatggatatttttggcaccaatgtcttcaatgacaaggctatgcgccagtatcttccgaagagcatctactatgagctccgcaaaactattgaaggaagaaaagacctggatccggccatcgctgatgtggtagccgcagccatcaagaaatgggcaattgaaaagggagctacacattatacacactggttccagccgctgactggcttcaccgccgagaaacatgacgcttttatcacctcgccaaaggaagatggatctgttctgatggaattttcaggaaaagatctgataaagggagaaccggacgcttcctccttcccgtcaggcggacttcgtgcaacctttgaggccagaggctatactacctgggactgcacttcccctgcatttatccgcgaggatgctgctggagcgattctttgtatccccaccgcattctgctccttcaccggagaagcactggaccagaagacgcctcttcttcgttccatggaagctgttcaggaacagtcactccgtctgctccgtctctttggaaacaccacctctcagaaagtggttccttccatcggtgctgagcaggaatatttcctgatcgaccgcaataaatatctccagagaaaggatctgatctataccggccgtaccctgtttggtgctatgcctccaaagggtcaggagctggacgatcactattttggtactcttcgccagcgcgttggtggttatatgcgccaggtcaatgaagagctctggaagatgggtgtacctgccaagacacagcataacgaagtggctccggcacagcatgagcttgctccaatctatgctgaggcaaatgtggcagctgatcacaaccagatcatgatgcagactctgaaacgtgtggcttcccagcagggtctggtctgcctgcttcatgaaaaaccatttgccggtgtcaatggttccggcaaacataacaactggtctctgaccactgatgacggcatcaatctgcttgatccgggcaaacggccacatgagaacaaacagttcctgctgatccttgcctgcctgttaaaagcagtggatatccacgcagatctgctccgcgaatctgcagccaatgtaggaaatgatcatcgtcttggtgctcacgaagctccgcctgccatcatctctgtcttccttggtgagcagctggatgatgtgctggatcagctcttaagcaccggaaatgcaacccacagtctgcgcggtcacaaactccacactggtgttaagacccttccggactttaccaaagatgcgactgaccgtaaccgtacttcaccgtttgcatttaccaataataaatttgaattccgtatggtaggttcccgcgattctatcgcccattctactgttgtgatcaacaccattgctgcagaagctttcgcagatgcctgcgatattctggaaaaagcagatgattttgagactgcacttcatgacctgaccattcagtatatctctgagcaccgcaagatcatcttcggcggaaacggatattctgaggagtgggtagaagaagcagcccgccgtggtctcccaaatctgcgctccatggttgatgcgatcccggcactgacgactgagaaatccatccgcatgtttgagcggttccacgtatttaatgaagcagagcttcattcccgtgcagagatcaaatatgagacctacaataaggcgatcaacatcgaagcactgaccatgatcgacatgacagtaaaacagattcttccggctgtgatcaactacaccggtaccctgtccaatattgttcagtccctcaacgcagttggcgtatctccgtctgtgcagtctgatctgctcagggatatcacctccctgcttaacgaggccaatgctgcggtccgtgtccttcgcaagatgagtacagaagcatccggcatcgaagacaataaagagcgtgctcatttctaccatgatcacgtaatgcctgctatggaggaccttcgtgctccgatagacaagctggaaatgctggttgataaagaagtatggccaatgccttcctatggtgatctgatatttgaagtgtaatatatataatatgtgctgaaatggcataaacaaataggacaatatgaagtgaccccacatttgtagcaacgtggatttacctgtatacta

SEQ ID NO: 3295 - DNA, 27589 bp, Unknown
  16S sequences of unknown bacteria
cttgaagagatcgagtcggcgttgagttcggattttgatggggctactccaccagagcaatatcaaacaaagcccccaagaaatcttctttcttgggggctttggcttttgcaaatctttgcaatgaaatgtaaatatgaacgcttaggcggtactgtctgtatggcagtgctgtctttttttattttaacatgatttcgagaatttcttcaaaagaaacagaagtaaatcttgcgttttgcgtaatacagaaatttttgcagcagacgtcgaagtttccatgataacgttcacttatatatttcttgaattttgaagacacgtttttagaagcggtataggcataacgtgaattctttattagttgattattcagaaaggcggtgggcatcaagataccgggctacccgtccatcagcctgcccgccgacaaacaggacgcggaggtcgcgctgctgaaccccgaaggcaacccctgctatttcacctttgaactggtgctgaccgacaccgacgaggtactttacacctccaagcaggtcgagccggggcagatgattaccaacatcacgctcaaccgcgcactgcctgccgggcagtacgatgcggagctgcgcatcacaaccgcctcgctgcaggacggcagcgctatgaacggggcgaatgttgtgaccgtattggatgtacagtaacccacagcggcacaagctgttcaacaaactgttatatagaataggagaaatcacccatgaaaaaacttacatcctttgttttggctatggatagcccccttaacatttgggcgctggacgaggacctgcagcaaacgccgcaggtcagcaccgtgcaagaaaatatcgacctcgcgctcgtggaaggctccgcgcttttgacggctcacagcgttccgcgtaggtgtgtggcacaaagaaatgaccgcaacgatccatagcgcaaaattgggcgaataacagcgaaacagagtgtaaaagcacgctttatctgaggctaaacgcagatataagcgtgcttttgcgtagaaatgcccttgacaaattccgagcaacataatagacttaaaacgtctaatcgggatagaaaaggggcaagagcatgacactgaaagacctgccgatcggcaaaacggcaacggtgacgaccgttggcggcgagggcgcgctgcgccagcattttctggatatggggctcattccgaaggcggacgtcaccatggtgaaattcgcacctatgggcgaccccgttgaggtgcgcatacatggctacgagctgacgctgcgccttgccgatgcggaaaaaatagagatcgataaaattcgcgacacgataacggagccgatgcggccgcaggacgcgcgcccgatttttcacccgggtctcggcgagggcggcaagtaccacgtgcagaccggcgagccgctgccgcccggagaaacgctgacctttgcacttgcgggcaatcagaactgcggcaaaacgacgctgtttaatcagctgacgggctctaaccagcacgtgggcaactttccgggcgtgacggtggaccgcaaagacggtgcgatacgcggcgtggaaaacacgctcgtcaccgacctgccgggcatttactccatgtcgccgtactcgagcgaggagctcgtcacgcggcgcttcgttttggatgagcatccgcgcggcatcatcaacattgtggacgcgacgaacatagaacgcaatttgtacctgacgatgcagctgatggagctggatgtgccgatggtgctggcgctcaatatgatggacgaggtgcgccaaaacggcggctctgtgcgcgtgaacgagatggaggagatgctcggcatccccgtggtgccgatctccgccgcgaaaaacgagggcattgaggagcttatcgaccacgccgtgcacgtggcaaagtacagggaagcgccgggacggcaggacttctgcgatgtgaacgaccacaacggcgcggtacaccgctgtttgcacggcattatgagcctcattgaagaccatgcccacgatgcgggcatcccggtacgctttgcggcgagcaagcttgccgagggcgatcagcttgttttggaccggctgaacctcgaccagaacgaaaaggagacactggagcacatcatcacgcagatggaaaaggaacgcgggctcgaccgcgccgccgccattgccgacatgcgcttcagcttcattcaaaaagtgtgcggcgctgcggtcgtaaagccgaaggaaagccgcgagcacgcaagaagcgtggcgatagaccgcgttttgaccggcaaatacacggcaataccggcgtttatcggcattatgggtcttgtattctggctgacgtttaacgtcatcggcgcgtttttatcgagtttactggacatgggcatcggcgcgctgacggatattgtcgaccgcggcatgacggcagcgaacgtgaaccctgtgctgcactcgcttgtcatcgatggtattttcaccggcgtcggcagtgttttgagctttctgccggtcattgtgacgctgtttttcttcctctccatgctggaggacagcggatacatggcgcgcgtggcgtttgtgatggataagttattgcgcaaaatcggactttccggccgcagtgtggtgccgatgctcatcggcttcggctgcaccgttccgggtgtgatggcgagccgcacgctgccttccgagcgcgaccgtaaaatgacgattctgctcacgccgtttatgagttgctccgcaaagctgccgatttacagcttttttgcggcggcgtttttcccgggcaagggtgcacttgtgatggtcattttgtatttcaccggcattttggtcggtattttgatggctttgctcatgcgcggcacgatgtttaagggtgaggccgtaccgtttgtgatggagctgccgaactaccgcatgccgggcgcgaaaaacgtggcacagcttttgtgggaaaaggcaaaggactttttacagcgcgcttttacggtcatttttgttgcgaccatcatcatttggttcctgcaaacgtttgacctgcgctttaacatcgtttccgattccaaagacagcattttggcggtcgtcgccgggtggattgcaccgatttttgcgccgctcggctttggcgactggcgcatctctacggcgctcatcacgggctttatggcaaaggaaagcgtggtgtctaccttgacggtgctgttcggctcctccacggcgcttacaacgctgctgacgccgctttccgctgtaagcctgcttgtgttctgcctgctgtacacgccgtgtgtggcggccattgcgtccgtaaagcgcgagcttggcggtaagtgggcggcaggcgtcgtcatcggtcagtgcgtcatcgcgtggctgatggcggggcttgtgtacggcatggggtcgctgtttatatgatggataagctgaacataggcacggttcttgtgtcccttttgctcgtcatagcggtgttttttgctgtgcgggcaattcaaaaaggaaagaccggcggctgcggcggggactgcacccactgcgccggctcttgcgcaaagccggaacagaaaaacaaagcataaaaagaacagagcataaaaaaatctcctgcttcccgaaagaggcaggagatttcgttatcttaacttattcgtcttcttcggagacgccgtgctcgtgtgcttcgtcggcatccttgatctcgcccacgatgggggtggggtcgatgccgcggcggcggtagtaatcggagaccgcagccttaatggcctgctcggccagaacggagcagtgaatcttgatggccggaagaccgtccagcgcttccatgactgccttgttcgtcagtttcagagcttccgggatcgtcttgccttttacaagatcggtcgccatgctgcttgtcgcgatggccgcgccgcagccgaaggtcatgaactttacgtccgtgatgacgtcgttatcgaccttgatgtacatgcgcatgatgtcgccgcacttcgggttgccgacttcaccgacaccgtctgcatctttgatttcgccaacgttgtgcgggttggagaagtgttccattacttttgcactgtatgccatatcgtttcatttcctttcgtacattcgtaccggattattttaaaattaagagatcgtgcggccgtggatgatcgcatcccacagcgggctcatggcgcgcagacggtcgatgatcttcgggagcacctcgatgatgtaatcggcgtcgctctcgtcgttcacgtcgctgaagctgagacgcagggaaccgtgggcaacctcgtgcttaaggccgatggcaagcagcacatggctcgggtcgagagaaccgctggtgcaggcgctgccggaagaagcgcagacacccttaaggtcgagcatcagcagcatggattcgccctcaacgccttcgaaggagaagttcacgttgcccggcagacgatggtagcggtcgccgttcaaatgactgcggtcaatctttgaaagctccgtgatgagcttatcctgcatgcggcgcagctttgcgttcttttcgtccatcgtattgatggcgttctcgagcgcaacgctgaggccgacaatgcttgcaacgttttcggtgccggcgcggcggccgcgctcctgtgcaccgccatcgatgaggttcggcaggatgatgcccttcttgatatacagcacgccgacgcccttcgggccgtggaacttgtggccgctgagggacagcatgtcaatgttctgctcttttacgttgatcggcacattgccgacagcctgtacggcgtcggtatggaaccaaacgccatgctttttgcagatttcaccaatctccgggatgggctggatggtgccgatctcgttattggcatacatgatggtgacaaggccggtcttatcggtgatggcggcctcgagctcttccgggacgacgatgccgttttcatgcacgtcgaggtacgtgacctcaaagccttctttttcgagcgctgcgcaggtgtgcagcaccgcgtggtgctcaaacttgcttgtgatgatgtggtttttgccctttttcagcatcttgtgcgctgcgcccttaatggcccagttgtcgctttcgctgccgcagcttgtgaagtagatctcattcggctctgcaccgagacattttgctacttttgcacgtgcttcctcaagcggcttttttgcagccgtgccgagcgcatacaggcttgacgggttgccgtagcattcggtgtagtacggcagcatagcctcaagcaccgcaggggagacggcagtggtagcggcgttgtccgcatagatgatcttcttgccgttgttttccatagctttatcagtacctttcggatagtgttttttgtgagggaacagaaaacgcatttggggtcgatcggtcgggatacgcatattctttcctcagcgagataaatatacaccaaattggtatacttttcaatagggaaattccagaaagtcaaaatttttctgaaaaagcaggaaataaaggccccgaacgagagttttccgtacaaaatggaagaaaacggcggccgttttttgaaaaccggcgtacagaacacaaaaaatcgggagaatatgggaatagaacctctgcggtgtgcccaaactccgtacagagcgaaacggcacgcggcttgacagcacggggagaatagcgtaaaatagaattatctttttgtgtgcgggtatttttcgcatgcgtgaacggctgacactttgcacgtaaacggtacgtgtaacggataatgaaaaaaacgctgcggtgttttgatttacatgtgttgaacggaaaaaacagaagaaagaaaagcagaaggcggcgcggacttgcgtgcgttttattctgctcatgccgaaaggcgacactgcgcagagcatcggttggtgcttttgtataccttattcttgcgtgaattgcgacagtgcgcctgtgttatttgaaaggaaggtcaatttggcagaaaagagaatcagaaaaatgacaaaattaacgtcgctcggcgacgcgcctgcaaagcagcaggaccagcccctcagcggtgcaggggaaagcttcatcggcaagatttccggccccatcgaaaagccggtgagacgccagaaaacgcgcagaacggaaaacgcgcaggtaaaagaagaagcggcacagcaaaccgtgagcgaaacaaaagagacgaagccgaagcgcacgcgtaccgcgcaaaacacggacgcacacaaaaagacgacgaaaacggtaaaatcggccccaaacggtgaaaaagcacccgctaagacaacaaaaagcacgcagacgaaaaataacaagggcaggggcaggcgcacaaagcagaagccctctgtgcgcgcgtatttcctcggcggcttaaatgagatcggcaagaacttcacgctgtttgagtgcgaaaacgacatggttatcgtggactgcggccttgccttcccggacgaggaaatgcccggcatcgacgcggttattccggatttcacatttgttgagaaaaacaaggaccgcatccgcggtattgtcatcacgcacggtcatgaggaccacatcggttccctgccgtatttgctcaaaaagatcaatgtgccggtgtacggcacggcgctgacggtggcgctgattgcgaataagctcaaggagcacaacctcggctatgtgaagctgaacgtcacaacggcgggctcgcacattcagctcggctgcttcgacgtggagcttatccacgtaaaccactccatttccgacgctgtgggtcttgcgctgcatacccctgcgggcgtcattgtccacacgggcgactttaagatcgatttcacccccacgcagggcggcatgatcgaccttgcgcgctttgcgcagctcggtcaggagggcattttgctgttgatggcggactctacgaacgcagagcgccccggctacacacagacggagcagaaggtgaacgcgacgtttgacgcactctttgcccgcgcggaagcgaataaaaagcgactcatcatcgcgacgtttgcgtcgaacatcagccgcgtgcagcagattatcaactgcgcggaaaagtacggcagaaaagtggcgctttccggcagaagcatggtgaacgtcatgtccattgcgagcgagctcggttatctcaaagtgccggacggtctgctcatcgacctcaacatgatctcccgttacacgaaggagcagattgtgctcatcacgacgggcagtcagggagagccgatgtctgcgcttacccgcatggcgtttgccgaccaccgtcaggtcgcggtcggtgaggacgacatgatcatcatttccgcgcgccccattccgggcaacgaaaagatggtcggcaccgttgtagacgagcttttgaagcgcggctgcgatgtggtgtacgaatccatgtacgaggtgcacgtttccggccacgcgtgtcaggaagagctgaagcttattcaggcgctgacgaagccgaagtacttcatcccggtgcacggcgagcagaagcacctgcgcaagcatgcgggcgtggccgtcagcatgggcatgccgccggagaacattttcatcggcgatgtcggcagcgtggtggagatcaatgaagactacatgaaacagctgcccgatgtacaggcgggcgcggttatggtggacggcctcggcgtgggcgacgtcggcagcattgtgctgcgcgacagaaagcaccttgcggaagacggtctcatcattgcggtgtgcacgattgaggcaggctccggcagagttgtttcgggtccggatattgtatcccgtggatttgtgtatgtgcgcgagagcgaggcgctgatggacgaggcgagacggcttgtcaacagcacgattgagcagtgcgcggacgaaaacgtgcgcgagtggagcgccattaagctgcgcgtgcgcgacaacctttccagactgttatataaccgcacaaagcgcagcccgatgatcctgccgatcatcatggaagtttaaattcagtttaagttagattagtttcttgggggttcccctcagaaggagagacgggaaatgaacaagcgacgcatctgggcgacctcgccggtctattatgttatggcagcggtcatgttcattatggcgtgcttcagctatacgcagaataagattctgtttgcggtggagatcacggtttccggcctgtgtttggcagcggttatcatgaccgacctgcattaccgcgtgcatgtgtacacggcgctcagagctgcgagaaaggtgctttccgccgatgaacagcgcaacctcgggcagtttgcgctgccccttgcggtgctgggctcggcgggcgacatcgtctggacgaatgagcgttttcaggatttattcaccgaaaacggcgaaggctgcggcgataacattgcggcgtacatttacccgaagactttgcgtcagattttatccgaaaacggaacctccgtttcctacggcgaccgcgagttcacggcctacggcctgcgcaccgaaagcggcagtgtgctttactttgtggacgacacgtattataagcagattcagcgcgattatcacgaaaagcgcacggtcattgcggttatctcgtttgataaccgcgaggagctgacgcgcgatgcctccggcagcgaggattcccgcattacgtccgaggtggaatccgtcctgcgcagctgggcgatcgacaccatggagggctttctgcgccgcatgacaaacgggcgttatatgctcatcacggacgaccagcacattgaagaagccaaaacgaagcgctttgccgttttggacagcgtgcgcgccgtgaagggtgagaataacatgtctgccacgatctccatcggcatcggccgcgcgggcgtaacggcgacggaaagcgaactgcatgcccgtcaggcactggaaatggcgctcggccgcggcggcgaccaggtggccatctaccagcaggacggtacatacgagttcttcggcggcctttccaagggtgttgaaaagcgcgacaaggtgcgcacgcgcgttattgccgcgacgctttccgaccacattaaatcgagtgaccatattttcatcatggggcacacgaactccgaccttgacgccgtgggcgcggcggtcggcatgtgggcggctgtgacgaaaggccttgaccgccgtgcaagcattgtgatcgacaagggccgctctatggcgacgacgcttatcaacgcgtttgagcaccagccggagtatgaaaacatgttcatcaccccgcaggaggcgctcgaccgctgcacgcagcgctcgcttctcattgtggtggacacacattccacctcgtttgtggagagccaagaagttttaaaggccattccgcgtgtggtcgtcatcgaccaccaccgcatgatggtgacgcacattgaaaacgcgatcatcttttaccatgagccgtacgccagctcggcttccgaaatggtggcggagctcgtgcagtatatcaacagctccgcgctcaataaaaaagaagcgacggcactgctttccggcattatgctggacacaaaaaacttcgttttgaagacgggcgtgcgcacatttgaagcttccgcctacttaaagcgccgcggcgccgacacggtggaagtgaagaagatgtttgcaaattcgctcgatacctataaagagcgctctcagcttgtggcaggtgcggaggtttacaagggctgcgccattgcgtgctccaactgggaattcccgaacgtgcgcattgcggcggcgcaggcggcggacgagctgctgtccattcagggcgtgcgcgcgtcgttcgtcattttccgcgtgggcaatgagattgccatttcggcacgaagcctcggcgacgtgaacgtgcagattttgctggaggaattcggcggcggcggtcacctcaacatggcgggcgcgcagattaaaaacagcaccacgaacgatgtgcgcaaggcactcatccgcgtgctggacgaaaagctttccgaagcgacgaaaaagaataactaatgcggcaaagcggcgcgaagccgtttgactgctttagcgatagatttaaacgataggagatacgaccatgaaagttgtacttttagcagatgtaaaaggtgtaggcaaaaaaggcgagctcatcaatgcagcagaaggctacgcacgcaatttcctgctgccgcgcaagcttgcaaaggaagcgaacgcacaggtgatgaacgagctgaaaaacgccgaggcctccaaggcatataaagtgaaaaccgagaccgaagaagcgcagcgtattgcggaggctttgaaggacaagaccgtccgcatcaccgcaaaggcgggccagggcggcagactgtttggctccgtcaccgcaaaagagattgcgcaggagattaaaaagcagtacggcttcgacatcgacaagcgcaagatccacctcgacaccgacatcaaggcgttcggcggctatcacattgaggtgaagctctataacggcatcaccgcgaagctggcggtatcggtgaccgaagcacagtaaaagcatgatttccttgatgcgcagcattaaattttgcaatgacaaaaagtcgtttacgattcgaaaatcgttttcactttgaagtaatttcactcaaaaaagggtggtaaaaatgccggaagataattttcaactgaatacgccggcactgcccggaacggtgatgccgttcagcgcagaggccgagcaggcggtgctgggcgcggtgttgctggagcccgactgtctctcgaccgtggcggaaatgctgccgcgcgcggactatttttatcaggtcaataaccgcacgatttacagcgcgatgctcgatatgttcacggcaggccagccggtggacctcgtcacgctgctggagcacctgcgcgaagaggaaaacttcgatgagggcagcggaaaggtgtatctgatgcagcttgcgcagcttgtgccgagcgtctcgaatgtggagcgttactgcaccattgtgcgtgaccgctacgatttgcgtatgctcattcaggcggcgcgcggcattttggatgacgccatggaggacaccggcgaaacctcgctcctcttggattccgccgagcagcgcatttttgacatccgccagggcaaggcgttaaagggtcttgagcgcctgaacgaagtgctgtttgagacgtttgaacgccttgaccgcttgaattcgccggacaaagacctgtaccgcggcatccctacgggtatccgcgagctggataacacgatcacgggcctgaaccgctccgaccttgtcatcatcggcgcacgacccggcatgggcaaaacgagctttgcgctgaacattgcgcgccatgccgccatcacggcgggcaagcgcgtggcgtttttctcgctggaaatgagcaaggagcagctcgcttcccgtatcatttccacggaggcactcgtcggcggtacaaagctgcgcacgggcgacttgacggagggcgaatggacgcgacttgtggaggcgggcgatattctctctaaggccgatttgtacctcgatgattccccgggcattacggtgccggagatgaaagcaaaagtgcgtcgtttaaaagatgttgatcttgtcatcatcgactacttacagctgatgaacagtgcaaagcgcattgataaccgtgtgcaggaaatttccgagatcacgcgaagcctcaagatcatggcgaaagagttgaatatcccggttgtgacattggcgcagcttgcccgtgcgggtgaaaaacggcaggagcaccgccctgtgctttctgacctgcgagattccggctccatcgagcaggatgccgacatcgtgctgttcctgtaccgagacgcatactacgcgaacgaatcggcttcgcccgaagacgtggacaaaaacagcgccgaggtcatcgtggcgaaaaaccgtcacggcgatctgcgcagcgttccgctgcactggcagggtgagttcatgcgctttacatcgcaggaagttgtgcgtcatgaaagctgaggacatcctcgcccgcgtgcggtatgatctgccggagacgggaaaaattgtcgtggggctttccggtggggcggattccgtgctgctgacgtatttgcttgtacagaagtacggcgcggagcgtttgcttgcggtgcatgtgcaccatggtattcggggggcggaagccgactgcgacgcggaatttgtgcaggactactgtaaagcacttgaacttcactgcaaggtgatctataaggatattcccgcgcttgcggccgtaagcgacgagggcgtggaggaatgcgcgcggcgcgtgcgctacgcgtgctttgcggaggaagcaggggaaaacgggtgcatcgccacggcgcacaacgccgacgataatgccgaaacgctgcttttgaacctgacgcgcggcatggggccgcacggtgcagggggcattccgccgcggcgcggcagaatttatcgcccgattttgaacatttcccgcgcagaggtggaacatctctgtaaagtatatcgacttgactacgtgacggactccacgaatttgacggtggactacacgcgcaataagctgcgccacagcgtactgccggtgctgaaggacgtaaacccgcaggtgacgcaggcgacgtcccgctttgcggagagcatgcggttgcagaatgaatttgtgtttgcgtgcgcgaatgaattgctctgtaaagcgaaaacgccttacgggtatgacttggaaattttgcggagcgcacacgaggcggtgctgcgcgcggcactggaactgctgttatcgtcttacgggcggctttcttatgagcacatttgcagggcggcgagctgcgttttcatgggcggcagcctctctttgccgggggacatcgtgctggaggcgaagcaggacacgctcacggtacgaaaaaaccgggagagaaaagaccagaatgtgttttctgttccgctgagagcgggcgaaaacgtgcttccgaacggaaaaacgctgtttgtgaagaaaaaaattcccgaaaaagaagaaatcgaccggaaagttcataatttgttattccaaaacttttcggattgtgataaaattacgaatgttccgagagtacggacgcggcgcgcgggcgatgttttcagacccgcagggcgcggcgtgacgaaatcggtcaaaaaaatcctgaatgaactgcgcattccggcgtcggcgcgcgaccgtttgctgctgcttgaaaaagacggtgagatcatctggatcgaagcggtcggcgcggcggagggctatgcggcaaagccgaatttcccggcactggagcttacggtgacggacacggcaggcataacccgcatataaagcggaaagaattttgaggaaagggtcatccgaatggaaaacacaatgttaaacgatatcaaggaagttttgtacagcgaagcgtacatcgacagcatggtcaagcgcgtgggcgcggaaatttcccgcgattacgccgataaaaacctgctgcttgtcagcgttttgaagggttctgtcgtctttatggcagaccttatgcgcgccattacgattccggcccgcatcgatttcatgtgcgtttcgagctacggctccggcacgaagacctccggcgttgtcaagatcatcaaggacctcgacatcaacctgaagggctatgatatcgtgattgttgaggatattctcgacagtggcaagacgctgcactaccttgtaaaccttttgaaaagccgcgagccgaacagcattgagatctgcacgctgttcgataagccggagcgccgcgaggtggaggtctacgcaaaatacaagggctgcgatattcccgatgcgttcatcgtgggctacggtctcgattttgatgagaagtacagaaacctgccgtttgtcggcgttttgaaacctgaagtctacggtgaagtctaagcttccgttttgataaaaaagtttccgtttctatttaaggatacactttgtatccaatttgatttccgggaggtcggaacttgaacagcaacaacaaaaaaatcattcgcaatcttttgatctacctcggcattccgattttgctcgtcgtgctgcttttgcttctgtttgaccgcggggcagaccagacggggctgaaatactccgatgtgctgtcttactttgaagacggcaaggtgagcgcatactcgctgaacctgggcacgggcgagatgaagctgaccgtgacagaggacagcagcaaaaaggaatccgttgtgcgctacacggtgccgaacgtgaacctgttctacaacgacgtttcggactacatcaagtcgtataacgaggaacatccgaataaccgcatgacgcaggatgtcatccgcccggcggagacgagctggcttgtcagcctcattccgacgttgctgatgatcgcgctgcttgtggcgttctgggtattcatgatgaagcgcatgggcggcggcggagccggaaaccagatgaatttcggcaaagcgaaagtcaagcaaataaacgacgaaaagcgccgcacgacgtttgcggacgtggcgggcgcggacgaagaaaaggaagagctgcgcgaaattgtggagttcttaaaacgtccgaataagtataacgagctcggtgcgcgcattccgaagggcgtgctgctcgttggccctccgggcaccggtaaaacgcttctggcgcgcgccgttgcaggcgaggccggcgtgccgttcttctccatttcgggttccgacttcgtggagatgttcgtcggcgtcggtgcatcgcgtgtgcgtgacctgttcgacaaagccaagaaaaaccacccgtgcatcatcttcattgatgaaatcgatgccgtgggccgccagcgcggcgcgggtctcggcggcggccacgacgaacgtgagcagacgctgaaccagctgctcgttgagatggacggcttcggcgcgaacgagggcgtcatcatgatcgcggcaacgaaccgcccggatattctggacccggctttgatgcgtcccggccgtttcgaccgccaggtgatggtgggctacccggacgtgcgcggcagagaggatattctgcgcgtacacgcaaagggcaagccgcttgcaccggatgtggacctttccaccattgcaaaatccaccgccggctttaccggtgcagaccttgagaacctcttaaacgaagcggcgctgcttgcggcccgcaaggaccacaagtccatcacgatggaggaaatcgaggaagcgacgatcaaggtcgttgtcggcaccgaaaagaagagccgcgtgatgacaaacaaagagaagaagctgaccgcgtaccacgaggcaggacacgccattgcgacgtacttctgcgattcgcaggacccggtgcaccagatttccatcatcccgcgcggcatggcaggcggttacacgatgcacctgccgacggaggataagtcctaccagagccgcaacgagatgcgcgaggagctcatcgtactgctgggcggccgtgtggcggaagccttggtgcttgacgatatttccacgggcgcatcgaacgacattgagcgcgccacgaagatcgtccgcgcgatggtcacaaagtacggcatgagcgaccgtcttggtccgattacgtacggtgcggacagcagcaatccgttcctcggcaaggagatgggtcatgtctcgaactattccgaggagaccgccgcggagattgacgaggagattaagtccatcatctgcgacgcgtacgataagacgaagaaggtgctctccgaacacattgacctgctgcaccgtttggcgggtgtgctgtttgagcgcgaaaagctggacgccgacgagttccttgacgtgatgaacggcaagctgctgccgagcgcacagactgccgctgcgggcatcatcccggcagaagcggcagcgccggaaacgacagagctgccgaccgaagcgcagacggaaccggacgcgaacacgaacgaataattttttgacgaaagggaatgtgctcatttgcattccctttacgtttgtttatgggcaatcccgtgcgggtgttattttgcccgcttgaggaaaggaacatggtgaatggctaaaaagcaaacctacggcaacgacagcatcaaaagtctgaagggcgcggaccgtgtacgtctgcgtccggcggtcatattcggctcagacggtctcgacggctgcgagcatgcgattttcgagatcctctcgaactccattgatgaggcgcgccagggctacggcaaggagatcaccgtcacgcgctatgccgaccattccgttgaggtggaagaccacggccgcggcatcccggtggattacaacaagcgtgaggagcgctacaattgggagcttgtgttctgcgagatgtatgcgggcggcaaatataacaacaatgacggcggcaactacgattacgcgctgggcctgaatggtctcggtctgtgcgccacgcagtatgcctccgaatacatggacgcggatattcgctacgacggcttccgctatacgctgcactttgagcacggtgagaacgtaggcggactcaataaggagccttacggcaagaaggccacgggctcgcgcattcgctggaagccggatatcaaggtgtttacggacattgacgtgccggcggactattacacggacatcatcaagcggcaggccatcgtcaacgcgggcgtgaagtttattttcaaaaatgaagtttcgccgcgcaaattcgagacgacggaattctgctacgaaaacggcattttagatcatgtgcgcgagctggtgggcgaagatgcgctgacctccgtgcagttctggcagtccgaaaagcgcgtgcgcgaccgcgaagacctgccgctttacaatgtgaagatcaacgccgcgatagcattttccaaccgcgtgcatttgacggaatactaccacaactcgagctggctggaatacggcggcgcgccggacaaggccgtgcagaacgcgttcgtgtatcagattgacgcgtatttaaagcagaacggcaagtataataaatccgaaagcaaaattaaatttcaggacgtggaagattgccttgttatcgtcatgtcctcgttctccacgatgacctcctatgagaaccagacaaagaaggccatcaacaacaagggtattcaggaagcgatggtggagatgctccgccataatctcgaaatttatttcatcgaaaaccccattgaggcggagaaaatcggcgcacaggtgcttatcaacaagcgctcccgcgaggacgccgaaaaaacgcgcctcaacttaaagggcaagctgacggccaaaatggatatcacggggcgcgtggcgaagtttgtggactgccgcagcaaggatgtttccgagcgtgagatttttatcgtggagggcgattccgctctcggtgcggtcaagcaggcgcgcgacccgaactatcaggccgtgatgccgatccgcggcaaaattctgaactgcctgaaagcggattacgacaagattttcaaaagtgagatcatcaccgatctcattaaggtgctcggctgcggcgtgcaggtaaagtcgaaggcgaacaagtccattgcgtcgtttgacatcaacgcgctgcgctggagcaagatcatcctgtgcaccgatgccgacgtggacggcttccagatccgcacgctgctgctgacgatgctgtaccgtttgacgccgcagctcatcgaagagcacaaggtgttcattgcggaatcgccgctttatgaaattacggcgaaggacaagacgtattttgcgtacaacgagcgcgaaaaggacgagtttttgacgcagcttgagggccagaagtttacgattcagcgctcgaaaggtctgggtgaaaacgacccggacatgatgaacctgacgacgatgaacccgaaaacgcgcaggctgattcaggtgaagcccggcgatgccgaaaggacggcgcagatgtttgatatcctgctgggcgataatcttacaggccgtaaggactacattgcgacccacggcagcgagtacctcgatgacctcgatatttcttaaagctctgacgaaaggaagcgtaaagcatggcaagaaaaaaacagccgaaaagagaaaatacgccgaagatgcagggctttattgcgggcgcgggtgaaattcaggcgcaggacatcaacgacacgctgcggcagaactacatgccgtatgcgatgagcgtgattatgtcccgtgccatcccggagattgacggctttaagccctcgcacagaaagcttctctatacgatgtacaaaatgaacctgctcggctcggcgcgcacgaaaagcgcgaacatcgtcggtcagacgatgaagctgaacccgcatggcgacagtgcgatttacgacacgatggtgcgtctttcccgcggctacgaggcgcttttgcacccctatgtggactctaagggcaacttcggtaagttttattcccgtgacatggcgtgggcggcttcccgttacacggaagcgcgccttgaccccatctgccgcgagctgttccgcgatatcgacaaggacaccgtggattttgtcgacaattacgacagtacgatgaaagagccaacgctgctgccggcggcgttcccctcggtgctcgtcaacgcaaacacgggcattgcggtcggcatggcgtcgtccatttgcccgtttaatctcgccgaagtgtgcaccacggcggcagagctcatccgtgacccgaagcacgacatttttacgacgatgcaggcgccggacttcccgggcggcgggcagattattttcgaccgcgcggcgatggagcagatctacaaaacaggccgcggcagcatcaaggtgcgctcgcgctacacgtatgataaatccgcaaactgcatcgatattacccagattccgccgacgacgaccattgaagccattgtggaaaaggtcatcgaccttgtgaagcagggcaaggtgaaggaaatcaccgacattcgagacgagacgggtctggacggactcaagatcacgatcgacttgaagcgcggcgcagaccccgataagctgatgcagcggttgttccgcatgacgacgctggaggacagcttctcctgcaattttaacgtgctcatcgcgggcattccgcgtgtgctgggtgtgcgtgagctctttgaggagtggacggcgttcagaatggaatgcgtccgccgcagaacgcactacgacctcacgaagaagaaagagaagctgcatctgctctacggcctcaaggcaatcttactcgacatcgataaagccgtgcgcattgtgcgtgagaccgaggaagaaagcgaagttgtgccgaacctcatgatcggctttggcattgacgaaattcaggccgaatatgtagcggaaatccgtttgcgccatttaaaccgcgagttcatcttaaagcgcaccgaagaggtgaacagcttagaggaagaaattcgtgaccttgaggcaattttggcctcaaaaacgcgcattaagacgattattgtgcgcgagctgaatgaaatcgcgcagaagtacggccagccgcgccgcagccatattttgtacgcggaggaaattgccgaagaagagcccgtggagactgtgccggattacccggtgaacctgtttttcacgaaagaaggctactttaagaagatcaccccgctttccctgcgcatgggcggcgaccaaaagctgaaagagggcgacgagatcgcccaacagatggaatcgacaaacgcggcagagcttttgttcttctccgacaaagcgcaggtctacaagctgaaagcggcggattttgccgacaccaaagcgagcgtgatgggcgaatatgtgcctgcgcgcgtgcagatggacgagggcgaaagcgctgcgtacatggctgtaacgaccgactttaagggctatatgctgtttgttttcgataacggcaaggtcgccaaggtggagctttccgcttattacacgaagacgaaccgcagaaagctcattaacgcgtattccgacaaggccccgcttgcggcggcgctgcaaatttcggaagactgcgatgtgctgctgacgtcctcaagcggcagacgactgctcatgaacacggcgctcatcgccccgaagacgacaaagagcacgcagggcgtggcggtgatgaacctgaaaaaaggccaacgcattacggacgcgcatatctatcaagaagacgagctgcagaacccgtcgcggtacagaaagaagattccggcgctcggcgcactgccgaacggagaggagggcggcgagcagatttcgctgtaaaaaatcagccctccggcaagaccgtttggtgttccgtttgtgcaggcgtgcggcctgcgcggcggagcgttcagtcctactgaagggcgggcagcatacagtccgcaccatggactgcgccgcccgcccgggaaagcccccgctcgtgtgacgcgaaagtgcggttttgccgcacggtccgttttggcgcgcacaaacgcctgactgtgactgccttggtatcagtatggacgtatgacggcggaatatgcaggaaaaaagcaaaaaatcctgttgcaaaatcccgctttgtatggtatcataattaagctacgaataaaattagcgttaagtctcttgaagaggaggtaaaatatatgggtgctgttgaaattattttcggtatcgttctgcttcttttcgcactggcgatcatcgttgtcgtactgttgcaggaaggccatcagcagagcctcggcgcgattaccggcggcgcggatacgttcctttccaagaataaggcgcgttccatggatgcgttccttgctcgttggacaaagttcattgcgatcggcttctttgtgctggtccttgtgatcaacatcattatgtatttcacaaagtaagtcaatacttgcggaaatgcgcctcgcttttcgatgggtctccattcggaatgcggggcttttatttttataaatcaggctttaggagggaatatcatgtttgaagagattgaacgcctcacccgcgcgctgtgcgcagagcacggcacatccggctgtgagggcgacgtgttcaaagttgcgaaaaaggagctcggcttctgcaaagaggtgcgtgagaacgagcttggcggtgttgtgggcattttcggcgatttgagttctaagcgccgcattttgctggacgcgcacattgaccagatcggtatgatcgtgacggacattgacgaaaacggctttctgcatgtgacgaatgtgggcggtgtggaccgccgcacgctgccgggcagccccgttaccgtgttcggcacggagaccgtcacgggcatcggctgcacgctgccgccgcaccttgcaaagggcgatgataagataaagcccgttgcggagcagtgcattgacttagggcttccgaaagaggaagtggagaagctcgtcgctgtcggcgaccgcgccgcactgacgcgcccgctgaaaaagctcatgggcaaccgcatcacgggcacggcgctcgacgaccgtgcgggctgcgcgtgcgtcatccgcgccgcacagcttgcaaatgaacagaaccccgattgctgcgttatggtgctgtgctccacaaaggaggaggtcggcgggcagggcgcgcaggtctctgcgtatgcacttgagcccaccgaggccattgccgtggacgtttcattcgcaaagcagccggacgcggagagcatgcttaccgcggagctcggcaaagggccgatgatcggcttctccgcggcgctggacagaaaaatcagcaaaaagcttgtcgagctcgcaaagcgcgagaatatcccgtatcagctggaagccatgggcggcagaacgggtacgaactgcgacgagatcagcaccacccgcggcggcgtgcgcacggggctcatctccgtgccgcagcgcaacatgcacaccccggcggaggtctgcgattttgaggatatggagaacattgcaaagctcatcgcggcgtatatcacggataaggaggcgcagccgaatgcttaactatgaaattctggaaaagcttacccgcaccatcggtgtttccggcgaggaagacgatgtgcgcagcgtgatcttaagtggaattgagccgtatgcggacgagattcacatttcgccgctcggcaacattctggcgtttaaaaagggcgaaaagcgtcctgaaaagaaattaatgctctgcgctcacatggacgaagtgggctttgtcatcacaaacattacggaaaacggccttttgaagttcacgacggtcggcaatatccgctcggaggtgctctccggccgtgatgtgctggtgggcggcaaaacgccgggtgtcatctgcgcaaagccggtgcatttgctcaaaggcgatgaatttgaaaagcccgtgcccgtgaacgaactcgccatcgacatcggcgcagatacacgtgagcaagccgagacattggtgcagattggcgacaacgcgtgctttgtgccgttctttgagcacgtgcacggtacggtgaaggcgaaggcgctcgatgaccgcgtgggctgctttgcgcttatcacgctgatgcagcgcccgctcgaatacgacacgtatttcgtcttctccacgcaggaggagattggcctgcgcggcgcgggcacggcggcgtatattctggagcccgatgcggcgcttgtgctggagggcacgacggcgggcgatattcccggcgtgagcccgacggacgcagcgtgcaaaatgggcggcggtgcagtcatttcccttacggatatgcgcaccgtttacccgaaggattatttccgacgcgcgatggcgcttggtaaagaaaacaatattccggtgcagccgaagacggtgcgtgccggcggcacagacgcgggcaccattcacgtttcccgcggcggcgtgaagacgctgacgatctcgcacccgtgccgctatatccacagcgcgatcgcgatgacgaccgaaaaggacatagaggctgttattgacctgatggcgctgatgatggcggaaatttccggcggcaagctgtaatgatccgtcttgcggaaaatttggaagcgcttttcgcgccgtgcgtgagttctccgtttggctgccagatccggtctaaagcgcaggcgtatggcttccatcagtcgttcgcgcagttttggacggacggggaagccgcctacggaaaaacggacggctccgtctgtattgcaggggagatcaccgacgcggacgaggcgcgtgcgtttttgcgtgcggtgggcacaaatgaagtcgtgtgcagcgcggagaatgccgaaaagcttgggctaaacatcaccgaaagcggcgcgattttgcaaaaagtgctgcgaaaggagactgtgcatcctgcgaaggaaatttctccgagagagatttatgctgtgctgaaagcaaacggcatggtgggggagttcgagccgttttacctcgatttatcccaccgcatgcggcacggcacggtgcgctgcgcgggtgtttcggcagatgggaagaccgtcgccgtggctgcagcagtgctcggcgaaagcgcgagcctcatttctgctgtggcggtgctgccgaaattccaccgcagggggcttggcacggcggttgtccgaaaaatggagcgaatgctgccgagcggcacggtgtatatcctgcgcgaagaaagcaaaaacgaggcgttttatgacgctttgggttataaaccgtgcggcgcatgggcgcagggaaaattatgcaattaaaataattcagataaaggaaggcttttgcgtttgcgaaagcgggtttactatgtacgagttttttaaaattgatgaccgcgtgctgaaggcggcggagaaagcggagcagaaggctgcgccgtaccttgcgaaaatttccgaaacacagcggtataatcaggagaagatgcaggctgcgttcatgcaggcaggcgtcagcgagagccactttgtggcaacgacaggctacggctatggcgaccgcggccgcgacgtgctggacgaagtgtacgcgcgtgccctcggtgcggaggacgcgctgtgccgctataattttgtcagcggcacgcatacgcttaccgtagcgctttttggcgttctgcgcccgggcgacacgatgctgagcgttaccggcatgccgtatgatacgctgcgcggcgtgatcggcattacgggcgacggcaacggctcattaaaggagtttggcataaactacgagcagcttgacctgctgccggacggcacgcctgactatgacggcatggagacggccatcacgccgaagcaccgcatggtgtacattcagcgctcccgcgggtacagcctgcgcccgtccctgacggtggaggagatcgagcgcattgtaaagatcgcaaagcgccgtgcgccggactgcattgtcatggtggataactgctacggcgagtatgtgcagagaatagagccgacggctgtgggtgcagaccttatggcgggttcgctcatcaaaaatccgggcggcggcattgcgccgacaggcggctacattgcgggccgccgcgaccttattgaaagctgcgcgtatcgcctgacgaccccgggtacgggtcgtgagatcggctgcacgctcggcaacaaccgcgagcttttcatgggcacgttccacgcgccgaacgtcacgggtgaagccttaaagaccgctgtgttcacggcggcgctgtttgagggcttcggctttgacgtgaccccgcgctacgatgagccgcgcgcggatattattcaggcggtgcagctgcgcgagcgcgaggcgctgtgcgcatttatccgcggcattcagcagggcgcgccggtcgattccttcgttgtgccggagccgagccccatgccgggctacgactgcgacgtcatcatggcgtccggctcgttcacgtttggctcgtccattgagctttctgcggacgcaccgctgcgtgagccgtttgcggcatggatgcagggcggtgtgaacttcaacagcggccgcctcggtgcgattttggcggcacagtccatgctgaacgcgggctttttgaatctctaaattataaattttcggcggcaggcttcggtttgccgcttttttgttgtcaatttatccggaagataaaacttttatcttcctttttgaataaaaccgtgctatactttttttaacaacttttaggggggttaccatgagagacagaaaaaaggcgcaggctttggcgcacgagcttgtttccaaaatgacgatagaggaacgcgcttcacagctgaaatttgatgcgccgcccgttgaacggctgggcgttccggcgtacaactggtggaacgaagcgctgcacggcgtggcgcgcgccggcacggcgacgatgtttccgcagcccgttgccatggcgagcatgtttgacccggagatgatccgaaaaatcggcgatgtcgttgcgacggaggcccgcgcgaagtataacgaagcttctaagcacggcgaccgcgatatttataagggcctcacgttctggtcgccgaatatcaacctgttccgcgacccgcgctggggcagagggcaggagacgtacagcgaagacccgtacctcacggcgcagctcggcgtggcgtacatcaagggcttgcagggtgacgggaaatatttgaaggtcgcggcgtgcgcgaagcactacgctgtgcacagcggcccggaggccattcgccacgaatttgacgccgaggtgagccaaaaggatttgtgggagacgtatctgcccgcgtttgaagccgctgtgaaagagggcgaagtggaggccgtgatgggcgcatacaaccgcacgctcggcgagccgtgctgcggcagtgacctgctcatccgcaaaattctgcgcggcaagtggggctttcagggacactttgtctctgactgctgggcgatttccgattttcacctgcaccaccacatcacgaccaccgcgtcggaatccgctgcgctcgccattaagatgggctgtgacgtaaactgcggcaacacatatctgcatttgctgcgcgcgctcgaggacgggctcatcaccgaggacgacatcacgacggcagcggagcggctctttaccacgcgttttatgctcggcgagtttgacgaaaactgcgaatacaactccattccctatgaggtcgtggagtgcccggagcatttggcgctcagcgaggaagccgcgcgcagaagcgttgtgctgctgaaaaacgacggcattttgccgcttgataaagcgaaaatcaagacgatcggcgtcatcggcccgaatgcgaacgatcgcatggcgctcatcggcaattaccacggcacggcgtcaagatatatcacggtgttggagggcattcaggactatgtaggcgacgacgtgcgtgtgctgtacgccgagggttgccacctctacaaagaccgcgtggaggggttgggcctgcccggcgaccgcctttccgaagccgagaccgtggcggagcacagcgacgttgtggtgctggtgacgggcctcaatgaaaatcttgagggcgaggagatggaccagagcaattctgtcggctccggcgacaaggcgaacttgctgctgcccgcgccgcagagaaagctgatggagattgtcgcgaagaccggcaagcccgtcattctcatcaatatgaccggcagcgccatggatttgcgctttgcggaggaaaacttctccgccgtagtgcagggctggtatccgggtgcacgcggcggcaaggcgattgcagagcttttgttcggcaagtattccttcagcggcaagctgcccgtgacgttttataacgactccgacgagctgcccgcgtttacggattacgcgatggaaaaccgcacgtaccgctactttacgggcggcgtgctgtatccgttcggctatggcctcacttacggtaaaacggaagtgacgaaagccgaaatgcgtgatgacggcgagcactatacgattacggcgacagtcaaaaatgagggctgtgccgtgcatgagattttgcagatctatgtgcgtgacaatgaatcagaattcgcggtgcgcaaccacagcctttgtgcgtttaaggcggtttcactcggtgcaaatgagacgtgtgacgtcgagatcaccgtgccgaaggccgcgcttgaaattgtggacgacaccggcacgcgccgcgtagacagccgcagcttcacgttcttcgtcggcacctcgcagccggatgaccgcagcgcggagctgcttggtacccgcccggttgcggtagaactcaagctgtaataaagtaaatgcaaacgaccctttcgcggcaatttgcccaccgaaggggtcgttttgtctgtgactttttaaacatcagtgtacaaggggtacaaacaagataaaatagaaatgaggggcgatagagcggaaa

SEQ ID NO: 3296 - DNA, 6343 bp, Unknown
  16S sequences of unknown bacteria
cagagtttgcgccgcgcacggcgcaaataaagtcaaaatcattttctccggcggcgtgtacgtcggggaaaatacttctcgccctgcaagttgggtgagactccaattgtgcaagctctgcgcggcacaattggtcaagtcgaacccatgcagcgctgtggaatttctgtgccgaaggcgcagaaattatgcgcgcagcagggtgcaagcccctcaaacgagagcccagcgaagcgggtctcgtttgagagcttgtcaaaaatacttttttgacaagctctaccggatgagcccgctttctttcagcagaagctcgagatctgtacccttgaccttcttcaaaacgattttgagcagctccttttccccaaaggagagcttcgcctcgttcaggggctttttgtcgatggcgtagtagcaagcacgcagcagctcccgtacatcatacttgctgccccagacctccggcacgccgcggtcaatatccagcagggtgtagaccgactccatcccggtccgcatggaatactcggtggtaaagatggtatcccgcggggtctcggcaaattggccgatgaaagcaaaattcacagcgccatcgggcacgaccttcggccggtcggattccttgcggggctggaagaaggcgttgatatagggcatgaagcaagtcgtcgtgttgcaggcatcgtgggcaagcgtgtcgatcttttccgccggtacgccgatgtggtacagccactcctggcagacctcctcaccggtgcagtcccgcatggccttctttatataattgccttcctggttggtatttaggccatacagccacacaagcaccatgttcttgtcctgcgccttgaactggggctggcggttgatggtccaggagagataccagttgtcggtgctgtccttgacggtgacgatgccgccggtggttaccttgccggcacgcgggtcgcgcttgcagatgttccgaatatgctggatgatctcctcgttggaggtagccacggtggcgctcatccagttggtggcatccacatcggagcagaatttctccggattgccgtactcaccgtgctctgcctgcgcggcaatggccttccacatatcccacgactcgccagcgccgttcttcacgccggacaggtccggggcatgagtctggtcgccgtagcaggaggtatcggtgcagcagccgttggtgatgaacaccagatcatcctcgatgaggtcgatggtctgctcctcgccatccttgacatagacgatctgctttgcgatcttcttatcgccctcattttcaataatgacgttcttgacatccatgccgtactcgatctgtacgccgtgcgcctccagatatttcaccagcggcaggatcatgctctcgtactggttgtatttggtaaagcgcagggcgctgaaatcgggcagcccgtcgatgtggtggacataccggcacagataccgtttcatctccagcgcgctggaccagcgctggaacgcgaacatcgtctgccagtagagccagaagttggtgctccagaaggagtccggcaggacatcagagatcttcttgtcctccagatccttttccggtgtcaggaacagcttggacagcgccagggcggagtccttgtccagcttgaattgcttgtccgtgtgggcatcctcgccgcggttcacgctggcgcggcacagggagtagttggggtcgtgcttgttgagccaataatactcatccagcacagagacgcccggcgtctcgagggagggaacgtcccggaaggtgtcccacatgacctcgaaatggttgtccatttctcggccgcctcgcataaagaagcccttggtaatatccttgcggccgtcgcagctgccgcctgccaggtccagcttttccagcagatggatgtgctcgcctttcatctgcccgtcgcggacgagataaaaagccgccgtcaggccagcaaggccggtgccgatgatataggctgattttttgtccacatccttgggcttttcgggatgggcaaaggattcgtacgtgccagcggaataatacataatcgtaacctcctgttgtgtttcattttttcttttgttggtttcattatagcgtttcccgtctggcttgcaataaacagaaaaacctccgtgataaaagtcttatcacggaggtaactgtgtaaaagttttaatcaaaagcacaaaaatgataaaatcagaattggaaccgggcgagtgcagcagacatcgagcctttgatgagcttggcaagccgattcacgatctgctgcgggtcctcgcgcatatcctctttgatccagtcaagcatcagcccaatcaaaatataggcatagatttgggcaataaactgcttgtcctcatcccggactttcctcgtcccgacttcttcgttgagcacatccagtaaaagctggtccaccagcggctgcaggtatttttccacctgttcccggtggacgcagcggtaaacattcagaataaacggcttattctcctggactgcttcaaaaatctgcaaaaggccctgctgccatgtctcatacgtctttttttcattcagcgccttcttagcatcttccaggcaggaccattccacaagatcgtagatatccttgaaatggtaataaaatgtcatgcgattgatgccgcagtcctcggtaatgtcattgatggtaatcttggtcagcggctttttcagcagcagatgcttcagtgactgttccaaggcacgctttgtaatctgtgacatcgtagcttgctccttcccaacagatccgcaaatagatggcccaaccgacggcgccaaacaggggagaaaaccacgtccaaccggtcggcgcgccgctatcttgtattttataagatttttgcccaaagcgcaagcactgcccttcgagaaaggcagccccgtcttatcacgcggcgtaggcgatcgggtatgcttgcgtgcggcgttttttacgcctgcccacccgcgggcggggtatggaggcggaaggtgtttttgtagtattccagcagcccatcgcgctgcattttccccagctccttggagagggcgctgcggtcgacattgaggtaatcagccagctgctggcgatcaaagggcaactgcagcatcgtcgtcccgcactggacggcctgggcggagagataggtgaggactcgcccccggattgtcttggcgccggtgcagaacatgcggccggagagggcgaggtttttagaggccaggatggcgatgagattcgcctgcagcttgccgtaccacgatttttccgcattcgccggggccagcagcgctggaaggcggagaaattcgacgctgcaggcttccgctgccaccgcgtcgaccagcatcggcccggcgcagagggcgtaggtctcggcaaagacctccccggcggcgacgtggccgaggatgctgcggttgccccaaaggtcgttggcttcaatatgcacgctgccggacaggacgataccaagctccgcgacctgctggcccgcgtggaagatcaccgcccccttggcaaagctgccccggcgcgtgaagggcccgatggcggccagctcttctggggtgaagctttgaaaaagggcagatttttccattgaaaccactccttttcgtggttataaccacggacgatttgtaactatcctactatactaaagccagaaaagcaagggaacaagcggttcccgcgagaataatttttcggaggatatgacgatggtccgtaaaatcgttcacattgaggaagaaaaatgcaatggctgcggcgcgtgcgcgaatgcgtgccacgagggcgcgatcgccatggtaaatggcaaggcgcgtctgctgcgggatgactactgcgacggcctgggcgactgcctgccagcctgccccaccggcgcaatcacaatcatcgagcgcgaggcggaggcctatgacgaagcggccgtccaggccaagcagggcaaagcggcggcccagccccacgccgcccccggctgcccggggctccggatgcgccagctccgccgcacgccgcccccggcggaggcctcgcgccccggtacgatgccctcgcagttggctcagtggccctgccagatcaagctggcgcccatccgcgcgccgtattttgaaggcgcgaagctgctcatcgccgccgattgcagcgcctttgcctgcggcagcttccacgaacgctttatgcgcggcaaggtcaccctcatcggctgcccgaagctcgatggggtcgactacagcgaaaagctggcggaaattctccggcagaacgacatcgagagcgtgcaggttgtccggatggaggtcccgtgctgcggcgggctggtccaggccgtccgccaggcgctgcagcgcagcggcaagtgcatcccctggcaggtcgtgaccctctcggtcgacggccaggtgcgcagcgaagtgtaacaaatttaaaaacgctcccggcgtgcatctcttacaaaagaggttgcgcgccgggttcttttttgcccgggccgccgcttcgacaaaacatttcgccccgcttcgctatactggaagcagggaaagccaaacgcgcggggattgcggcaaattctgagacaggaggcattgggaatgaatctgacaagttacctgcaaaacaggcagctgaccgtagcactgagcggcgagatcgaccaccacagcgccaaggagatcatgcaggcgctggcggcgaaggtggagctctatctgccgctggtctgcattttggactataaggatgtaacgtttatggattccagcgggatcgccatccttatttttatgctgcggcggatgcgggagctgcagggtgagctgcggctttgcaatgtcgcggcgcagccgttgaaggtcatgcgggccgccggggtgaaccggctgctgaatatccaggaggtgtgcagaaattgaatgtactgaatcaaatgcagctggaatttcccagccgatcggccaacgaggcctttgcccggaccgccgtcgcgtgctttgccgcgcagatggacccgacagtggaggagctcaacgacatcaagaccgccgtctcggaagcggtgacaaattgcatcgtccacgcttaccccgacaaaattggcaagatcaccctcaaggcccgaattttagagggcaccgttctggacctttccatccgcgaccggggctgcggcatcgccgatattacccaggcgcggcagccgatgttcacgaccggcggcgccgagcgcagcggcatgggctttacgatcatggagagctttatgactgccatccgtgtcacctccagccccgggaaggggacgtgcgtctatctcaagcgaaaaattgtccgccgggggagccgggttgaacgggacgtttgagcagctgctgggccgcgccaagggcggcgaccgggacgccgcccagcagctgctgctggaaaataacggactggtgtggtccgtcgtccgccggttctacggccgcggtgtcgacccagacgacctctaccagctgggctgcctgggttttttaaaagccctggagggctttgaccccgcctttgggacccagttttctacctatgccgtccccaaaatcagcggcgagatccgccgctttttgcgcgatgatggggccgttaaggtcagccgggcgatgaaggagcaggccgcggccatcaaaatggcccgccagcagctgacggcccagctcttccgggagccgaccctctcagagctggcggaaaaaacaggcctttccccagaggagatcgccgtggcagagacagccaccagcgccaccgagtccattcagaagcagacgggggaggacggcttctctttggaggacgtcttgaccaagggggacccggaggaggcgatgatcgagcgcatcgccctgcgggaggccatcggggccctggcacagcgggagcggctggtcattgagctgcgctatttccgggccatgacgcaggagcaggtcgcccgggtactgcaggtctcccaggtgcaggtctcgaggatcgagaaaaaggccgtcacgaatctgcgcgggctgctgcaaagtgaatagcagggggaagaaggggaaagttttttgccccagcctgtcgacaaaagcgccaaaatatactaaaatagaaggcacaagcgcgttctgcgcgcgattttttatgacaggtgaagctatgaccgaagcaagcaagcagcgctttttgcaattgcgcacgaattatatcaaaaacgaattttccaacctgaaccctcagcagctgcaggccgtcctccagacgga

SEQ ID NO: 3297 - DNA, 26987 bp, Unknown
  16S sequences of unknown bacteria
catactttaaaaatgacgaaaagagaaatccgacgattacggagctcaaagtaatagatacatattggtccgatcactgccgccacaccacttttaatacgaagattacggatgtgcagtttgaagacggcccttacggtgatattgtgaaaaaggcttttgacgaatatcttgaaatgcgccgcgaagtatacggagagcgtgagaatgagaaagatgtgagtcttatggatctcgcgtgcataggtgcaaaatacatgaaaaagcacggtctgcttgatgacctcgatgagtccgatgaaataaatgcgtgcagcataaaggttaaggctgaagttgagggtgaaagtgaagactggatagtgatgttcaagaatgaaactcacaatcatccgacggaaatcgagccttttggcggtgcagctacctgccttggcggagctataagagacccgctctcaggcagagcttatgtatatcaggcaatgcgcgtaacaggtgcagccgacccaagaacgcctgtaaacaagacgcttgcgggtaagctgccgcagagaaaaataacgactgaggcggcagcgggctacagctcatacggcaatcagataggtcttgctacaggtcaggtgacggaaatatatgatccgggatatgtggccaagagaatggaggtcggtgcggtaataggtgcagctcccgccgatcatatcagaagggaaaagccaaaaccaggcgatgtcatcatacttgtaggcggaagaacagggcgtgacggctgcggaggcgctactggctcttccaaagagcatacggaagagtcgataatgacatgcggctcggaagtacagaaaggaaatgcgcttactgagcgcagcattcagagaatgttcaggcgcaaagaagtggcgcagatgataaagagatgcaatgacttcggtgcaggtggtgtttcggtggccattggagagctggcggacagtatagatgtagagctcgatacagtgcctaagaaatacgaaggacttgacggtacggagcttgcaatatccgagtcacaggaaagaatggcggtagttgtagataaagaggacgccgcgcagtttataggttatgcgaatgaagaaaaccttgaagcgacagctgttgccgaagttacggacagcggacgcttcagaatgtatttcagggagcagaaaatactcgatctttcgagagattttctcaacaccaacggagtgaagcaggaaacgaaggtgcttgtaaaaaataacgataaagtcgataaactcttcacaagcccggccggcatcaaaccgcaggattatctcttggacttaaattgctgcagccagaaaggacttacagagcgctttgacagcacgataggcggaaacacggtattgatgccgctcggaggtaaaaatcagctgacgccggcatgcggaatggcagccaagatcccatctctgaacggtgaatcgacgacagcaacgcttatggcgtacggctttgacccgcagctttcaaagcagagcccttaccacggcgcaatgtatgcggtaatagattcggtgacgaagatcgcggctatgggcggagatatttctaaagtaaggctttcgttccaggaattttttgaaaagatgacggataatcctgttgtgtggagcaagcctttctcagcacttctcggtgcgctcacagcgcagaaaaagctcggtatcgcggccatcggcggtaaggacagtatgtcgggaacgtttatggatataagtgtaccgcctacacttatctcatttgcagtaggaacggtgaatgcagatatcgtaatatcgcctgaattcaagcgtgaggacagcagtatcgtatggctttatccgggcagagatgaaaacaacatcatcgacttcgacaactatatagcaaatatgcagcgcgttaagaaactggcaataagcaaaaatatcctttctgcgaatgtcatcggcaaaggcggaatcttcatttcgctggttaagatggcggcaggaaactcgataggcgtggaaatagacaacattacagaagaagaattaaaatgtgaggactacggcggacttcttcttgaaatagcggcggaagaggatataagagatgctttcgcagaaacgacgtataaggtaattggaagaactacagcaaaaggtttgatcgatatacactgcgcgggtgtaacgatcggtctcagtcaggctataaatgactggtgcgagccgctcgaaggtatattcccgacgagaacagccgaattcagacgcaaaaaagacgataccatagttcctaagatttcgtgccaccagaggccggagataagtgcggcgactaagattgcgaaacctcgcgtactcattcctgtgttcccgggtacaaactgtgaagtggaatcgatgcagactttccgcggtgtaggtgcggccgttgacgttcatatcattagaaatatgacggaacacgaccttgaggattctataaaagaaatggaaaaaaagataagagaaagccagatagtaatgctgccaggcggcttctcaggcggcgacgagcctgacggcagtgctaagttcataacagcggtattcagaaatcctcgcattaaggatgcagtaacagagcttcttgaaaaacgcgatggacttatgctcggtatctgtaacggatttcaggcactcataaagctcggacttcttcccgcaggcaagataaccgatatgaccgatgatagcccgacgcttacatataacaggatcggaagacatatgtcgcggcttgtacgcacaagaatagcctcggtaaaatcgccatggcttgccggtgtaaatgtaggcgatattcatacagtggcaatttctcatggcgaaggaagacttatcgccagtatggaaatgatggacgaactcataaagaacgggcagatagcgacgcagtatgtggatttaaagggtgagccgacaatggatatcgctcataatcccaacggttcggtgctggcagtggaaggtcttatttcacctgacggcagagtattcggcaagatgggacattcagagcgctggagcgtcaatgcatataaaaatgtgacgggcagcaaggatcagagaatattctcatccggtgtaaattacttcaagtagaaaaggaaaggagctttgatataatgaaagcggcaataataatgggaagtaaatcggactatcccgtaattgaaaaagccgaaaagatattcgatgaattcggtgtagaatacgaaacgagaataatgtcagcgcacaggactccaaaggcagccgaagatttcgctgaaaatgcggaaaaaaacgggtttgaagtgataatcgcggctgcaggaaaggcggcgcaccttgcgggagtgctcgcggcacagagcccgcttcccgtaattggcatacctgttaaatcgagcacactcgatgggctcgattcgctgctttcgacggtgcagatgcctaagggcgtaccggttgccacggtggcgatagacggaagtgaaaatgcggcgctgcttgcaattcaaatgatgagcattaaatatcccgagctccgcgaggcaataaaggcttacaagaagcgtatggaagaagagataactgcgcttgattgcgaatttagaaaaaacaataaaaattaaaaatggatagcggccaaacatataaatgagatgcgtgcggaccaaaaaaacgccgaagaagataaaggagaaaggaaacgggaggtaaacgaaatgcagaaactggaaatgatttatgaaggcaaggctaaaaaagtatataagactgacgaccctaaactttatatcgtagattacaaggatgatgcgacggcatttaacgggcagaaaaagggtcagatagcgggaaagggtgttgtcaacaacactatgacaaacatagtatttaagaaaatagaggaaagaggagtgcctacgcatctggtagagcagctttcagaaagagaaacgcttgtaaaggcggtgaagattataccgcttgaagttatcatcaggaatgtggcggcaggctcgttttccaaaagatacggcgtgccggagggacagcctcttgccaagacggtgcttgagttttcatataagaacgatgatctcggcgatccgcttatcaacgacgatcatattcttgcgctcgagcttgcgacgcctgaagagcttgaacttgtgagaaaatatgcctatacggtcaatgatgtgctcaaggaattttttcttgagagaggcttaaagctcatagattttaagattgagttcggcattgcagatggacaggtacttctggcagatgaaatttcgcctgatacctgcagattgtgggatgttgagactaatgaaaagatggacaaggaccgtttcaggcgcgaccttggcaatgttgaagaaacttatttggaagttttcagaagagtacaggaataaaaaatacgggagtatagatgatgaagaacgaaatacatgaagaatgcggagtattcggggtatttgcacccgaatcatctcctgttgcgagcacggcctattacggtctgtttgcgcttcagcatcgcggacaggagagctgcggtatagttgtaaacgacgacggcgtattttcgtattacaaggacgtaggtcttgtaaacgatgtatttacacccgatgtgcttaaaagcctcggaaacggcaatatggcggttgggcacacaagatacggtactactggcaacaatgacaggcttaattctcagccggtagtcgtaaatcatatcaagggtaaaatggcagtgagccataacggcaacctcgtaaattcgtatgagctccgccgtgagctcgagcttaagggctcgatattccacaccacgagcgatacggaggtaatcgcctacataattacgcgtgagagaataaatacgagctctgttgaagaggccttaagcaatgctatggacagccttgaaggcgcatactcgctcgttattatgtcaccgtcaaagattattgcggcgcgcgatccgcatggattcaggccgctctgctacgggcagacagaggacggcgcgtatattattgcttccgaaagctgcgcactcgatgcggtaggagccaagtttataagagatcttgacccaggcgaaattttggtgtttgagaagagcggagtgcgttcactcagggaccactgcggaaaagagcctcacaaaatctgcatttttgaatacatttattttgctcgtcctgattctgtcatcgaaggacagtcggtgcacaatgcgagagtaaaggcaggagcttgtctcgctatggaacatcctgtacaggcagatgtcgttatcggtgttcccgattccgggcttgatgctgcaataggctatgcaagacagtcgggtatcccttacggtatcggatttatcaagaataaatacataggacggacatttatagcaccggggcagaaagtgcgtgaggacaaggtgaaaataaagctcaatccgatctcggagacggtaaagggcaagcgcgtggtgcttgtcgatgactccatagtgcgcggcactacctgtgcgagaatagttaagctgctgcgcgaagcgggagcgacggaagtgcatatgagatcctccgcgccgccattcctcaatccgtgctattacggtacggatatagattcgcgcgatatgctcatcgcctgcaatcattctatagaagagataaaagatataattggtgctgacagtctcggctatctcaatgttgaacatctgccgatgctgataggcacgtcggaatgcgagggttattgtgacgcttgcttcagcggcaagtatccgacgcgagagccgattgcagcaggcaagaaccgatttgagcgcaagctgagcgagagagcaaaggaggacgaataatgaagagtcagagcgagagctacaaggcttcgggcgttgatattaccgcgggctacaaggcggtagagctgatgaagagccatatagcgcgcacggtgacttctggtgcagtgtcggatatcgggggcttcggcgggcttttcgagctcgatatagacggtatcgagcatccggtgctcgtaagcggtacggatggcgtgggaacgaagcttaaaatggcgtttcttctgaataaacacgatactgtgggtatcgactgcgtggcgatgtgcgtaaatgatattatatgctgcggggcaaaaccgcttttctttctcgattatattgcctgcggcaagaattatccagagaagatagcggaaatcgtgtcaggagttgccgagggctgtgtgcagtcgggcgcgagtctcataggcggagaaacagctgaaatgccgggattttactctgaggacgagtatgacttggccggttttgccgtgggtgttgtcgataaagataagataatagataaggaaaaggtaaaagagggcgacataatcatcgcgattccgtcgtcgggtttccattcaaacggctattcgcttgtaagaaaggtgttcgatgtagaaaatgcggatctttcgctgcggcctgaagcgctcggcggcaggacgctcggagaagcgctgctggcgccgacgaaaatatatgtgaagccgattttggaacttctggcagctgtaaatgtcaagggtatttcacatattacgggaggaggcttctatgagaatattccgagaagcattcctaagggactttcagcgcgaatagagcgaaagaatgtaaaagtgctgcctgtgtttgagctgcttatggaagcaggcggtattccggaacgcgatatgttcaatacatttaatatgggcgtgggtatgacagttatagttgatcctgctgatgcggataaagcgctggcagtgcttaaggatagcggcgaggatgcctatgtgctcggcaaaatcgtgcgcggagaggacggcgtagtgatatgctgaaaaccaagatagccgtgctcatttcgggcggcggtaccaatctgcaagcgattatagactttgcgaagtcaggcgatcttaagagcggagagcttgcgctcgtagtgtcggataaggcgggagcatacggacttacgcgcgcagagaaagcgagtattcccactttggtgattgcggcagacaaatcgcttgagataactgcgagaaaggcgaagtttgaagctgagcttcagtcggcgcttgaggctgcgggcattgagatgatagtacttgccggattcatgcgcattttatcagcggattttgtatcaaaatgggaaaaccgcatcataaatgtacatccgtctcttattccgtcgttctgcggcgagggcttttacgggcttaaggttcacgaagcggcgcttgcatatggcgtaaaagtgacgggtgctacggtgcattttgtaaacgaagtgccggacggcggctctattatataccaaaaggcagtagaaattaaagacggggacacagcggagacgctgcaaaggcgcgttatggaagaagccgagtggaaactgcttccggcggcttgtgaatatgtagcaaacttaataatggagagaaaaatatgagtgtttataagacagaaaatataggaacagtacttgcaggaaacagctacggaggcaggggcatagtgataggcaagagcggagacggaaaaaacgccgtcatcgcgtattttataatgggcaggagtgagaacagcaggaatagggtatttatcgaacgcggagatgaggtcgtaataaatgcgtatgatccgagtaagctcgccgatcctacgcttattatctattctcctgttaaagtatcgggttgtcatactattgtgacaaacggagatcagactgatacgatttacgattttattactgagggaaagagctttgaagaggcgctggagacgcgccaatttgagcctgatgcaccgaatctgacgccgagaataagcggaatgcttacggtagcgagaagggattttaagtacaagctgagcattctcaaaagcggaacggaggatggtgctgtctgcaacagatatacattcagctatgcgccggtggcgggactcgggcactatattcatacatacaattgcgacggcgacccgattccgacgtttacgggagagcctgagagggttcagattccggacgatatagacgaatttacaggcgaaatctggacgaatctcgatgaggacaacaaggtggcgctgtatgtgagatatatcgatctcgtaagcggaaaatttgcgagcagaattgtgaataaaaataaataaattggaaaatctgaatggagattaggaattaaaatgaaagaatttgaattgaaatacgggtgcaatcccaatcaaaagcctgccaaaatctatatggaagatggcagtgagcttcctataaaaatacttaacggcagaccgggatatataaattttctcgacgcttttaatagttggcagcttgtaaaggaaataaatgccgagcttgatatgccatgcgcagcatcgttcaagcatgtgagcccaactgcggcagctgtcgggctgccgctttccgaggcgctgaaaaaagcgtgcttcgttgacgatattccgggactcgatgattcgcagcttgcgtgcgcctacgcgagagcaaggggtacggatagaatgtcatcgttcggtgattttatcgcgctttccgatgtctgcgacgagacgacggcactcattataaaaagggaggtgtcggacggtatcattgcgcccggttacagcgacaaggcgctcgaaatacttaaaagcaagaaaaaaggaaattacaatatcattgagatagataaggattatgttccgcaggtgcaggaaaagaagcatgtgtacggtattacctttgagcagggcagaaataacttccatataggacgcgagcttcttagtgaaatcgtaacgaagaacaaagagctgcctgactatgcggcgcgcgaccttataatcgcgctcattacgctcaaatatacgcagtcgaattcggtgtgctttgctgttgacggacaggctatcggcgtgggagccggtcagcagtcacgtatacactgcacgaggcttgcgggcgacaaggcggatttgtggcatcttagacagagtgaaaaagtgcttgcgcttccgtttcttgatagcatcggccgtgcagacagagataatgcgataaatgtatatctgtcatccgaatacgaggatgttattggcgagggcaggtggcagcagtattttacggagaagcctgagccgtttactgctgaggaaaagaaagcgtatttaagcagcattacgggtgtttcgcttgccagcgacgcatttttcccgtttggcgataatattgaaagagcgagaaagagcggcgtaagctttgtagcgcagcccggaggctccgtgcgcgacgacaatgtcatcgcggcctgtgatgcgtacgatatggtgatggcgttcactggtatgcgcctgttccatcattaggaaggccgatgtgcagttgcagttttaagcaaaaattaaaagcggataggcagcaatttgaggataagcgggaggagcgaaagagacctgtgtaaatggatcggagcagcagaatgataaaaggtttgaatgctgagcatttataggaggaaaatatgaagatattagtagtgggaagcggcgggcgtgagcacgctgtttgctggaagctcgctcagagcgagaaagttgataagatatactgcgcgccgggcaatgccggtatagcgggcgtggctgagtgcgtggatataggggccgaagatatagatggtatctgccgctttgctgtcgaaaacaaagtagatatggcagttatcgggccggaagtgcctctggcaatgggcattacggatgcgctcagcgaaaaaggtgtccgcgtatttggtccgaacaagaaatgctcgcagctcgaagcgagcaagtcgtttacgaaggcgtttcttgctcgccacaacattccgaccgcgggatacaaggaatttacggataagcaggagctgcttgacgctgtaggcatctatggatatccgatggtaataaaagctgacggactggcggcaggcaagggtgttgtcatcgcggaaaatgaagcggatgcgaaaaaggctgtcgaggaaatgatgggggcacgcatatttggagacgcaggcgataaggtagtggtagaggaatatctgacaggcgttgaagcgtcaatgctctgctttgtcgatgaaaattcgatagtgccgatggaatccgcacaggattataagagagtatttgacggtgataaaggtccgaacacgggcggaatgggttcgtattcgccgagtcttgtatttacgccggagctggaaaagcgaataatggatgatatacttttaccaaccttaaaaggttttcaagaggatgggcttgattttaagggtgtgctttttgtgggccttatgctttccgcggatgggccaaaagtcatagagtttaacaatcgcttcggtgatccggagacgcaatcagtgctgatgcgtcttgacagtgaccttgctgaaatttttgatgcggtcattgataacaaacttgcggacatagacataaagtggaaaaaagagacggccgtatgcgtcgtgctggcttcgggcggttatccgggcagctacgaaaagggcaaggttataagcggacttgctgatgtggacgacggtgtagaggtttttcatgcagggacagcttttgcggaaggctccggtgcgattgtgacttccggcggcagagtgcttggcattacggcgctcggtgcgactcatgatgaagcacgcgcacgtgcttttgctaatgcaaagcgcatcagttttgaagggatgcattatcgcaacgacatcggcacggtaaacaatacggcgaaatgataaagacaaggctgagtttagtttaccggtatgtgctggttaacaaagcgggtgatagcggtgatgcgatctatgaaatcagtatagaatcataatgtaatcataacagaataaatatataaactgcttgaggcaggcagtattaaataagcgggagtgccggttaaataaaaggcgcttccgcttattatattttgtatttgtttgttatgacattgcaggccgtgaaacggcttgcagtatgtctccagcttcgtcggccataatgggtcttcgggcaatatcggctgtcgtaagcataccgacaagccgcccgcctgcagttatcggcaggcggcgaatttggtgatgcgcaagcagcagagcggcgtcgtggatgttcatatcctctggtgccgtaatcatatttgtagacataatatcggctgcctttacagtatgcagattgcgcggcggttctttcaagcctgcggatggacataatgtatcatcgtctgcatttatgcttgcggaatttgcaaatgctgtactgtttggattttcgacggctaaaaaccgcagtacgatatcgcggtcggttattattccgagcagctcttctttatcgttgcatacggggatagcaccgacatcggttttgcgcatctgccttgctatttcaacaatggatgtgtcagggcgcacacagcagattcccgtactcataagctctttgactcgcattttttcacctcatatttcgtgatttttgcatagtttgcccgcgcgttgttttaaatatacagggcaaaaaagcaaataaaaaggtgctgcatcttagtcaattgctctgtccggatgccagaacgaaggcgaaagaagaacgagcagcgtaaatatctcaagtctgccgattaccatgaggagtgccagtacgagctgcagcggcggcaagaaaatcgagaaatttccgctggcgccggcatcgccgaagaaaatacccgtgtttgacatcacagacgctgctgcgcttatattcgtaaggaaatcaaagccctgcagtgacaggatgagtgtgccgatcaatagtatcacgaaaaatgtaagcaaaaacgatgttatttgtgcagcaacttcagcggataccgtcttgcctccgacttttaccgagacgattgcccgtggatgaattctcctgtatatagaacgtacaacgagtttaaaggctacgattacacgtatcactttgacagaaccgcatgtcgacgctgcgcagccaccgacgagcatcagcataaataggatagctatacagaaaggcggccacattgaatagtctgtaagcgcatatcctgtggtggacgaaaaagacgccgcttgaaaaaagccgtagcgtatggaatcgccaatagtgctgtatgtgccggtaaagtaaaggcaggcagaaatcataagtgatgaaataataagcagcgatagaaatgtgcgcagttccgtatcgcgcctgatttctttgaaatttcctttggccgctaaagtgtagagcgaaaagttaatagatgcgaatacggtaaataataagacaattatttccacatataaattattgaaatatgaaaggcctatcgaatgagacacgagaccagcggtgcttacgcagccaagtgtgcagataatgttgtcaaatacatccataccgcttagagcaagcagcataaattcgagcactgtaaagcctatatacataaggtaaagtatcttagcggaatctgaaattttgcttacgattttgtccatacttaaggccggcacttcagctctgaatatcttgtgtccgcctgcgccgagcgctggcagcagtgacactgtaaatacaaggatacccataccgccgagccagtgcgatatagctttccacatcaaaaaagccttgggggtgtcgtcggcaaagagaacggttgctcccgtagttgtaaatccggctgtcgattcaaaaaaagcagagcagaacgagtgtgtatatccacttgcaagatatggaatgcagccgattaaaattacgataatccagccgataccgacgataaagaatccatcgcgcgtttttaggtgatgtttttttggttttacgcctaaaatgcatacgagcgaaacaaaagcaacggcagcagcagtacaaataaaagttttgcctatgtgggtttcatggtatatgaatgcagtaatggcgggcgggagcatagcgacgccgataagcagcccgatgaaaccgtagatttttgttataagttttatgttcagcgttaatttcattatataaaactccttagcagcttaaactttttaacggtttggattccagaaacgcggagaaagaagcattagcagtgtaaaaatctccagtctgcccgcaatcataacaaatgaaagcagcagcttgataggcgcctgaaaaaagccgtaattcatagtcggaccgacagcattgaagccaggccctatatttccgatcgacgatgccgcagcggtaagagctgtcgtaaaatcgtgaccgccgagcgttatgagcacggtagttaaagtgaggatgaacatatagagaaatacgaagcctgctatcgactgtaccgtatcaattgacaaaattctgtccttgaacttaacttttactatagcgttcggatgaagccttacaagtataccgcgctttatgagcttgaacactacgagaactcgtataaccttgataccgccgccggttgacgaactgcatccgccgacaaagaacagtaaaaacaaaatcatctttggaaacgcaggccaaaggtcgaaatctgccgtgcagtagcccgttgtcgtcagaactgagacgcactggaaaattgagtagcggaaactctcgccgatggttgaaaacactcccgaaaaatatgtgtggattgttaccaaagccgttgaaattccgatgattgaaatgtatgtgcgaaattcacggtcgcgtgtaatttctctgataccgtgcgatactccgagataataaagattgaaattgattcctgcaagaatcataaaaaaggtgattatgccgtccacatatgcactgtcaaagtgagccgcgctgctgttataattagaaaatccgcctgtggcgatagtcgaaaaagaatgagtgagcgcgtcaaaccagcttaggccgccaaacatgagaagcaccgtttctgtgagtgtaaatgtgatgtaaatgacatacattgcgcgcgcagtgtttgttattttcggcattatcttgctgaatgtagggcccgtaagctctgctgccgcaacagcctggccatcaaaaccgagtgcaggaaggagagcgatggccataaagaggatgccaagccctccgagccagtgcgtgaaacagcgccagaaaagtatgcctttcggcagaatttctatgttggaaagcacggatgatccggtagtggaaagaccggaagctgactcaaaaaaagcgtcaataaaattcggaatcgcccctgatataacatatgggagcgatgatattgccgaagccgctatccagcaaaacgaaacaataagaaagccgtccctgatcttgaacggaacaggggaaggcttgactaattttaatattaatatggccaaaatgcagagaggaatggtgacgcccgtgaatgaaagcacggtatcaaactcgctgtaaatgagacttacaagcgccgacggcagcatagctattcccataacggcagaaaatattgcaattacacggactattcctctgtaattaagatacatatagttattctccttacgcgaggattttatttgagaaagctgaatttttttgttctgaacagcttttccatttccggaatttctgaaagcagacagagaattatgatgcggtcattttctctgatgatagtgcttccattcggaattattacgctgtttccgcggtggatagcagctatgattattccgtttggaatgtcaagcgacttaagcggtttgtccataattgccatatgatcgttggctacaatttcaagaatttccgcctgtccctgtatgagctgcgatgatattacgcggtttgcgccttgtatgaagcggagcagatgactggcttcgatatcgagaggattcagcgccatatctataccgatgccctcgatgatgccgttatagctttcgcggcttactttggcgatgacatcttcgataccatgctgttttgccataagggcgaggagcaggttttcttcatcataaccggtagccgttacgaaagcgtccatttcgtttaagttttcttcttcgaggaatgctatgtccgtagcgtcgccgtgaagtatcataacatcgtcgagattggcggagagatagtggcagcgttctttacttgcttcgacaattttaacagagatgccgaactccgaaagcttacgtgccagataaaatcccgtttttccgccgccgataatcatgactttctggaggtccgtgtatttgccgcgggtgcgtactttggagccgaaagcggaaattgattctttttcccccattatatagatactgtcatttttcttgataacagtgttgccgcggggaacgataaccttgccgttgcgcgatatggcaacggcgagcataccaggaagtactttgttgaactcggacatttcaaggtctatgagcttggggaatttgctgacgttaaattcgagcagagatgctttgccgctcgtgaaaataccgttgctcaaagcgtatttttctataagatatttgtatatttcaagcgtaatcgaaagatccggattgacgagatagtctatattcatcgtttcacgtataaaatcgagctgattcatatgctctgggtcgcgcactcttgccgcagtcctcgagcagccgagtttttttgcaaatgaggcgattatgatattctgctcgtcgctgtttgtgcaggcgaggagaaaatcataagtgctgataccgatactttcgagcactcgaacttctttgccgttggcgtttactgtcattatgtccatttgtgttatcagtttgttgagagcgttttcattagtgtctattacggtcacggaatggtcgcctccgagaagagcttcggtgaccttaaagccgagcttgccggcgcctacgattgcaattttcatattgtcgcctttcttaacgaatataaattccaaattattgtatcacttctttatattattgacaaggataaataaaaaaacaattgcaatataatatatttaaaccatttagggtatgaaaaatactgtttttatgagcaagtatgtgataaaattatagcaggaaagtgcaatcatatctgtgctatggattaagagatggtgcataaatgcgcagagatgcaaatgagaatctatgtagatagttttagggataatgctatggaagatatgaaaaaggatagaggcagcatggagagcagctctggagcaagcaagtccggggcaggagcaagaaggagcgggaaaagcaaaattggactcatagctcttgatcttgacggtacaacgctgcgctcggacaggcgagtgggagagcgaacgaaagctgcacttacggaagcagcaaaacgaggcgtgcatgtggttatagcgactggcaggtcgcttcattcgctgccggaagaggtgcttgcagtcgaaggtataaaatatgcgataacatcaaacggcgctaaaatagtgaggcttgaagataaggagataatttattcaaattgtattgcaccggaggcttcgcgcagcattgcagagattctaaagaaactgccgaacgttgtggaaatattcatagacggtcaggcatatgcggaggcgggcaagctgagaaatcttgaaaaatatggtattacggggctttctgccgattatgttatgaacacgcggaggcctgtttgcggtctctttgaatttatggaagcacatatagaagagatagaaaatataaatgtaagattaaaggagtcggacgataagaaagcgctgtgggagctttttgagagaagcgcagatgttacggcaacgagctcatttatgcagaaccttgaaattggcggcggcacaacgagcaaagcaaacgcgatgctggcgcttgctgatatgcttggggttgagcattcgcgcgtgatggcgtgcggagacggtcttaacgatcttgcgatgcttagcgctgctggaattgctgtggcgatgaaaaacagtgtgccggaggtgcttgagatcgcagattttgttaccgacgacaacgatcatgatggagttggagctgcggtggagaagtttgcgctttaagatcgaaggggtaaatttaagatgagaaggtacgaagtgcgccgaacgacggcgcatagttttttgaaaggaaaataaaaatggaatggttggtgctgagtctgttttgcagcgggcttttggtttccgttttactggggatttccattttgtatccgctgtttgcagggcttctgatattttttgtttatggcagagcaaaaggattttcagctcacgctcttgcaaagatggcagtggatggaatacttactgccaaaaatattttgataacgttttttttgataggtatgctgacgggtatctggcgtgcggctggcaccattccggtaatcgtattttatgcgtcgggacttatacgattgcctgtttttctgattatggtgtttttgcttaattgtgctgtatccgtattgacaggcacttcatttggaacggcggcgacaataggtgttgtttgtatgacgcttgcggatgcgctcggtatcagcaaagccgtctgcggcggcgctgtgctttcgggaatatattttggcgacaggtgctcgcctgtttctacaagcgcgctgctcgtagctgagctgacaaataccgatatatttgtaaatataaagaggatgattcgttcctctgtcctgccgtttacagctgcctgcgcggtttatgcagccgccggctttgtttttactgcggatgccggcggttcgacagcggcgcttaaagctgtttttgagagagaatttaatcttagccctttgacgctgataccggcggctgtaattcttgtgctttcgcttgtccgtgtaaatgtaaaactttcaatggctgcgagcatacttgcggccgtgcctctgtgcattgtgcttcagggtgcttcgtggggcgatacggctctttatatgctgcgcggttttagcgctgcaaatgcgcaggcagatgcaatgcttagcggcggcggcgtggtttcgatgctgaaggtagccggtatagtctgtatttcttcagcatattcgggtatttttaaggaaacggggctgctcgataatataaaagctgcgctgcataggcttgcaaatgtgtcgacgagctatatagcgtcgctcattacgtctgtgcttacatctatggcagtttgcaatcagacgctggcgattatgcttacgcagcagctgtgcggggagcttgaagaggatgcatacgagtttgcaaatgatatggaggatacggcggtgatagtaccggcgcttgtgccgtggtctatagcttgtgccgtaccgctgtcttcgattggggcgccgacgcaggcagttatttttgcgtgttacctctatttgctgccgctgtggcggtgcctgatatcggtagtacttaagcagaggcgaaagtgacggtgctttggcctgaataaaatgcagttatttagaaaagaagccgacaaattttgtttgatttgctggcttcttttgtttgcacagcaatattagattataacttaatatgaatattatggaaaaataattgacatttaactgggaatatgagaaaataatgtaaaattatataataaaaagtgtttgaaagacaaaaacagaaagggaaagaaatgaacgaaaggggtaaactcggaaaagagggagaagacagagcttgcgcttaccttgaaacctgtggatacaggatagtagaacgcaattttagatgccgttcaggggagatagatatagtggcggcagaggagcgtggtggtatcatttgttttgtagaagtaaagacgaggcgcggatgcgcttttggcttgccaaaagaagcagtggatcgcaggaaacagagaaagctgtgcgctgcggctaagtactatatgctgtgccaccgcgaatatgaaaattgtttgctgcgtatggatgttgtggaaatgctgcatcttgcaagtggtatatatgtgaatcacataaagggtgcgtttggagaggtgtcatagcgatgctgtcgaaggtttgtacagcagccatctcaggtatcaacgcgtatccggtgactgtagaaacggacatttcgcacgggcttccggctatgtatactgtcggtctgccatctgcaactatacgcgaggccagggaaagagtgcgctcggcgctcataaattcgggctgtgattttcctatgcagcgcattacgataaatctgtctccagcggccaaacgcaaggaaggcagccattttgacctgccgatggcaattggtatacttgcctcgaacgggagcatagagagcagcaatctcaaggatgcaggcttttttggggagctttcgcttgacggacgactgatagcggtcaaaggagcgctgccgcttgctatgggtatgaaagaaagcggcgtcaggcgtgtagtgtttccggcagcaaatgcggcagaggcttcaatggtaaatggtcttgatattattcctgcctataatttgtcggaggtggtagcctacttcatgggtaagaaaaaaatcatcatatataataatgaaaaaattgttaaaaatgaagataaatttgatatggatttttccgatgtggcggggcagtatgccgcaaagcgcgcaattatgatagcggcagcgggcggtggacacggaatatatctttcgggcgcaccgggatcgggaaagacaatgctggcacggcgcataccgacagtgatgccggagctttcttatgaagaaaagcttgagctcacaaaaatttatagtatatcaggacttctcggcgaaaatgagccttttatagaaaaaaggccgtttcgtatgccataccatgcggtaacgcctgcggctttgcttggcggagggcatataccgaagcctggagaaatttcgcttgcgcattgcggagttctgtttctcgatgaattccctgagttcgataagaaaataatcgagctgctgcgccagccgatggaggaaggagaagtgtcggtggaaagagcggatggcagagttacgtatccggcctcgtttatgtttgttgcagcaggtaatccatgcaaatgcggttatttcggagacagcgcgcataggtgcatatgcagcggaagcgaactccgcagctatcagagcaagctttccggcccgattgcagataggatagatattcaggttattgtggaaaaggcgcaggcagaggagctggaaatgcgcggggaaatcggcgctgcggaaaatagcgcaagaagcgccactatagagaatacaggaatgggtagaagtgactgtttaagaagttcagctgctatgcgtgaggttgtatcttatgcacttgatgtgcagaaagaccgctataaaaacgaaagcgatgcgcttcttacaaatgcaaagctcacgggcagacttgttgcaaagtactgtccgcttgacagttcaggaaaggagcttctcagaaacgcgtatgaaaagctcggtatttcggcgcgcgcctatgaaaaagtcataaaggtggcgcggactatagcagatatcgaaggcgaagaaaacatacgcgattttcacatagcggaggcactcggctacagagtactcgacaggatatacaggaattaaaagaaaggtgtataatggaaaagggaatggcagaatcaatttatagaaaggaaagaaaaagtgaggtaaaagcggatatcagcatgcagcattacaaaaatgcgcgcagcatgccggaaaccaattgtgtattaaaaagcggaaaaataacggatgaatcggcagaatacccggcgctgcttaaagaaatacaaaatgcaccaaaggagattttttaccgcggacgtatagattttttaaaggataggtgtgtcgctgtggtaggaacgagaaaaccgacggaatatggaaggtgggcggcgtataaaataagtaaaaggcttgcagaagccggacttactgtggtgagcggtatggcagccggtatcgacacgctcgcacataaaggagcgcttgcagcaggcggcaggacaatagctgtgctcgggtgcggaataaatatatgctttcctgcgtcgaataaagctttgatgcgagaaatagaaaagcgaggtcttatcatatcggaatatccgaatgaatatccggcggcaaaattcacatttccgcgacgcaacagaataataagcggactctgcgaagcagtaattgtaatcgaagcggggcttgcaagcggctcgctcataacggcagagcttgctgctgaacagggtaggacagtatatgcgcttcctggtaacataaacaatgtgatgagcataggcacaaacaagctgatatgcgatggtgctcgtccgatagctgtagtcgacgatctgctttgggatcttggcgcgcgaaaagatgtcgaccgtgatttttacgcgacattgtctgaggaagaaaaaattgtaatacgtgcgatagaggaaagcggcgaagcgacggtaaatttgatatgtgaaaagataggtgcgagtcccggaaaagtaggcggaattgtgactgttttggagatgaaaggaataatttgcgcgcatttaggaaaaatttttattgcaaaataaaaaaagattaaatataattatttcattgtaattctcaggaggaaatatattatgggtgcagccaaaaaaaatttagtaatagtggaatcaccgtcaaaggcaaaaaccataggaaaattcttaggctcgaaatataaagtagtggcctccgtcggtcatgtgcgtgatcttccgaaaagcaaacttggcataaatatcgaaaacgattttgaacctcaatatatatccatacgcggaaaaggcgatctcataaaggaattaaaaaaggaagcaaaggcggcggataaaatatatcttgcaaccgaccctgaccgtgaaggagaggccatatcgtggcatctcgcatatcttctcggcatagatgcaaacgagccctgccgcattgtatttaacgaaattacaaaaaacgccatacaggaagcggtaaaaaatccgcggccgatagatataaaactcgttgatgctcaacaggcgcgccgagtgcttgacaggctcgttggttatcagataagcccgatcctctggcgcaaggtcagaagcggcctttctgcgggcagagtgcagtcggcggctatgaagataatctgcgacagagaaaatctgatcaaagcgtttattcccaaggaatattggaatatacaggcgattcttagcaaatcggaagcaaagacggcaaagagctttgttgccaagctgacagattataacggcaaaaaaattgaaatcacaaataagaaagaaaatgacgaaatactttcaaagatagataaggacagctttgtcgttaaaaaagtagaagagaaggaacgcaaaaagaaagcttatgcaccttttacgacgagctcactccagcaggaagcctcgacacgcctgaacttttccactagaaaaacgatgcagatagctcagcagctttacgagggggtttctgtaaaaggacatggcactttaggtcttgtgacatatataagaacggactctgtaagaatttcaaacgaagcgcgaatggcggcaaaagagtatattaccgctaaatttggcggccaatactggggcaataatttttacagtaacaaaaagaaagaagtgcaggatgcgcacgaagccataagaccatcatatatagaatttacgccggaagaaatacaggattctctgacaaaggatcagtacaacctttataagcttatatgggcgcgctttatggcaagccagatggcgcctgccgtgcatagtatcgtatctgcggaaattgacaataatggttatggattcagagcgagcggttcaaaagtagtgtttgacggttatctcaaggtatataaagccaccgatgacgaggatgacagcaagatgctgccgcatctcgaagctggagagaagctcgtgcagaaagatataaaaggagagcagaattttactcagcctccggcaagatttacggaagcgagcctcgtaaaagacttagaggaaaaaaatatcggacgtccttctacttatgcacctattgtcacaactctcgtcgacagaaaatatgtaaagagagaaaaaaaatcactcgtgcctacggaacttggctttattgtaaatgagtttatggaaaaatattttaaggatatagttgatgcagggtttacggcagatatggaggataaactcgacctcgtagaaattgaggacaatgactggaagaatatcctgcgcgatttttacggcggctttaaagcggagcttgacattgccgaaagcgaaatggaaaaagtcaagatcgaggacgagccgacgggcgagctctgtgagctatgcggcagacctatggttaaaaaagtgggacgtttcggagaattcattgcttgcagtggatatccggaatgtaaaaatacgaaaaatattgtgacaaaggttgatgtaaaatgcccaaattgtggtaaagatattgtagtgagacgaagcaaaaaaggcaaaattttctatggatgcagcggatatccggactgcagccaggtattttggtataagcctgttgacaagaaatgccctaaatgcggcagtctgcttgtagaaagaaaatttaagggaagcaagtatatgtgctcaaacagcgagtgcgattataaagaataaataaaaaagcagggaggatagaaaaatggtacaatttcatgcaacaacaatcgtagcagtgagaaggagtgccgatgatatctgcattgggggagacggtcaggtgacaatgggcgaaaccacgataatgaagcacggcgcaaaaaaagtaagaaagatatataaaaattctgtggtgacaggatttgcgggctcagtatcagatgcgtttagccttacggaaaaatttgaggaaaagctcgaagagcattcaggcaatctgagaagagcggcagttgcactggcacagctttggcgatctgacaaagctgcgagaaaccttgacgcgcttatgatagcagcggataaagaaagtatgcttgtcatttcgggaactggcgaagtaatagagccagatgaggattttgttgcgataggctcgggcggtaactatgcgtatgctgcagcgacagcgctttttaagcatacggatatgacggctgaagaaatcgtgagagaagcgctcaaaatcgcttcggaaatatgcgtttacacgaatagtaatatttcggtcgagaaactttaaggagggagactgatggcaaatacgctttataaaatgactccgaaagaaatagttgcggagctcgataaatatataattgggcaggacgaggccaagaagtcaatggctgttgcgctcagaaacagatacagaagaagcttgctttccgacgaaatgaaagaagaaataacgccgaaaaatatcttgatgatgggaccgactggcgtcggcaagacggaaattgcaaggaggcttgcaaagcttatggacgctccgtttgtcaaggtagaggcgacaaagttcacggaagtagggtatgtcggccgggatgtagattctatgataagagacctcgtggaatctgctataagaataacaaagcagagtatgcttgctgaaaaatacagcgttgccgatgaaatagcggaagagaagatcttggaagctatcattcctggcaaaaaaaagaatttgacgagcaaaaataacgcgagaggcccgtttgattttataatgggaaatttgtcaaataatagccagaaacaggaatacgagcagatgcaagccgaggaacccgaagaacgcgatgtcgagcttgcgcgcgagcaggtgcggcagcagctcagagagggactgctcgaagaccaatatatagaaatacaggtgcttgaccagcctaagggcaatgctctcgatatgagcaatgaaggtatgagcatagctataggcaatattttcggcgatatgatgccggcaaagaaaaagaataagaaagtaaaggtaaaagatgcgagaaaaatactccgtgagcaggaagcgcaaaatttacttgatatggatcaagtaacggaagatgcgcttgagaatgcggaacagaacggcattatttttatcgatgaaatagacaaaatagcgtcgggcaattcgtaccgttccggcgctgatgtttcacgcgaaggcgtgcagagagatatacttccgatagtagagggaagcgttgtaaatacgaagtacggacctgtaaagaccgaccatatgctttttataggagccggtgcttttcatacttccaagccaacggatttgataccggagctgcagggaagatttcctattcgcgtggagcttgagaatcttacaaaagagtcatttgtaaagatattgactgtgccggaaaacgcactgctcaagcagcataaggcactgctcgaaaccgagggcgttgaaatagactttacagacgaggcgattgaggaaatagctactatggcgtttatgatgaatgaacagacggaaaatattggagcgagaagactgcatacgattatggaaaaattgcttgaagatctgtcctttaatattcccgatatggatgagaagaaaattgtcatagacaaggaatatgtgagagaaaaattcagagagaaaatacacgaagaagatgtagataagtttatcctgtaatagctgctgctgattaaatatgcagttggcagtaaagtgaatttagattctatttaataaaatataattggcagaaaattaaaaaaagtccttgcaatatatgctttgccttgatataataactgaagaatatattgatttcaagtattggaggttgtatataaggagaagagaattatggaaaatacgttacttgccaaaataaggaaaatgaactgggtattccaggaaagttcgacaggcgctttttcgtttaacgatttatgcggcatattgagtgagcttctcggggtaaatgcatatattataagtagaaaaggtaaactgcttggagtgtactatcaggtgaaagaggatagcgatgctatagtcgatgctgagactggcgaagcaagactgcctgaatcgtacaacgaaggttttcttaaaatagaggaaactacggccaatatgacaaacgatgaaatgatagaagtattcggagagaattacgacttcttcaacaaatatcataccgtagtgcctattctcggaggcaagagaagatggggcacattgcttatggcaaggtatgattcggaattcagcgatgaggatcttgtgcttgcagagtatggggcaacgattgtagggcttgaaatacagcgaaataaacttctcgagcaggaagaagaagaaagggaacgtcaggtagtacagatggcaataggtacgctttcatattcggaagtcgaagccgtggtgcatatattcgatgagctcgaagggatggaaggcctgctcgttgccagcaaggtggcggaccgctcgggaattacacgttcggtaatagtaaatgcgctcaggaaactcgagtctgcgggtgttatagagtcacgctctcttggaatgaagggaacctacataaaaattgtcaacagtaaattcagagaagagcttgctaaagtgagtatgtaacaaaaatctcccg

SEQ ID NO: 3298 - DNA, 13667 bp, Unknown
  16S sequences of unknown bacteria
tattcttcttagcttgcatttgtctgcttctcctttgatggatttctcagactaaatgctaccacatattctttgccagactaaatgcaatcggtaaatgctattcttgcatttactttgcaaatttacgaaaatcagaaaaaatccgacttttttttaaaaaccccttgacaaacgcttcgtgttgtggtataatatctatgttgtttcgagagaaacaaaccggggtgtggctcagcttggtagagcgcttggttcgggaccaagaggtcgggtgttcgaatcacctcactccgaccagagaaagtcttgtaaatcttgtatttacagggctttttgttttgtgtgggtatcgctgtgccggaatcttcgggctatactggttctttcccttgacccgctgcctgtgtcgtgttataatgataatatcaactataaccggaggaaaaaaatgaccatcaccgataatgatatacaagcggctctcgcggcgttcggaatgaattacgatatcaccggaaagagcgagcttcttcgctatgactgcaagcctgaagagctgttccggcgtgagttcaagctgatactgcgacttgatcttgccgggcgttcacctgttgtcctaaagatatgcggaggggacgagcgggacaaggaggacgccgtcgagtctatgtgccgcttttcggaaattctgcgggagaacggcttcgagactccgcgccactatatgtcgggcaggaaatttgccatcacgagggagttcgacggttgtctgctcacggtcactctcgaggattttgtcgagaacgagataaagcgcgtcaatgaacacacggcatacctgaccggacggcagctcgcccgcacacacgatatatccgagaagaacgactgccacgtgaaaaacgaggtgatcttcgatttctttgccgcgaatgacctgttcgatgtcgacgaattccgcgggctcgccgggaagctgccggaaaaagagaaggagcgcgcggtgaagctgatacacttcgcggacgacatatacgcgaagcttgccccgatacgcttccgcccgaggtacgccgttcagggggatatcagcgactgcaacacatacctgacgccggacgggaacatcggattcttcgactacaactgtgccggggagaatattctcttcgcggacgctgtcatgcaaggatggttcgaggctcatctcatggattacgggacagagctgaccgatgaaatgtcagacaggatagcgcgtgagttcttccgcggatatcgggaggtgagaccattcacggatgaagagaccgccgtcctgccgggaatgtacgctttgatcagcgccttcgcgaagggaaacaaccggtacgccatgaccaacgccgtaaaggaacaggacgcggcgaagattgatgagctgctcgatatcatggaacgggaaattccggctgacagaaatattctctgaacagaaaagcgactgccgtaaccgagcggcagccgccttttatttacctgtttctgtactcactcggcgtaatcttcgtaaactgtctgaacacccggttgaaagtccggagcgatccgaatccgcagatttccgcgattgccgttgtctgcatcgaggtaccggagaggagctccttcgcgtgctctacccggaaagaattcaccagcgtgcggaagcctatgtctgtgtaccgcttcatcctccggcagagatagtgcggctcgtagccgagctccgccgctaccgtctcgagcgtcaggtcctcgtcgctgtgcgcgcctatgtacgagagaacgcgctctataagcgagccgccgccgccctccgcgaggtccggcttcgcgagaaaaccggcgagaacgctctccagcgccgttatgaggttcagcctgacgtcctgcggaaggaccgggttgtgcgtcacgaccttcggatggaattctacaaactggtccgtgtgggcaagcggcagcatctcgaacgaatgttcagagtgatttattttgtcaacaccgaactttttcaggtagtacgcgatgttctcctcaggcgcgtcaaatacgggcgactgagatgtcctgctgccgagcaggcggaaaaactccggcgcgcagtcgtgagagaagacgtgaaccatgaataacgcgtccggcgcgcactcgaaggagtgaagacggtatggaagtatgagcacgcattttccggcgggaacgtgtgtgcggacggcgtttatgtcgaccagtatctcaccctttatgacgtggataatctcggcgctccggtgcaggtgcggatacagaaagctcattccgtagtacaggcgcgcgtcgtagacgaatccgtctcgggagttcatgtcctgattgatcatattccgttcctcctcaaaaaaagataactattgtccagtattatacaataaatgactttcaatttcaagcggattatgttaaaattattgcagaggggcgcggaaagccttgacggaagctggacataccgccatttgtgccggaaaatcaacgcgccacacccgaaaggagaacaattccatggtggaaaaaatttatcttatcgcgccggaaaagatcggaacgatcaacccggacatctacggcgtcttcgccgagcacatcggaggcgtcatctacgacggcatttactgcggagacaaggcggagaatatgcgcgggttcagaaaagagatcatcgagaagctgaaggctatccgcacgccgctcgtgcgctggcccggcggatgctttgccgagacatacgactggcgggacggcgtcggaccgaaggaaaaacgcccgacgagaataaactggtggaccgagaatgacggcagatatgagccgaaccttgtcggaacagacgagtttctcgatttctgctcgcttgtcggcgctgaaccgtattttgccgcgaatatgacgtcggcttccccgagagatatacgcgactgggttgattatgtgaactctcctgagggatcaaccacatacgcgaagctgcgcgccgaaaacggtcatcccgctccgtacaacgtgaagctctggggagtaggcaacgaaaactggggcggcggcggaaacatgacgcccgaatactacgctggcgaataccgccggtacgccgaagtaatggcgaacgcctctaagggactcgagctgatcggctgcggcgcgtgcgatttcgattatggctggacacgcagggttctcggcgagctgtcgaagaagtacgtcagaatgagcggtctctcgttccacttctactgcggcacggcgggcggatcggtgaactttacggacgaagagtggaatcagcttattgaccgggcaggaaagatgcaggagcttatcgaccgccactgggctgcggctgtttcctacgggcttgagaacagcgcgaagcttgtcatcgacgagtggggctgctggcatcatgataataccgaccttgtcgcggagaatcatctcttcgagcagcagtcgaccatgcgcgacgcggtggtgacggctctcaccctgaatattttcaacaacaactgtgagaagatccgcctttgcgcggtggcgcagctcgtgaacaatcttcacgctctcttcctcgcgcacgaggacaagtgcttctgcacgccgacttatcatgtgttcgatatgtacaaggagcacatgggcgcggaggcagtctccgcgacggctccggatggcgtttcggtttcagcgtcggtgaaggacgggatgatgaccgttacgctcgccaacctgacgcccgaccgcgatattgaggtttcactcgaggcgctcggttttgagaagggaaagaccgctgaaattatgactctcggcgacggcgatctccacgcgcacaacacgttcgatgagccggagaaggtaatgccgggatgtgagagtgccgaagactttgacggaagactgacgcttgtcagaggcacggtcgcgtcggtcaggttcgctgttctgtaacagacactcacacaacaataaaataaacccggaggtatatcatgaaaagaagatcaatagcactgcttattctcgcgtcactcgttcttgctcagatttcatgcggcagccgagccgtgaactccgaaaacacatcggacagcgcatccgacacgacaattgaagaaaccacagacgacgggaaaataaaggacgatctccccgataaggacttcggcggcaaggagttcccgatcctcacgacgagctggtacaacgcgagaaattatatctacgcggacacacagaacggcgacgtcatgaacgacgcgctgtacgactcgatatcaacggtcgagggcagattcaacgtagacataaccctgacggacgacgaggacatcggcgttgtcgagaagacgcttcacaacctcgtaatgtcgggagacgacacctacaagctctatcacggacatgatacaagaacggtacagaacgcgctgaacggcgattttctcgacataaagtcgcttccggtcatagatttcgacaagccgtggtggcgcggaacgagcgataacttcacgatcggcggaaagctttacttcacagagaactgtctgtcgctcagcggtatcttcatgaactatgtcctcgcggtgaacaagaagctcgcggataactataatatcgagataccgtatgataaggtcgcggcgggcaaatggtacatagatgatctgtctgctctcctgaagaatttcccgaacgatcttgacggagacggaaacctgaccgagaacgatatgtacggtatggtcacgagctactacgcgcacatcggtctgctgtccgaccttggtggtacgacgataacgaaggacaattccggaaatctcaaatttgtcgacaacacctcgcatatagtcggagtgctcgagaaggttgaggaactgatgtcgcacggctctgacaagttcggaccgggcaatgagttcgggcaggtcgtcttcgtcgagaacaagtcgatcttcatgttcggcgagatgcgcacgctctacactcaggtcagaccgaaggatatcgtctacggtattcttccgttcccgaaatacgatgagacgcagaaggattatctctctgccggatgcgcaatgtactggggagttccgaagtcggcgtcgggcgacgcagagatgatcggtactgtcatcgaagccctttgctgcaagaactacaacgatgtcgtcccgaaggtatgggaacttgtcctcggacgcaagctcgcagattcggatgaggatactgcaatgttcgaggtcatccgcagtgcggagttcgtcgatctcggtttcgcattcagcggtcagtcgagtaagctcactgatcttgtcttcatgacacagaataccaagagcgatcaggtcgcctcctatatcgaaaagaggcgcgatgccgtcatcgcaaagatcgatgagataaacacaacgatcgcggaactcgaatgagcggtcggaaacaaaattaattattacatccgcgtcgggcgcttccgggctttatccgggggtgttccggcgtgttttctgttgtttcgggtatttgaggcatcgcaggttcatggcggctctcccacctcagcataaaatgagagcagaccggtgatgtgttcggtctgattttcataagagaggatggtatacttgacaaacgacatgagacagggtcaggtgccctttgacgagctgcgtctgtccgggcggttcccggttgctatggcttacgttccgtggcagaggctcgacgagatgtacacgccggagacggcgctggaacgcgggacgctctatccggaactcgacaagccgttcatgggctgcaccgtgatgagcggtcagaacggcgtttgccgccgcgccgccggatcgacggcaaacgaaagaaggtgtcagaatggctgagagaccgatgacaaacaaccgcttcgcgctccccttcgcggcgtgggagctgcggctctatcttgacactcacccggacgacgagagggctctcgccgcctataagaagctctgcgccacgatcggcgggtgctcctatccgtgcgtcacaccacagggaatgatggcggccggaaccgacagctcatcgtcctgcccgtgcggcggaagatggaactggatcgacgacccgtggccgtgggatcccgcggcgaaccatgttgaaagcgaggactaagatatgtggacatatgagaagacactgcaatacccggtgaagataaagaacccgaacccgaagctcgcgaagatcatcataacccagtacggcggacctgacggagagctcggcgcttcgctgaggtatctcagccaacggttttcgatgccttacgcaatggtcaagggcgcgctcaccgacataggaaccgaggaactcgcccaccttgagatgatcggcgcgatcgttcatcagctgacgcggaatctcactccggaggaggtcatgaaacagggcttcgcggactacttcgttgaccgcacaacaggagtatacccgcagtccgcgtcaggaatgccgtattcggcggcgaccatggcggtcaagggcgatccgataaccgacctgcacgaggatatggcggctgagatgaaggcgaagacgacttatgacaatatcctgcgtctctcggacgatccggacgtgaacgatgtgataagattcctgcgtgagcgcgagatagtccactaccagcgattcggcgagcttctgcggcacgtccaggataatctcgactcaaagaacttcttcgcgatcaacccgtcgtttgataacatgaacgggacctgcccgaagaagtaggtaaaagaataaggctgtcttgctttcgcaggcagccttttgcaatgtcagcggagtatcttctccccgtcaaaaatgattatgccacgtcctctcccgggaacgccgcccttgtcgagccactcggcgtactggcgtctgagcgttgtgtcgcgcctcagcacagacggtccctcgctgtaatcccttccgtagagccgccagcagtccgggaagtccggctcctgcttctcgccgagtatctcaaagcatccgatgaacctcgacagattcgagcctggcgtcatgaaatcaagcatcttcggatagattatccagctcgagcactgaaacagcagcttgccgtcaacacgcctctccgggaagaaatcatacgcctttttaagcgacccgatgacatcctcctcgcgaagccttccgtcggacgggatgtggattgacagggcgtctgtctctcctggaatcagcttcaatccgtgtctctcgattgtctcgtctgtcatgccgtatttcgcgggctgatattgcagtcttccgagggcgaaaatcctcatcatcagaaaatccctgtgccaccagtcggcgaaaagcccccactcgccgtaggtctcatgacattcgcggttcttgaacccgaagtcccgcacggcgtcatgccagagattatccggaatccccttgcttttgtacatatcccgcagatgtccggtcatcgccgtgaagaagacgaacgcgacagaacgcctcggaacgcccgtgagctccgccgtccggtctatcgccgccccaagcttctccatatcgatatcgtccgtagtctcaaaacggcgcgtcgactcatcgagcagtttttccgtctcgctgttgtcgtttatccttctctccgcgtcaagaaagaagccgaccgcctcttccgggtaatcgaaggtatcaaagaattctttcataaacatatcgcgtaatcctccgctgaattgccggtgtattccggctgtcagaagtattataacatatccggacggaaaatgcaatacgctcggcacattttttcacggattattgatctctgaagccatgcacggacgcacggcggaaatacgcctccggacagctgaggctgtcagccgggtgcgcaggctgaacaccgtcccggcgtcggcagagcaaaacccgctcgtgtctgtgaaacatttgtgcccgccctttgtcatgtcgtcccttatccctttattatcagcatcgcggcgataccgaggatcgacagcgcgaccgcggcaagctcgcggcgggacggcttcttcttcgtgaaaaagctcatcagcgtggaaacgacgattatgcccgccgactgaaccggataaaacaccgacgccggtatcgcggcaagcgacatcaggtttatcaggttgcccgaataattcatcgtgccgcacccaagcatcgcgagcaccgacacaccgtccggtctgaaccgcttgtccttacccgtaacaataaacagcagcgcaagcgatatcgcgaacgaccacgcccccgtgatcatcatgtacgccgcctcgtcaaccctgtcaaacggagcggactgatatatcttcgagatgacgccgaagaaaccgttgagcacgaatatggcggcgtaataaatcgtcccggacttactttcccctttcttcaccgtgacggcgagcgcgagaattataagcagaaccgacactatcttcgcgaccgttattccctcgttataaaacgcgattccgagaagagacggcagaagcatgccgccgagcgtcgtgaacatcgagtagagagatatgtttatccgtccgagcgccttcatactgcacatcatgaaagcgacgctgttgagagccgagaagagcgtcatcatgagcgtgaaccacccgagcccatttatcggagtgaagccgttccggacaagatagacgacagacaggacgacaagccccgacagactgaaccccgcctgaagcgtgagcgactgtttcatgccgttccccgagcgctcctcgaacttctggttgaacaggaactgaaagctgaacgcgacgaccgcgacgaccataagcatgtaatacattgtgaaatacctttcagacaaaagaataatatcagatattatagcacatacgaaggaaaaagaaaagataaaatttccacataaatatgtaatcccgccgcgtcatctctcactattatgtcatatgacggcaaaaaaggagccgccggagatcatctctccgcggcagccccttatcttaggatacactgaataaatcgggttttcgcagaaaaaaggcttggatttatgggtttttttctgcgaaaacaaccttaaatcagtgtttccttattgatttgtcttacttcgactgagtcatcggaacgacagcgcccgcgtaggtgtcagtgatgtacttcgcgatagtgtcgctggtgagcacctcgatgagcgcctttaccttcgggaggttctcgttgccttccttgaccgcgaggacgttgacgtactgctccttgatcgcgagcgactcggagttctcaaccgccagagcgtcagcgagcttcagaccggacgctatagcgtagttgccgttgatgacagcgcacgcgacgtcgctcagaacagtcgggacaagagcggcttccatctcgcgtatatcgatgttcttcgggttctcgacgatatcgttctttgtagcgttgatgccgacgccctctttgagcttgataacgccgttctcctcaaggagaagcagagcgcgcgcctcgtttgtcgggtcgttcggaacggctatggaatctccgtccttcaggtcagaaagagacttcgcggtgcccgcgtaaatgccgaagggctcatagtggatagccgcgacattgacgaggtgagtgccgttctcggcgttgaagttgttcaggtagttgatgtgctggaagtagttcgcgtcgacgtcgccgttctcggtcgcggtgttcggggtgacatagtcgtcgacgaccttgatatcgagggtgtagcccttttcagccatcaggggtttgcactgttcgagaatctccgcgtgaggggaagccgtcgccgcgacggtgatggtcttgtcgtcggaagcctttgagccgcaggataccgccgccggaatgagaagcgcggcagcgagaatgagtgccagaatctttttcatgatataatctcctttttttataataccgccgtatgacgggatttgacgttacttgttcctgatgcgtttgtcgcacgctttggcgacccggttcaggacctcctgcattatctgcacgaggattatgagaagcagggacgaaatgtacatcgccttgctgttgaagcggtagagaccgtactggatagcgagctgtccgagaccgccgcccgcgacgagctgcgccataggcgtgtacccgagaattgtcgtcagtgcgatagcgccgcctataagcagcgacggcttcgactcgggaagcagaaccttccatatgatctggaaattgccggatcccattgactgtgccgcctctatgacgccccggtcgacctctttgaacgaagactcaaccatcctcgcgacaaacggagccgcggcgagaagcagatagacgataaacgcgttgtctcctatcgacgtaccgacgagagccctcgcgagcggctgtgtcatgacaagcagtatcatgaacggaaccgaacgcaggacattgacaatgaacccgataattgtgttcacggccttgttcgggaatatcccgtccttgtcggtgcagtagagcagaactccgagaggcgtgccgatgagataggcgaggagagttgagataagcgttatcttcagcgtcgtgtagatcgccgaggaatagatcgccgtcattccctcaccgagaaacgagtcgaacatcacgcgctcacctcctcatacttaagtccgcgggaatcgagatagccgagaatccgtttctgcgcgccctcgtcctccggaagttgcagaagaatctgaccgaacgctttgccgccgatgtcctttgtgtccgctcccatgatgttgacagccgcgcggcactcaaggcagatattcgcgaccacaggctcaaacgacgagccgccgtcgaacacgaggcgtatgatcttcccgcccctgaaatccttcaccgctccgcccttcggaaggatgagctcacgcgccatagccgacttcggagagacgaacacgtccgagacattgccggtctcgacgacctttccgccgtcaaggacagcgacgcggttgcatatctgctcgacgaccttcatctcatgcgttattacgattatcgtgacgcccatcttctcgtttatctctttgaggagcgcgaggattgagcgggtagtgttggggtcaagcgcgcttgtggcctcgtcgcagagcagaaccttcgggtcggtcgcgagcgccctggctatcgccacgcgctgtttctgaccgccggatagctgggacggatagctgttttcgcgatccgacagacccacgattccgaggagctttctcgctttcccgatgcgctcggatttcttcaccccggcgatctccatcgggtagcagacgttcgcgagagccgtgcgctgggacagaagattgaacccctgaaagatcatcgtgatctggcgtcttctcttcctgagctcagacggggaaagcttgcacaggtcctctccatcaaggagaacctcgccctccgtcggacactcgagaaggtttatacatctgacaagcgtggatttgcccgcgcccgagagaccgattatgccgaatatgtctccgtcgtttatagtcaggctgacgtcctgtacggcgtcgacgccgcccgacgcggtgtcgaaatgctttgagagatttttcagttctatcaagccgcaacctccgtttcaaaatcaaaaataaaatccggcaaagtcacattgactcccggacaaaaaaacggcagaatataaagatgatcccgaaaccgccatatggacggcacagcgtgaaattcagacagctctcattttcgcgcggcggaacatcccccgtcattcatccgggagcagagcattcgtccgcatctgaaattcgaacgcagaagcgcttcaaaataatatctcacagccgaataccctccgtttcatcagaatcacccgcgaagcttctttccttcacggtacaaatattatactacagtttcgccttcctgtcaatagcatgtttagacaaatccgcagaacaattgcatagggacattgtaggctttaacagaccgggcgcggttgcaagcgtaagttatcagactcatgagataatccctttcctgagtttttatcaggatatgccgtgagaggagatggtgaaggggatgcccgctgaacacactgaacacagtgaacacggcgaatacaccccccctgcttttactttctcactccgcggttctcaatctgctcgcggggcttattcccttgaagccccggacgcggccattgttgtccttcacaagcgcgtaggtcagtccgaactcatgcgcgtgagcgcgcaggtagcctatcacccgcagcttatcaaaggtctcaacggcgttgtcctcgcaccagcacttgtaaatccagtagaggtccttcgagcttgtctcatattcgggaccgaacacaaacgtgccctctgagcgcagacagctgacgatattgttcgcctcgtccatcgcggctctgatcgccgccctcgatttagcgcttaccgtgaactggaagttgtgttctctcagcctgtaaagaccggcgagcgcccagatgactatcatgtctctttcggcgataagcttctcggacaggaacgggtcgtcaactctgtccttcggtctcggctttgtcataagtatcagctgacgccggaagaagccgtagctgtcgtcgttcgccgacctcagaaaaccgttgctgaaagccatgagcctgcaatacatcagaccctgatacgactgaacgcccttcctctcaagatccatcggaccctcagcggtgatgagagccttcaggttattcgtcgtcgggaggttctgcattctcatatcgtcgtcgaccatgagaagcttatgctcgagatcggctctcgcgaaggagttggattccagcttgggtatgcttccgttattcatgttgtcgccgagaacagcccgcatcacaacgccgattcttgactttccctcgccgccgttgccgattatcaggagcatcttctgcgctcttgtggaaggtatcaggcagtaacccatgaactcctgcaacgtcagcacatcgtcagggtcgagaagctcgttcacgaacctcacccaatgctcgggatccttgcccgcgacgttcgtataagccgccgcgagcctgtttctgcaaaagaacttctcgtacgtccagcggcagttcgaaatattgaacgtaccgttcgcgaagttaatgatatcatcgtcgaccatcagcgcgtccgtgctagcctcagccttcaggttctcgacgatatttcccgccgtctgaatcgggaagctcaccacgtggttcttaatgatattataaatgtcgcgcttcaacttatccgccgggcaatagccgtcaggagtaaagaacgtaccgttcacgcaccgaagctcattgttctccagaaactccttgcagaaagcagtagtattgatggatttcccattccaccaagggggctgagccccatatctgacaacttaagcaaagcaggaagcgaaaagcgagaaaaagtcaa

SEQ ID NO: 3299 - DNA, 11119 bp, Unknown
  16S sequences of unknown bacteria
gctctacacaccggaggactcccgcagccgtgctctgggcggcagcggtctgggactggccatcgcaaaggggctggcggaaggcatgggcggcacgctgtgggctgagagcacgatgggaaaaggaacgatgtttgtgctgaagctgctctggacggagccggtgcaagatggccccgaaagaaaatcgtaagatttacgaaagaccattgcaaaacggtgggtgtagtatgggaaacagaacacgacgaaaggagagggaacaaacatgtcgtatctcattcagagccggcggttgtgcaaacgtctgggtgaaaaaaacctcctgagcgatgtggaagtgcacgtgccccaggggcgggtttatgctctgctggggccgaacggcgcgggcaaaaccacactgatgcgcctggtgctgaatctgtggaaacccaccagcggggaggtggagctgttcggcgcaccgctgcggccgggggattgcgcgccgctggggcgcatgggcagcattattgaatttccagcctttttcgaaatgctgagcggcctggaaaatctgcgtctgcattgtgcctatatggggtatcatcgcccgggtgcggcggaggaagcgctggagcggttgggcctgggcgcggccgggaacaaaaaggtgaaacattactcgctgggcatgcgccagcggctggggctggcccgggcggtgctgacccatccggaactgctggtgctggacgaaccggccaacgctctggatgctgccggtatgaagcaggtgcgcgacctgctgcgcactttgtgtcgggactggggtaccacggtgtttttatccagtcatctgctctccgaagtggagcagatagccgatacagtgggcattctgcatcggggaaggctgctgcgggagatttctttgagcgagctggctgcacagagcttgacctatattgaattggtgacgcccgacgtgcgcgcggcggcgcgggtgctggaagagttgggggtgcgccggttcaaagtgctgcaggagggtgtggtgcgcatttacgaggcgcctatggcgccggaagaactgtcccgtgcgctggcccttcaaaatgtggccattgcctcgtttcagaaacatgccgacaccttggaggattattatctgcgcctgacaggggaggaaaattaatatgggcaagctgattgtgctggagtggaagaaaaaccgagctgggcgctatggtctggcagcagcgatactgacggcggcgctggcgctgttcctgtttgcccaggtgtacctgggcatcgccaacgacccggttactggtgtgccggatgctgcgccgggcactttcaatatctcctcgcaggtggaactggtcagcaacgtgacgtttttggttttcacctgcgttatgctggcgggctgcgtcacatcggcgcagcggcgcaaaacaatgctggtgatgtatacctatcccatcccgcggaaaaaactgatgctggcgcagatcctggcggtatggattttctcggccgctgcgctggcattggcaaagcttctgctgtatgggatgctgttcgccgcagggcagattctggagccggattttccgatggactataccctttttgcgccggacctttatctgcagattgtactgaaagccgttgtgattgccacggtcagcctgattgccatgctggcgggacaggtgttccgctcggccaaagctacgattatcgcctcgctgctgcttctggtgctgatgaacgggacggtggggccgttttctctggccgatcatgctgcggtgcccttggtgctcagtgcggccggtgtcatatgtgcggcggccaccctggcgggcgtcgaccggcgggatgtgatatgacgggacagggaaacgtggagtcaaaacagtatcttgctatagcctataggtaaaaagggacagacgtgcaaagtctgtcccttctcctatttctttttcagtgtgttcaaatatgctttgtcctcggcgctgacgcgatagctttcccggcatttctggatggctttattgtgcacggctgcagggaatacgccctgctccaaaaggggcagcgtcttggcgcgctgcttgacaaaaaagacgctcaatccccaggccagggccatggtgacatagtagccctggtgctggacggtgcggtaagcagccagggaacggtcgatccattccgcgcgccagaaatagtccatcagctgcaccacggcaaagcgcacttcaaattcctgctggctctggaggcagggggcgaaaaaatcccatacagcgggcagatctgcttccttccacttgcaggctccggcagtcgtgtcgcatacggcccaattgttgatgcggggaaggaaagtgtgcagcagtgtgagcttttcatcgagggagcattttgccccggcacacaccatgccctgaagcagacgctcttcgtggctgccggcgcggacaagagagagaaaggcccgccagtcgccctggagcagctcttttgcaattttacgcagcgcgggagcacgcacgccgtaggtgcgctctgtgccggggataaggctttcgttgaacacgcggtagcgctcatcgctctccctgcgcagccgttcgagcaggatgtcatagtcggcctgggtatagctcatgacagtgccccctctgccatatctgcgccgctgaggtagcggagcacgaggctcagggcaaactctgcggcggcgcggcggacctgagcgcgattgccgtcgaagtggcacagatagcaccacgttttcccctgcgcagacagagaaacatatacggtgcccacggcattgccgcggtcgtccggattgggaccggctacgcctgtggtggatacggccagatccgtgcccagcagacgcgctgcgccggaggccatctgccgccccactggggcggacacggcgccatattgctccagatcccgggcggacacgccaagaacgttttgctttactgcgtttacataagataccacaccgccgtggaacactgcggaggcgccggagacgtcggtgatgcgcttggcgatcagtcctccggtacaggactcggcgcaggacagcgtcagatcggctttgctcagtgcggaaaccactttttgctgcagtgtttttgccatactgcctgccctccttttaccaactcagtttcagcttttcttctccggccagggcgcgttccaccaattcgctgatgggcagtgcggcctcggcttcacgcacttcgctgagattcgggtgcgtttttgggtgtcggggcgtaaacacggtgcagcagtcctcgtaaggaaggatggaggtgccgaaggtgccgattttgcgggaaatggacacgatctcttctttgtccatacctaccagaggacggaacacggggtaatcgcacgcgtcttccgtggaacgcatagcctccatggtctggctggccacctgccccaggcattcgccggtgacaatgcagcctgcgccgatgcgctctgccacgcgattggcaatgcgcatcataaagcggcgcatgatcagggtgaagtattcctccgggcagtttttgcggatttcctcctggatttcggtaaaggggacaatgtggaggatcgtgtggccggtgtagggcgtgagcagccgggccagctcaatcaccttttccctggcctgctccgaggtgtacggcggcgaaaagaaatgcaccatgtccagcgccagaccgcgtttggccatcatataggaggatacgggggagtcgataccgcccgagagcagtgacacacccgcgccgttgatggaaacgggcaggccgccggcccccggttcggggttgccgtgcacataagcggctcgttcccgcacctccacgtgcaccgtcagttccgggtggtgcacgtcgacggtcaggttggggaaacaatcgtccaattcgccgcccacccactgggaaagctgaatggaagtcatggggaaatttttatcggcccgtttggattccactttgaaggttgtggcagcagaaagctggccgtgcagatacgttttggccgtatctaaaattgcttctttggttttttcacaggggtgggctttggaaagggctacgatgccgaaaatgcatttgcatgcttcgaaggcagcgtccaggtcggcctcttcgttgagcggttcaatatagatcgtgctctgcttggaggtgatctgaaatttgccgcagtgcttaatgcggcggcgaatgttggcgcacaggcgttcttcaaacacgtgacggttgagtcctttgagcaccagctctccgagtttcagtaagatcagttcttgcatgggtcggttcatccttttatttatttttgttttttgcacggagtatcaggcatggaatcttgcgcgccggagtgcacttggccgggatcgcattgaaaacgctgcagcacggcgtcgcagcggcgcagcagagtttcgtccggcgttttctgagcggcccagtagtcccgcagggactgcacggcctcaaaatccgacgcggcagcggcgcgggcttcggccagggtaaggtaatcctgcagaaaaacgccgctgctctccagcgcgctgatgccggccacgggcccttcgctcagcagataaggaagcagttctcctgcagcggtgaattcggcgctgtgcagggcgccgctgtgcagggcttccgccaagccggatttttccacgcaggtcagggcggaataatccggcgccacgttattgcgccaaccctccagcagcagccagcggcggatagcatcgctgccgggttccagctgggccacggcatggatgcgtccccagccggacacatgctgtgccgcttcccacacggcgtcgttgccgtcggcccagcggcgcatgagaaacaaggcgtacaaggtgaattcatccgacagggccaaaacccgcaccagattgcgcacctgggtgtcgtgctcgatgttgagcaattccaggcagcacagggcaaacttgacgctttcgatatgctgactctctttgagcagcgtctgggaaaattcatacaacgccccggcgtcgatgcggtctttatgggcgatgatccagccctgcaggtcgtcaatcaggggcagaagagaaatatattcgtctatggagaaaaacagctgcaggcattcggcggctttgtcgtaggcgcgggcgctgatcagccctatgatttcggtcagggatttgatatcccgtttatccggggccatgtgatacagggaaatgccgtcgtaggcgccgtcagcaaagcggagggcctgcggatggtctcgttccggacggggcagggaaaagtcccggggcagcgttccgtcaccttgaattgcgccgcagatgcactgatacagagataacgcttccggtgtgctctgggcatgcagatgtggagcctggggcataagatcatcctttcagaatgtcggtgtttcggtattgaatggcttctgccagatgggccggctcaatggattcggcgccgtcgagatcggcaatggtgcgggccacacgcaggatgcggtcatgggaacgggcggtaagccccagtttggaaaaagcgttctgcatcagtttttcgcacgcgtcgtccaatgtgcagaattctgccagcatagacggcggcatatgggcgttgcaggaaatgcccgtgccggtaaaccgcacgtgctggcgcgcccgggcggcgtttaccctggcccgtacagtagcgctgtcctcaggtgtttccctgcggcgcatggcttcgtattccacgctgggcacacggatgtgcagatcgatgcggtccagcagcgggccggagatgcgggacacatatttttgaacctgggcatccgtacaggtgcagcggccggaggggtggccgtaccatccgcagcggcaggggttcatggcgcataccagcatgaagcggctgggcaggcgcagtgtgcccgaagcccgggtaatggtcacttcgccgtcttccagaggctggcgaagagcctccaggacatccttgtgaaattccggaagttcgtcaagaaacagcacgccgttatgagataatgagatttccccgggacggggaaatgagccgccgccggacagggccacggcagatactgtgtgatggggcgcgcggaagggacggtgcgtcagcaatggatggcggggatccgtcagacctgcgacagaccagacctctgtggcttccagcgcctcctgccgggtcatgtccggcagaatcgagggcaggcggcgggccagcatgcttttgccagcgccggggctgccgataagcagcaggttgtgacttcctgcggcggctatttccaaagcgcggcggcagttttcctgacccatcacatcccgcagatccggtgcctgagcgatatcgtctccgtcctgccaggggacggcgggagagagacgctgctgtcctttcagatggcgcaccagggcctcggctgtttctgcgccgtatacggtcagtccttcagccagagtggcttcggcggcatttttggcgggcacataaagtgtttttatcccggcacgctgggcggccatggccataggcagcacaccgcgcaccgggcgcagcgcgccagtcaaggataactcgcccagaaaggcggcgtcctgaggcggtgtgtccaattcacctgcggcggtcatcaagcccaaaaaaatgggcaggtcgtacagggtgccctcctttttgcggccggcaggagccagattgatggtgatacggctgacaggaaacttggctccgcagttttttaccgccgcccgcacccgttcgcgggattcgcgcacggcggcatccggcaggccgaccacgtcgaaagccggcagtccgccggacaaaaaacactctacgccgacctcgtagccggcgatgccggtcagacccagggagcgaatggaaacaaccatatgcacacaactcctttgcagcagatggggtattgcaaattcaatcatttttattttacaacaatccggcggaccctgcaagaacacatttttggacaaaaaacagagattccgccagtggcggacagaatgataaaaatttaacaattttagggaaaatatcccagtcaaaattggggaaaatgaaaaataatcatagacacttatgcaaatttgtggtatggtatataatagtattctatcaagttaaagcacgaaatagcggtttattggtgctttgcaagcatttttataaggagagtgaagcgttttgattaaaagagcgatgaaaacgatggacggcaatacggctgctgcccatgtcgcttatgcgtttaccgaaatcgccgcgatttatccgatcacgccgtcttcggtcatggcagaatgtgtggacaaatggtccgccaacggccggctgaatctgttcggccaaacggtccgtgtggccgagatgcagtccgaaggcggtgcggccggcgcagtccacggatccctgactgccggcgccctgacgactacgtttaccgcatcccagggcctgctgctgatgatccccaacatgtacaagattgccggaagccagctgcccagcgtgatccatgtatctgcccgcgcgctggccactcatgcgctgtccatcttcggcgatcacaccgatgtcatggcctgccgtcaaacgggttatgctttgctgtgctccaacaatccgcaggaagtcatggagctggcggctgtggctcatctggccacgctgaagggagaagttcctttcctgcacttcttcgacggattccgcacatcccatgagattcgcaaggtggcggcctgggactataacgatctcaacgacatgctcgaccctgcgctgatcaagcgtttccgtgccaaatccttgaaccccgatcatcctgtgctgcgcggcagcgctcaaaatccggatattttcttccaggcccgtgaagcagcaaacagctactatgatgcactgcccgccgtggtgcaggagaccatggatcaaatcaacgaacgcatcggcagcagctatcacctgtttgactactatggctcttccacggcgaaaaccgtgatgattgccatgggttccgtctgcgatgcggcggaagaggtcatcgactatatcaatgccaaaaataaggaagagcaggtaggcctgattaaggtgcgcctgtatcgccccttctctattgagcatttcctggcgcagatccccgatacctgcaagaatattgtggtgatggatcgctgcaaagagccgggcgctcccggcgaaccgctttaccttgacgtggtgcgtgctctgaacggtagcgccaaagccggcgtgcgcgtagtgggcggccgttatgggctgggaagcaaagatacaacgcccggcggtatcttggcggcgttcaaaaatgctgctgccgaaacgccggtcaacagctttaccatcaacatcaatgacgatgtcaccggattgtccctgcctatcgaggaagagccggatgtagccgcgcagggtaccattgcctgtaagttctggggtcttggcagtgatggtacggtcggcgccaataagaactccatcaagatcatcggcgaccatacagatatgaacgtgcaggcctattttcagtacgactccaaaaagtccggcggcgtcaccatttcccacttgcgcttcggcaaaaagcccatcaagtccacgtactatgtcaccaaagcggactttgtggcctgccactgcccggcctatatcgaaaaatatgacatcgtgcaggacatcaagaagggcggaactttcctgcttaactgtgactggctgcctgaggatctggaggagcacctgcctgctgccgtaaaacggtatctggccaagaacaagattgaattctatacttgcgacgccattaagttggcccgcgacattggcttgggcgagcgcaccaacatggtgctccagtccgcgttctttaagctggccaatattatccccattggtgacgcagtggagtatatgaaagacgcagtggtcaaaacctacggccataagggcgagtccatcgtcaatatgaactgtgaggccattgatgcaggtctcaatgctctgcgcaagatcgaaatccccgaagagtggaaaaccgcaaaggataagaaggctaaggtacagatcgatacggatcggcccgatctggcagcttttgtagaaaaggtcatgattcctgccaatgccatgcgcggcgacgaaatcccggtttctgtcatgaaagaagtctgccctggcggaaccctgccgcagggtacgtcccagtttgagcgccgtggtattgcggtagacgtccccacttgggtgccccgtcactgcatccagtgcaaccgctgcgtgatggtgtgcccgcatggtgtgctccgttcttatgccgtcagtgctgaggagctttccggcgctcccgaaaagaccaagacagcacctatgattggaaagggcatggataagtataagtttgccattaccgtttcgccggtagactgcaccggttgtggttcctgctccaatgtgtgcccggccaagaacaaagccctcgacatgatgccctatgaagaagaaaccgagcagcaggagatttacgattatgctctcaagcattttaccgataaagacttgcggttccccgacaatttgaccagagaggcacagttccaccgtccgctgctggagttttccggtgcctgcggcggctgtggtgaaacgccttatgccaagctggtgacccagctgttcggtgatcatatgtatattgccaacgctacgggctgctcgtccatctggggcggtagcgcaccctctacgccgtatacggtaaacagtcagggccgcggccccgcttgggaaaactccctcttcgaggacaatgccgagtttggttatggtatgaaactggctgtgcgtcagcgccgggccaaactgcacagtgtcattacagagctggctaagaatatggcctttgccgaaattgcgaaccgctggctggctgagcgggacgactatgcagcttcccgtgaactgggcgataagctggtggcaaagtgcgaaaagaataccgatccggcctatgccgagcagtgcaaatatattttggatcacaaagatatgctggcctataagtctgtatggatttttggcggcgacggctgggcctatgatatcggttacggcggtttggatcatgtgctggcttccggcttgaatgtgaacgtgctggtatttgacactgaagtgtattccaatactggcggtcaggcgtccaaagcgacacccacagcagccactgcgcagtttgcagcctccggcaaactgattaagaaaaaagatctggcggccattgccatgtcttatggctatgtatatgtggcgcaggtggccatgggtgccgactatgagcagtgtatgaaagcctttatccaggcggagcattacgatgggccgtcgctgatcattgcttatgctccctgcatcaatcatggtatcaaggccggcatgagcaaatccatgacggaaatggaaaatgcggtcaaggccggttactggcacttgttccgctatgatccgcgccgtgataccaatccgtttcagcttgacagcaaggagccgaacgaaagctaccgccgttttgtgatgggcgagcatcgttattcctcgctaaccattacgttccctgaacgtgcaaaagagctgatggctgtggcggaaaagcaggcaaagaaccgctatctgtcgctgaaaaagcgcgcaaaagaagattaattttggaaaagcccccactggtctatggccggtggggggctttgtttttaaataacaaatcaatacgatataaaagttaaccagattcttccagcacctgtctaccatgtctaccggatgtctaccaaaatgggaaagaaaaacagctgggggacaagagatagaagaaaggcagcgacagcgcctgccggcgaaatgtctaccaaattgaaaaaccatacgttttgcaatccccggaaaggccgctgtggtgcggctttccggggatt

SEQ ID NO: 3300 - DNA, 2065 bp, Unknown
  16S sequences of unknown bacteria
gttttttgttccggaacagccgccatgcggtcgctgccaggtggcagacacggatacgtccgtacagctccagttccatctgcagcattgcatcgttaaaatccggctcgagctgaacctctgaaacagccggaagcagcagatacaatacaccggtgagctccccggtcaacgccggatcgcccgtgccgaaccgcagatagccagccgccttgcgtggccggtagtgacgccacaggccattcagctctgcctttccctctgcaaacagctccttcagatgatagtcctccacaaaatccaacaattgctgaatcttttctggaattcctgcggcctgctgcagcctgctccaaatcccttcgcctatccgtttcatgtgttttccaagctcacggatgcgctccacattgctttttattgtagcacagaacgtgcggattttatacggaagtgtgcggagtatttcaaaaatacgcgctgcaatattttttcgagaacgacttttgacttcttccgtatcgtcttgttgcaccgagtcttcttcctgcggatctcgatccaattccttctccgtttgctgctcctgctgatagacattcagctgatcactcttgccggactctgtctgttcgtctgagctctctgcctttctactatttctttccttcgtatcctccgaaatgccagattcatccaaaccttgtcgctttcctgcctgcgccgtacgacttttttctgattgactgcttgatcttttttgctttttcttctgctttcttcgatccagccactctttcagcttcgtaagcgagattccaaagatccggatatccagcgcatgcgtctgcttccggccatctaccaaaagccgcgcgcgaatcaaatgcagccatgagaccgtgacagccgcctccagcgcctcctccgtcttcgccgcccgaatacgatagcgcactggaccaaacaggatcgccgacagcacaagcagaaggagcaccagcacagtcagcagtaagattccgattatttttaatatacccagcagtatgctcagtatgaaatgcagcatttctcccagcgtcctcctattccggcagctgccatagtctgcctgttcttctgcccgtaaaacgaacattcgcaatcctgcgttttcatcatcacctgcaggaaaccaaaggcactgaaacaactgatttactcatttagcttgaggtaatacccctttacatccgccgtacccgtcagccgatatacatccgccacaatctctcccgcgagcgcttttgcctcatccatcccgactgcaatgcccaggatcagtggctctatgccatttcgcatctgctgccgctcatactctaccggtgatacgatctccatctgattcaccgacgtggacgccagaacgatcaggtaaatgaaaagcggatactctccggcgtccaacttctgcatgattttatactttctcttttctgcagtctgcccaaaatatggcacgcgataccagttcatagaattcctttccaaacacgctccagattgtcacagatgccggcatcccgcgtcaacggaatcccggcatctgtggttaaaagtattttcggtttccccaaagattattttttttcaaattcagatactcattgtacgctttctccaaaatcattttctcattggaaaacttcagaagatggtacgcctcatggaatttgtaatatcctgagtcgacaaaatactcctctcgctgtggtttgctgtagtagctgtccgccatcatcagataccagtgtacatcctttgatacggtatcctccggtacgttgaatgtgtactgactcttgccaacgtacttgataatagacgcccgtactcctgtctcctccagtacctcacgggtggcagtttccttataatcttctccggcttccacggttccctttggaagaacccagccttcgtacttgttcttgtagctcttgtacagaacaagtatcttccccctgaatatcaccacaccgccacagcttgttgcttcgatcattgcaattccccctgt

SEQ ID NO: 3301 - DNA, 32759 bp, Unknown
  16S sequences of unknown bacteria
tgtgacgctgtcgggtttttcggaccgcgaggctacggatatcgtgattccttctcacgtgagcagagttccggtaaagaggatcggcttttccgcctttaaaggcaatgaccggctgaacagtgtggtgattccggatacggtacaatacatcgagagttccgcttttcggggctgtaccggtctgacgcgggtgaaagcgggcaaagagctgcgttctctggggcagcatgccttcgcgggatgcaaaagactgcagagtcttacgattcccagttctctgcataccatgggagatatgactttcgaccagtgtatcgaattcacagaactgatcgtcctggatatgaataaaggcggagcatcttccaagcgttttgtcatcgccagtcacaatcctcatcggcgctgggggtatattcaggcgagtctgatttatttcgactcctatcagatgacgaagtacgatgaaggctatggggtgctgcacggttttgacgacctgtataatatcgccgtataccgtctgacggatgatgagctcctggaaccgtatatgcgtacgacgtatgagaatacgatccgcatgtcgataccgaatgtcatcgcccaggaccagatttcgcgcctgaccgcggcgggagatctgggactgatcgatgagcggcggatcgacgcctatctggaggcggccagcaaaggaaaaggacgctgcatggcgtatcttctcgattacaaagaaaaaaacttcagtaaaagagagctgaatttcgatttatagtctgattttatcttttataacggagctccgccaaaaagcgcatggacgggaaatctgtaagagaactgtaaaataaaaggggatttccagcaaaggcgataaaaaatagggagaataatgtagcgaaaaaatagaaagcgtaaaaattagcgtaaaattgcctgatggtttcagtatataaagataaatccctgctttctatgcaatatttatagtacatggagaaaagacacgttttttgtcagaaggagaacgaggaaaaccgcgcaggaccgggacggatgaaaggccgcccggcttgacttattttgcttgactatgctaaaatattgaagattaagggtctgctacacattatacagttgcagaatgaaattcccagaatcataatttatttttaggaggaaacaagattatgaaacacgcaaagaagttatttgcagtacttctcgcagttctcatggttgcatctatggccggctgcggttccggcggttccggctccggttctggcagcaatggttccgcggagggttctgacggcgctgcaatcaaactgggcggtatcggacctctcacaggtcctgcggctatttacggcaacgctgcgaagaacggcacggaaatcgctgtcgaagaaatcaacgctatgggcggcatccagttcgaactcagttatcaggatgacgaacacgatgcagaaaagtccgtaaatgcgtacaacaagctgaaagactggggtatgcagattctgctgggaacggttaccacgagcccttgcgtagcagtatctcaggaaagttataacgatcgtattttcacactgactccatccgcgtcttcaaatgatgttatcggcggactggaggacgcggacggcaatgtgacgattccgcgcaaggacaatgtcttccagatgtgctttaccgacccgaatcagggtacggcatccgctcagtatatcagcgaacagaaactgggtgagaagatcgctgttatttacaacaattccgacgcctattccacaggcatttacacgaagttcgctgcggaagcaaaagatcgcaatctcaatgttgtgagtgttacgacgtttaccgacgatacggcaaacgatttctccgttcagctgaacgaagcgaagaatgccggcgcagatctgatcttcctgccgatttattacactcctgcatctctgatcatgaagcaggcggacagcatgggatatgacgtcaagctgttcggcgtagacggtatggacggtatcctcacgctcgaaggattcgatacgtccctggcggaaggcgttatgctgctgacaccgtttacggctgatgcggaagatgaaaagacgcagaattttgtaaaaaaatatacagaaaagtacggcgaaacaccgaatcagtttgctgctgatgcctatgactgtgtatatgcgatttacgaagcatgccagaagggcggaatcactgccgatatgagtacggacgaaatgtgtgcgaagctgatcgaaatcttcacttcaagcgatttctctttcagcggtctgaccggcgaagttatgacctggtccgacaccggtgaagtttccaaggaccctaagggaatggtcattaaaaacggcgcttacgtcggcatgtaatatctggacaccctctgatccaagcagtacaaaggggattgccctgaggcattcccctctttttcatctcagagacttcttcccggaaagagaggggggaagggctctgtttttcgtatcattcacaaaattagggaggtgtacagcatggtttttctttctcatctgattaacggaatcagtctgggaagtatttatgcaattatcgcactgggttacaccatggtttacggtatcgcaaagatgctgaatttcgcccacggcgacgtgatcatggtcggcgcttatgtttgcttctgcactacaagctacctgaatctgccgccgtttgccggcatacttctcgcggtcgtgatatgtactctgctgggtgtcgtcatcgagcgtcttgcttataagccgcttcgtcaggcgccggctctcgccgttctgatcacagcgatcggcgtcagctatttcctgcagaatctggcattattgatctggaaatcggatccgaaagtctttacatcggtggtcaccctgccgtcgctgaagctctttgacggcgaactggtgatcagttctgtttctatcgttactgttctgacgtgtatcgtgatcatggtggttctcactctgtttactgaaaagggcaagatgggaaaagcgatgagagcggtatccgaagataaaggtgcggcgcagctcatgggaatcaatgtaaatactacgatttccgtgacctttgctatcggcagcggcctggcggcgatcgccggcgttctgctgtgctcggcttatccgacactgatgccgacgaccggctccatgccgggtatcaaagcatttaccgcggcggtattcggaggtatcggatcgataccgggggcgatgctgggcggtattctgctgggtattatcgaaattttcagtaaggcatatatctccacacagctttccgatgccatcgtgtttgcagtgctgattatcgtgcttctgatcaaacctgcgggtctgttgggcaaatccgtacgtgagaaagtctgaggtggatgcgatgaaaatgaaaatgtcaaaatccacgcgaagcaattttattacctatgctatggtgatcatcgcatacgtcattcttcagtttatgatgtctcagggaatgatctccagttccctcggaggtcagatggtaccgatctgcgtatatatcgtcatggcggtctctctgaaccttacggtgggtattctgggggaactgagtctcggacatgccgggtttatgagcgtgggcgccttcagcggcgtcgtggcggccatcagtctgcagtcggtcattccaaacggcgcgctgcgtctgatcgcagcggtgattatcgccggtgcggttaccgctgtcgcaggaatattgatcggtattccggtacttcgtctcaaaggagattatctggctatcgtaacgctggctttcggtgaaatcattaaaaatattctgaacaatctctatgtaggcgttgacggcagcggacttcatgtgagcatgtcttctgtaaaagagttgggaatggacgctggtacggttatcatcaacgggccgatgggtgctgtgggcattacaaagctgtccacgttcttcgcaggtttcgtgctcattctgatcacgctgtttgttacgctgaatctcatcaagagccgttccggccgggcgatcatggcgattcgtgacaaccggatcgcagcggaatccgtgggtatcaatatcacgaaatacaagctgatcgcattcgtcgtatcggcgctgctggcaggtatggctggtgcgatctatgcgatgaattattctacgatcgtacctaagaagttcgacttcaatacgtcgattctgattctggtattcgtcgtgctgggcggaatcggaaatatccgcggatcgattatcgcggctgcggttctcacggttctgccggaagttctccggagcttcaacgattatcgtatgctcatttacgctattgtactgattctcgtcatgctgggaacgaataatccgacgctgaagaattccattcagaggctgacgagccgcttcaaaaagaacagagaagcgggagctcctgccgctgagggaggtgattcgaatgaatgacaaagacagaattgtgccgatccccagcgagggcatcatgccggaacgtgatatcggtaaacctcccgttctggaggcgcgccatctcggaatcgatttcggcgggctgaccgcggtagatgatttcaatctgatggtgggcagaacggagatcgcggggctgatcggtcccaacggagcgggaaagacgacggtattcaatctgctgactaaggtatatcagcctacccggggaacgattctgctgaacggaaaagacacttcccggatgaatactgtacaggtaaataaggcgggcatcgcccgtacgttccagaatatccgtctgtttaacgaactgacagtggaagaaaatgtaaaagtaggtcttcacaaccacaccggttacggtatgtggtccggtattttccgtctgccgcgctactggaaagaagaaaaaaaggcgcatgagaaggctctcgaactgctctctattttcgatatgacagatctggcagatcacaaggcgggatctcttccttacggagcacagcgccggctggaaatcgtccgcgctctggctaccgatccgagcctcctcctcctcgatgagccggcggcgggcatgaatccgtccgaaacggcggaactcatggaaaatatccggaagatccgggatgaattccagatcgccgtcatgctgatcgaacacgatatgaatctggttatgggaatctgcgagacgatcgcggtgctcaattacggtaaaatcatagcaaaaggcacgcctgctgagatacaggcgaatccgcaggttatcgaagcttatctgggcaagaagaaagaggaggaatgatttcatgagtttactgcgtgttgaaaatctgcatgtacactatggcagtatccatgcgatcaaggatatttccttcgaggtgaacgaaggtgagatcgtcactctcatcggcgcaaacggcgccggcaaatccaccgcgctcaatacggtagctgggctgatgagagctaccagcggaggaattactttcgaagacggcgatattaccggcacaccggcgcataaaatcctcgaaaaggggatggccctctgtccggaaggccgccgtattttcttggagatgagtgttcaggaaaatctggagatgggaggatttacccgtccgtccagtgaaattgcagattccatcgaaggcgtctacgaccgtttccctcgtctgaaagagcgttataagcagcgcgcgggcactctgtccggcggtgagcagcagatgctggcgatgggacgggctctgatgtcaaagccgaagctgctgatgctggacgagccgtctatgggactggcaccgattctggtggatcagattttccagatcatcaaagagctccacgatacgggtacgacgatccttctggtagagcagaacgctcaggtggcgttatctattgccgaccgtgcctatgtgctggaaaccggacggatttctatggaaggcaacgcacaggaactgctggctgacgaccgggttcgtcaggcgtatctgggcggctgagaaaacggaaatcatcctgttttctgcaggaggcgatttactatccgtcatctggaaggcggaaaacatcgatctcatataaatgaaaaacagagaaatctgcagttcactttttcttttgagctgcagattttttactttattttccattttattttttgaaaattttggttttgaaaatgtcagtttctgtatccggacgggaatatattttttgctgacgggcatactgaaactggaggtgattgaaatgaccacaaaagaactgttatatatcgaggatgcgctcggtcacgaacagtatttccagacaaagtgcaaagagaccatcagtcagattcaggacggacagctgaagagctgtctcgaacagatggcccagaaacaccagcagattttccagaatttctacggactgctgtaatttgaggaggaagatgaaatggatgataaaaatctgatggagaacattctcctgctggaaaagggcgtatgcgatctgtatatgcacggcacaatcgaagcatctacagataacgtacaccaggcattcagcagcgcgctgaacgaagcgctctgcatgcaggatacgatttacgatgaaatggccgcaaaaggatggtatcctacggagcaggcagatcagagcaagatcagttctttgaagcagaagttcagtatgcaggcgatgcagtaacgaaagagatttcctttccggcgccggctttaaagtgagtcggaaggagccggacagcacgccggttccggcagatgccggccggcgcagcgcctgacgaaagcgcgaaaaatcccgcaggaatctggaaatcagagacttgcgggatttctgcttttgtcctgatttctgtcaaaggcagacgacagagctgtttgcggatcaggatgccgcggcgataaaacgaaatcattttgccagacgggaaatcggcgtcggcgtcagcttggaattcataaatttctggccgctgtagagactgtaatatccgctgagcatatagcttacggaagaggccacgccgaagagaagaaaatttccgctgccgaaaaattccacgctgagaagcaggctgctcaccggacagttgacgacgccgcagaaaaatgccacaagacagatttctgcgccaaggacgggatcgaggcccagaaacggcgctgcggtacagccgaaggtagcgccgataaacatcgccgggatgatttcgcctcctttaaaaccggcgcctgctgtagcggcggtcatcagcatttttacggcgaaagccgcaggcgcagcggttcccgccagtgcggcggtgatgactgtcatgccgctgccgttgtaatctctcgagccagacagcaaggtcagaatgataacaagaaaaccgccggccataatacggacgtaatcattttttaaatattttctgtagagtgcggaagcggtgtgcattacccggcagaaaatgatgcttaacatagcacagagaattcccagcgctatgatcttcacaaagaggaaaagactcgtcttctgaacgccggtgatgataaacgcctgccgggatacgcccagactcagagcggtcagtttggcgataaaagaagcgacgacagcaggcagaagtccggcgtaaaacaccgtgccgacgcccgccacttcaatagcgaaaaatgccgaggtcagcggagtgccgaaaagagcgcaaaaagtggcgctcatgccgcacatgacaagcatttgctgctcatgtttgcctaatttcagcgtacgggcgataaaagaaccgaggcttcctccgatctgcagggctgctccttcccgtccggcagagccgccgcacaggtgggtcaggaacgtagcgataaaaatcagaggagtcacgcgaaaagcggaggtatcttccgcccgggcggctctgaggatcgaattggttccttcgtcgttgcggatatccagactgtggtaagaaaagacggtgaggagtccggccgccggaaggaaatagagcagaaagccgtattctccgaacagataggccgcttcatcgatgaagtaatgaaacagcgctccggtcagaccgcatactactcccaggaaggcggcgatggcgagccatttcagaaaaaaggcgaaatgccggaatccgtgacgcagtttaatatcgattttcaggagcatgagttccctgtaattgtcactgtgacgatttaatttgttcataaagaagtcctgtttctgtccggacagcccgtttttatactcataggagcattggttcgggaagccggttttctgcgcgcggcgcatttttatatgataagttcttttttaggcgcggtttaaggcgcggtcgggggaaacggcgttctgaagccggagctgatacaggccccgtttcactttttggaagtggcgtcggagcagaagaatcccctccggatatatcgctttcattctatcatatgctgtctttcttcgacagaaggaaaatagactttcttttttcagcacccctgtataatgaggaatccggaaatatctgtgattttgtaatctgatatcgctcttatcaccgactactgtctctgaaggatgattgaaggttttgcttacaaaaacttacgaagattaaaaattttttatgaaaaataaatattattaaactaaaactaattaaagtctttgaaaaagataggagtgtatgctatacttatcacatctgaaaagatagaagataaatgaaaagaaagagggctttccatggatttatttccgctttggaactcgttgcgcatcgcgctgatttcctccataatcgtatttttttccggtattttctgcgcttattatatcgcgcggctgccgaagcttataaaaggagcgctggacgtcatcctgacgctgccgatggttctccctcctaccgtagtcggttattttctgctgatgctgtttgcgccggctacgccgatcggttcttgggtctatgagaactgggcgctgaagctggtgatgaactggcagtcctctgtcgcggctgcagcggtggtggcttttccgctgatgtaccggaccgcacggggggcttttgaaagtttcgacgtgacactgcgttattcggcccagacgctgggcctttccaatacttacattttctggcgtatcctgatgccgtactgcaaacagggcattatcgccggcctggttctggcttttgccagaggtctgggcgagtacggtgcgaccagcatggtctccggttatacgccgggtaagacggctacgatttccaccacggtttatcagttgtggtgtctcaacgacaatcacggagctttcgtctgggttatgatcaatctggcgatctctgccgtcgttctgctcgcggtgaatctcttcgagaaaagagacaaagagacgagagcgaaagctgcatccgtcggagtcagggggtagaacatgtcactggatatgaagataaagaaaaatcttggcggatttcagctcgatgtggagcttcacgcgggcaatgagactctggcgcttctgggggcttccggctgcggcaaaagtatgacgctgcgctgtattgcgggtattgaaaccccggatgaaggttatatccgtgtggacggcgaaacgctgtttgacagtgaagagaagatcgatgtgccggtgcagaagcgtcatgtgggattgctgtttcaaaattatgcgctgtttcccaacatgaatgtagagcagaatatcatgctggggatgaagagtttgccgatgccgaaagaccagaagacggcggagtgccgccgtgtcatcgaaaaattttacctcggcggcctggaaaagcacagtgtacgccagctttccgggggtcagcagcagagagtggctctggcgaggatcatggtctcgaaaccgcggatcctcatgctggacgagcccttttccgcccttgacagtttccttcgctgggaactggaacaggaactgatgaaggttctcggcgagttcgaaggcacgtccctgctggtgtctcataaccgggatgaggtctaccggatcagcgatcacatttcggtgatggctgacggtcatgtggactgctttgatgagaagaagcgaatatttgaagatccctatacgtatcagagcgcgcttctcacgggatgcaaaaatttctcccgggcggaatatatcgacgaatctcacgtactggcttccgactggaacagtgcgctgcgtgtgacgcgtccggtttcgggcggcgtgaaatatatcggactgcggacgcattacatgcatccgtccatggggcagcgcgaaaatgttatcgtctgcgatgtccttcaggccatagaggatctccatgagatgattctgctgctgcagtgcggcgattcggattcctcttattctgagctgcatatcactatggccaaagacgagtggaatgcgctggaagataaagacaaagtgtcgatttatctggagccggacacgattctggtgatggatagataatagatttattgattacttatcggcagataatgtgaaaaggagtacagaaaatgaagaaaaaaattcttgcaattgctttgacatttgtcatggcggcagctttctgcgcatgcggaacagaaaaaacgccggcatccgcggacggttccgctgatgcggcaaagggatccggagaagaggttacattatatctctccgctgcggcgtctatgacagagtccatggacaaagccatcgcggcttatgaaaaggaaaatccgggtgtgaagattcaggctacttatgattcttccggtacgttaaagacacagatcacttccggcgcggactgcgatatcttcctctccgctgcacagaagcagatggatcagctggacggcgccagcgatcagtgcgaaggtgaaaactacgtgctcgaaggtacgagaaaagacattctggaaaacaagtgtgctctcgtagtgaaagaaggcagcgatatcaagagctgggatgattttgaagcagcgatcaaagcggcaaatagcagtgatgatctgacttttgctatgggcaacgccgacgttccggtaggtcagtacacttctaagattctcacgtctctcggattaaatgagcaggatatggtaaataagggcatcatcacttacggaaccaatgttaaggcggtaacttccgcggtatcttccggcgctgcagactgcggcatcatctatgcgacagacgcttactccgcagagatgactccggtgggttatgcggatccggagatgacaggcggcccttgtatctatcctgtagcggtaatgcagaattccaagcatcaggaagaagcgaagaagtttgtcgactatctcttctctgaggaagcgatggcattctttaccgaagtcggatttacggaaatcgaagcgtaaagacgcagcggccgcggagagaagtgcggacggaataatgaagagaacttccggaaaagaagtttctttctgttgctgcagttcggggaaacgatcacaatgatttgtaagaaaggctctgagccggtatatgccggttcagagccttttttgccttaggagatcatcctccttttttcctcacataataagcaaatggtgaattccatcaaatcggaaatttggtgaaattccgcatggaaatccttttcgcatctttgatgcggcgcgcaaaacttcttgcaggattgtccgtttcggaagcttatttctgccggaaacggcggatttttatttttctgcaccgccggccggacttgacagcatcgccgcagcgtcaggcagcatggcgacgctgcgctgcagaataccctgcatataggcgattgcgataccgtaattcgtcatcggcacttgctgatcgtcggcgcatttctggcggtatttcatctcacgttcgttgagcatacagccgccgcagtggaggatgagacgatagggtgagaggtcttccggaaattctctgccggaagagagttcgatttcgatgtcttttcccgtatagtctctcagccatcgggggattttcacagaaccgatatcgtcgcactgccggtggtgagtgcagccttcggagatcagaacccggtctttgtccttcagagtttcgatggctgcggcgcctcttactgcgggcagaagcgtacctttgtagcgcgccatcagaatagagaaagaggtcagatctatgtcggccggcgtctggtcgctgacctgcccgaatacctgactgtcggtgatgacgatgcgtggttttttgcccagagcggtcagcgtatccggcagttcgttttctctgatgacgatagccgctgcgccggcttccagaatgtcccggatagtctgctgctgaggcaggatcagacggcctttcggggcggcgctgtcgatgggcacaaccagtacggcgaagtcagaaggggacaggagatcgccgacgattcgccgctgggattcttctgaggcggtaagccgggcgatacattctttcagatatgagattcctgtattaaaagctgcgctgaccgggatgaactgatcggcggagggcggaattctgcagtcggaacaggttgctgccgcttctgccgccgctgtggcagcgcagccgttttctggcagcagatctgctttgttcagcgcgatcagatagggaatttctttttcggcaaagatatcgatcagctgtctgtccgcttttgtgatgccggcggtgctgtcgatgacgagaaccgctgcgtcggtgcggtttaagatctgctttgtcttgcggacacgaagctctcccagagagccttcatcgtcgattcccggcgtatcgatgatctgaaccggtcccataggaaggagctccatggccttggtgaccggatcggtggtcgttcctttgatatcggaaacgacggagagttcctgaccggtgacccggttgacgacgctggattttcccgcatttctgcggccgaaaaagccgatgtggacacgctcggaagaaggcgtgctgtttaaactcatggatgttacctccgattccttgaaatgacggcggcgcggaaggggtatttctgcgccgcgcgcatgcgataacgctgtgaatcaaaaatgggaaagaaaatagtttttccatctcccggagaagaaacggcgatcagaaacggaagtctctttctccctgctcgatttttccgaggaagtcagtggctgtccggcgcaccttttcgttcggtacttttttcatctctttttcgatcagtgcaaggccgatctctctggtctcaggggatgcgtaatcttccagatattctttcagtgtgatcagcgcgttcgggtgacagaagttcagaatttcaccggctttgcagaagctcataaatcggtcgccggtccggccggcgcgataacaggcggtgcagaagctcgggatgtattccatttccatcagccattttacgacttcgtccagcgtccgggtatcggaaatgtcaaattgaacggtgtcttcaggacggatttcttccgtataaccgcctacgctggtgcgggaaccgccggagatctgggaaatgcccagatggagaacccgttccctcgtcttctggctctctctggtggatacgatcatgccggtgtaaggaacggctacgcggatacaggctacgatcttggcgaaagtgtcgtcgtcgatagcgttggtaaacgcgcccggatcgatgtcgtcggcagggcagattctcgggacactgatcgtatgcgggcctacgccgaagacagcttccagatgctcggcgtgcatgagaagacctgcaaattcatagcggtatttgtcgagaccgaagagcacgccgaaaccgacgtcgtcaatgccgccctgcatggctctgtccatcgcttccgtgtggtaattgtagtcgtgtttcggacccgtcggatggagttcatgatagctgtctttgtggtatgtttcctggaagagaatgtaggtgccgatgccggcttctttcagttttttgtaattttccaccgtggtcgccgcgatattcacgttgacgcggcggatatcgccgtttttatggtggacggaatagatcgtctcgatggattcgaggatgtattcgatcggattgttgacaggatcttctcccgcttcgatggccagtctcttgtgtcccagatcctgcagggcgatgacttcccggcggatttcctcttgtgtcagcttttttctcggaatcgtccggttgactgcgtgataaggacagtaggtgcagccgttgacgcagtagttggagagatagagcggtgcgaacatgacgatgcggttgccgtagaaatcttttttgatctgctctgccaaagcgtagatctcctgatttttttcttcgatatcacaggctaagagaacggaggcttctctgtgagaaagcccttttctctcttttgccttctcgatgatggaatcgatgagaacagcgtcggatttgtgctgttccgcatagctgagagtgtctaagatttcctgatggtcgatgaagtcgtcggcgcacatggattttggatcatacatggttatttttcctcctcgtcgttgaatattttggaatagactgtctttgaagaaattccgggcagcatgccgatttttccggacagggaactgatcacattgtccggtgcgtcgagaacgacgctgatgatcgacaccccccgttcccggtaaggaaggcccatacggcctacgatataggcgctgtaatccgacagaatctcgttcattttcggaatggacgcagtgtcttccactacgattccgaccagtgctgcacgatgtgtcatggtttcctcctgatttcttcaaaaatgtaaaacagaaaatagcacgcataggaaggttttaatcgctgattttcacgattctgccggttcgccgcagcgggcagagtcggaaacagacggataacataagaaaaacctgcgcatgcggcacaggtttcaagtgttcagaggtattcaaaagaactccggagttcggatcggatccgccggaatctgaatctttttctatatcctgtgcctttcatctcagagatggccgtctttccgcctcagaaagaggcaggaccggcgcatggccttcgatgtcagtgcaaatggtgttgtatcggtttcgcctcagggcgggaacgctccttcggtgtcaaccgggaaagcagaactcttccgaaggaagggaagtctgctttcggtaggttcattataatcagttctgttggcatagtaaagtataattaaaaaagtaacgatgttttgctccgctgacattgacaataaggtaaaaaaacgagaaaattaaaagataatgaaaaacgacgactgcgattttttcatcgaagtgactgagaggtaagttaaaatgcataaaatagatacagaaaagtatatcgtatccgcgcgggaagcgggaacggaaaaagcggaagacagggaggaagcagaccgtctgaagaattatggctggagaaatgtcagcgggccgcaacgagatgagatcatggcgtatgcggaagaatatatgtcttttttgaacgcggcgaagacagaacgggaggcggtgaaagtgatccgccggatggcggaggaacgcggttttgaggaaatcagtaaaaaagagtcgctgaagccgggggatcgcgtctacggcgtcaataaagacaaatccatgtttcttgcagtcatcggcgaggaagcgttgacctcgggatttcacgctgtcggagctcatatcgacgctccccggctggatctgaagcaaaatcctctctatgaggacagcggttttgcgctgtttaaaacgcattattacggcggcatcaaaaaatatcagtggacgacgatccctctggctctccacggcgtcgtggttctcaccgacggaacaaaaatcgatatctgtatcggcgaagacgagagcgatcctgtttttctggtgaccgatctgctgccgcatctctcggcgaagcagaatgtgaaaaaactggcggagggtgttccggcagaaaagctcaatatccttttgggttctatgccgatgccggaagcggaaagtgaaaacgtaaaaaataatattctgtcgattctgaaagaaaagtatggtatggaggaagaggacttccgaagtgcggagatcgaagcggtgccggcgatgaaagcccgttctctgggcatggaccgaagtatggtggcagcttacgggcaggatgaccgggtatgcgcttatccggctctcacggcgcttttcggccttactcaggcgcctccgaagactgcggtctgcattctgacggataaagaggaaatcgggagcgtaggcaataccggcatggagtcccgtaattttgaattgttcctgctggatctgctggaaaagagcggaatcgttcatccttacgcgctgcagcgcatgctgtccgcatctcaggctctttccgcagacgttaccgctgcgtatgatcccacttatccggaggtcatggaaaagcacaacgcggcgtttatgggccggggcatcagtattaagaagtatacaggggcccggggcaagtcgggcgcgtctgacgccaacgcggaatttgtcgcttatgtgagaaatatcttcgagaaagctggagccgcgtaccagtcctctgaattgggaaaggtagatgaaggcggcggaggtacgatcgcttatatcctggcaaatcgcggtatggatgtgctcgactgcggcgtgccggtgcactcgatgcattctccgtacgaatccgccagcaaatacgacatttatatggcggacagagcatatggagcgttcttcaggaataaatagaaaagtatgttgaaatctcggcatactcggatcaggctgactgatcgatgcctgcgatgcctggttccggtttgaaagtgatatgacgaaggcgcgggaactgttaccgcaaacgggaggagatattatgtctgacagaatcaaacttacatggcacggccattcctgttttaagatcgaagcgaaggggcacagcgcggtgatcgatccgtataccggcgtaccggggtatccggagctctctctttcggcgggggaagtctatacctctcacgaccatgatgatcacggctgggttcgggcggtgcgcatcgaagacgagccgggggagtctccatttaaagtgaccacggtggattgttttcacgatccggaaggaggagcgctgagaggcggaaataagattacggtctttgaggtcctgggaaagcggatcgctcatctgggagatctgggtcatcagctcggcgaagaacaggtaaaatccataggagcgtgcgacgtgattctcctgccggtgggaggtacttataccgtcgatgcgagggaggcgaagcaggtggccgacgttctggacccggcggtgatcataccgatgcattaccggaccggacggtatggtttcgacgtgatcgcggaacccgaagagtttctcagactctgtacagaccggagaatcatccgtgaagataccgctgtctgggaagtcgacgacagcggcgaaagacgcgtggtcctgttaaagtttgaggcataggcctgctgttatgtcaaagggaacgagggatacactctttttacagggcatgatcctggcctgcgccgggattctcacaaaaatcataggctttatataccgaattccgatggcaaattttctgggagatcagggaaacggaatttattccgtggctttcgggatctacaatatcgctcttacgctgtcctcttacagtctgccgctggcggtatccaaactggtgtctcatcggacggcgaaaaacgaacaccgcaacgcgcgccgggtctttcgggattctctgctctttgcagttctcgtcggagcggcggcatgcgcggcgctgtacctcggcgcggacgctctggaggagctctatcatcgtccgggactggccagacccctgcgggtactggcccccactacgtttgtcgtagcggtgctgggagtcttccggggattttttcaggggcacggcaatatggtgcctacggcgctctctcagattgcggagcagatcgtcaacgctgtggtcagcgttatcgccacatatcagtttatgatgatttatgcctcttcagcggatgtctactcttacggagcggcgggcggcacgctggggactctggccggagccgcggccgcgctgctgttgtttttctggatgttctggctcatgcgggggactctgcgccgccgggcggcgagagatcattcgcgcagagaacgggattccgctatcgccggggagctggtgctcacggtgatcccaattattctcagtcagacgatttatcagatcggttacacgatagatgattttctcttcggaaatatcatggctgagaagggattcagcgatgcggtgatcagttcgctgcagggcgttttcaatacgcagtacaatcagctgatcaatctgcccgtagcagtcgctacagccatggcggcttctacactgccggcgatcatacgcgcaggcgtacagggaggcgccggagaggtcagccgaaagatcgattctgtgataaaattcaatatggtcatcgcatttccgtcggcggcggggctgaccgtgctgggcgggcctattgtaaaagcgctttttccgaggctgccggaatatcaggatctggcggcgatgcttctgaccgccggatcggcggcggtggtattctacgctctttctacgatcaccacatcgattctgcaggggcagaattacatgcgtctgccggtatttcattcaggagtgtcgctgatcattcacgtgattttggtctggggtctgctgaaatataccgatctgggcgtatatggtctggtcataggaaatgtgtcttttccggtgatcgtgagtcttttgaacatgagagctatggcgaagaggctgcgctaccggtggaaatggaagacagctttcgggattccactgacagcgtccctcggaatgggagcggtgacggcgatatcttaccgtctggtccgtatgattctgcccgtgagctggctggctcttctggcgagcatcgcggcatcggtgctggcgtacggtatgttgatcctgcgcctgaaatgctttacgcgggatgagctgctggaacttccaatgggtacaaaattagtccgcctaatgcatatgaaataataaaaacaaagagacgccggcggagtcggcggatttcaagagagggaaaagggaaaataatgttagaatttttagaagcgagttatgccggtaagatccttgcgacactgctcacgtctatggtgcctatcgtcgagcttcggggaggaattcctttcggcgcggcgctgggacttccgccggcggcggtcatgggcgcggcgatcatcggaaatatgatcccggtgcccttcatcattcttttcatcaaaaagatctttcagtggatgcgtcggtttgagccgctggcaaagctggtatcgcatttcgaatcgaaggcggagagcaagtcggaccgggtgacgagatacaagaagttcggactctgtattttcgtcgcggttccccttccggggaccggcgcctggatgggagctctcatcgccgcgctgctggatatgagactgagggattcgtttcctgtcatcacgctgggggtctgtatcgccagtctggtcgtaacggggataacttatggatttatttctcttttctgatgaagtaaagcgggaccgctcgagaaaaacatggagcggacagatggagggatgcccatgaaaatatatcggattctcatcgtggaggatgaccgtgttatcgcaaaatcgatcaaacagcatatcgaagcctggggctgcagcgccaggactgtccgcgatttcagcgatgtcatgcacgaatttgcggagtttaatccccatctcatcctgatggatatcggacttccgtttttcgacggatatcactggtgcagtgaaattcgcaaggtttcgcaggttccggtgatttttatctcatccgctgcggacaatatgaatatcgttatggccgtgagcatgggaggagatgattttatcgccaaaccgtttgatctcagcgtactgactgcaaaggtgcaggctatgctgcggcggacgtatgatttttcaggagcttccaatctcatcgagcacaggggagcgattctcaatatctcggacgctactctgatttatgaagggaatatcgtcgatctgacgaaaaatgaataccggattctgcaggcgctgatggaaaacaggggcagagccgtcagccgggacatgctgatgaagcggctctgggagacggacagttttgtggatgagaacacgctgaccgtaaatgtggcgcgcctgagaaaaaagctggaacaggcgggaatgcaggatttcatacagacgaagaaagggatcggttatctggtgtaaagaagtccggcaggcagacgatgatgtaaaaaacggaaggaaacggagaaatatctatggatcttgtgacatcgataggaaaatatctcagacggcattggcatacggcgatactctgggcgggtatcgccgtatgttttgccgtcgttttttatctgtacgatcttcccctggaagcggtgctttatgccgcgcttttgagcgcgacgctcctcgccggatcggccgcggcgggtttttttctgcactatcgtcagcacaggagactttcggagctggagttccggattatggtggaagggggcagtctgccggaacccaggaaccagatcgatgaagactacaatcgtctgatctccgcggtgctccgggaccgggcggcccggatgtctgaagcggcggcttaccgttcggacatgacggaatactatacgacttgggggcatcagatcaagacgcctctggcggcgatgcgtcttctgctgcagaacgatcttcaggaggagggtgtctcgccggaacgggcgttggagctgctgcggggagaactttcggaagagcttcagaaaacggaacaatatgtggacatggcgctgcagtatctgcgtctggattcggccagcagcgattttgtctttaaagaatacagccttgacgatattctgaagcaggctctgcgggagtattccgggatgtttatccgaaagcgaatcgcgctaaattaccggcagacagggatcacggtagtcaccgatgaaaaatggctcctctttgtcatcggtcagatcctctccaatgcgctgaaatatacagattcaggtaaaatttccatatatactcagatgagtgaggcagagaggccgtcagagctgaatgcggaggatggaggtccgttaggcgaggtacccgttcctggagatgaggaatcgcgcggcgggggaactgcgccttcggaggattcctgtccggaaccggcgggaatatttctggtcatcgaagatacggggatcggaatcgcgccggaggatctgtatcgcgtctttgaaaagggattcaccggatacaacggaagagaaaataaaaaggccacgggtctggggctctatctgtgccggcggattctggacaaattgtcgcataccatcgagatcgaatcggagctggggcggggaacgaaggtgaaaatcgggctggagcggtatgaggtgaagggggaataagggcacgagagtactgatcccatgaaaccatccgcctgcacgcggaagagaaagccggtgtcttgcggaaagatccggacttctacggagcgtcgataggattttttggcagagcgtgctaccatgatgtcgggaggaaaaagtttatgaaccagaaaaagacaggagagctcatccgcagtctgcggaaagagcggggactgacccagcagcagctggcctgccggatgagcatcagcgataagacggtttcgaaatgggaacggggcgcaggttcgccggatctgtccatgttcccgctgctgtcggaactcttcggtgtggagatcgacgttcttctgtcgggagaattgaattcaaatgatcagacaggaggaaatatgaaacgaaccgttttttatgtatgtcccgactgcggaaatatctttaccgcctctgtggaagcgggaattacctgctgcggaaaaaagctgacgcctcttcaggcaaaaaacgcagctgaagaagacaggctgtccgtagagcaggtcggtgacgagtactatatctcatcggatcacgagatgaccagagagcactatatttcttttgtggcgcttgctgcgggggatacggtgatccttcgcagactctatccggagtggagtctgaagacctatctgccgcgaatcgcccgggggaatcttctgtggtattgcacacagcacggtctctttcaccggaagctatgagccgcagcgctccggccggcggcgcagaaaatttcgggcgccggcggcgggcaaaggcggctcttatgtgacaaaaatgtaagacagaagagagaaatgtaagctgaatctatggcggagcatttctctttttttatataataaacgcgtacaaaggcggaactgcttcagggggagcggctgccgaaatttcagaaggggaggtcggtgcgcgccgccagcttgaaaaatccgcagacaggggagatcgagcgcaggctgtgaggagctggacggcgcctccgacagaagtaaaggaggagattcagatgtctattctggaagtgagtaatctgaaaaaagtctatgttcagagattgggaggaagccacgttcaggcgctttccaatgttaccttttccgtagaggaaggtgaatatgtggcgatcatgggggaatccggttcgggtaagacgacgctgctcaatattctggcggcttttgaccgccctaccaacggtgaagtgaaattgggcggaaaaaatatgaatgagatcagcgagaaggaaatttctgcgttccgcagggaaaatctgggatttgtgtttcaggactttaatctgctggatactttttctctcaaggaaaatatttttctgccgctggtgctgtcaggcaaaaaatatcaggagatgagtacgctcttagctccggtggcccgccggctggggattacagatcttttgcagaagtatccttatgaagtttccggcggacagaaacagcgggccgcggtggcgagagcggtcatcacacagccgaaactgattctggcggacgagccgacgggagcgctggactcccgttccgccgatgaactgctggatctcttcggggaactcaatggggaaggacagacgattctcatggttacccactcagtcaaagcggcgagccgagccaaccgggtgctgtttatccgggacggagaagtatttcatcagatttataaagcgaaccgtaacgacgagcagatgtatcagctcatttccgatactctcaccgtacttgcgacaggcggtgatcggtaatgagaaagaacttctatctgagacttgctctcggcaatatccgaaaaaacggaaagttttatctgccgtttctgctgacgtgcatcgccgctgcagctatgtttttcaacatgtgcagtatctacaccaatgagactctgacttccagacaggacgctcagatgattctggggctgggagtgatcgtgatcgctctgttctccgcgatttttctcttttacaccaacagttttctgattaaaagaagaaaaaaagaactcgcgctctacaatatcttcggaatggaaaaacgccatatcggacggatgctggtctgggagaaagtcgtcaccgctgtcatcagtatcggaggcggtctcttgacggggattctctttgaccggctgatgtttctcatcctcttgaagactcttcacctggaacaggtaaagtatcatctgagctcccgtccggtcctgatgactctggcgcttttcaccgtgatttttctgctcatcctcatcacggatatcgcccggattcagcgatcgaggccggcggaactgctgcagggcgcgtcggcaggagaacgggagccgaagagcagaaagattctggcggtcgccggcgcggtgtctttagccgcgggctacggtctggctctgggttccaaggggatttatgcgtttttaatgtttttcgtagcggttatctttgtcatcatcggtacgtactgcctgtttaccgcgggctctgtcgctatactgaaaggcgtcaagaagagggaaaattattactacaagccgaatcattttatttccgtctccggtatgatctaccggatgaagcagaatgccgtgggactggcaaatatctgcgttctgtccactgtagtcctggtcatgctctccagtacggtcagcctgtatgtgggagtcagcgatattgtgaagcagaactatccttatgacatcagcggcgcttatccggagggcggacaggtggaggccgcagaagagatgaaccggatcgcatctgaaatgaacctggaaatcgaaaactattcttcttacgagacgttgtcggtgacttttgtgaaagatggtactgcgtttgaaagatccgatctggataatgccagtatgaacaacgtggcggtgctgatcttcatggacagccactcttatctgaatctgacaggacaaaaaacagatcttgcgcaagatgaggtcctggtctggaacagttcttcggtaaagaaaaaatcccgccttgaggcaggggacactctcgatattctcggaacaaagctgcgggtgaaagacaccgccgacgaatctccgatgccgggcagaacgtcttatcctgtggatgacgtatattacatcgtcctcagcgacgagagtatgatggagcgaatcgaccggcttcagagagatctttacgaagagcattacagcgtcgtcaaccggatctttcagttcgatctctccggtactgacgaccaggaaaaagctttttataacgaggtgtctgccaatatcagccaagcccggaaggccgccggcgaaggcggaggaaactctgcggatatgagccggtacgattatccgacgacgacggtgtcttcccgggcggacagtgtaaaccgggtctacggtctttatggaagttttctgtttatcggacttttcctgggactgctgttcatattcgccacggtgctgatcatctattataagcagattatcgagggctacgaggataaagagcgtttcgaaatcatgaaaaaggtggggctgagcaatacggaaatccggtcggcggtcaagagtcagattctcaccatgtttttcctgccgctggcggcggctgtaattcacacagttttcgcctttccgatggtcaagatcattctcggaatgatgggactgtcggatgtgtcggtatttatcgtctgtacggcagccgtcgtatgcgttttcgccgtgtgttatgccgctgtctatgctctgaccgccaaggcgtattataagatcgtgtcataaatgagtgcggcaaagggaaagatcgaggggaaggagcctgtgatacaggctccttcccctcggctgtttttgcactttccgccgtatttcatgtctcgcagagtgtttcattggcaggaattttaaggagctgccgctgggaatgcgggcattttaaagagagcggagaaaatgcagcagtatttcggaaggaaatttgataaaatggaaaaaacagaacgggaatgcgaaggaacgcaggaggaatgtgatttaatggatggttttattttaaagggtgatatcggctggagtgtttcaaaggatgagatgcggacggtttccggaggttatctggtgtgcgcggaaggggtatctctgggcgtctttgaggaactgccgaaggaataccggggtctgcctttgagagacctcacgggaaagctgatcgtgcccgggctgactgatcttcatatccacgcgccgcagtacgaattccggggaacggcgatggatctggagctcatcgaatggctggaccgtcagacgtttcccgcagaagtgaaatacggcgacacggagtatgcggaacgggcgtacgctgttttcgcagatcagatgaagaaaagcgctacgacgagagcctgtattttcgctacccgtcacagtgagtccacgaaaattctcatggatcatatggaagcgaccgggatcgtttctttcgtaggaaagatcaatatggacagaaatgctccggaggagctgagggaagacagcgtttcgtcggcggccgataccgtcgcttggctggaaagtgtccgcggaaaatacgagcgcacttttcctattctgacgcctcgctttatccccagctgtacagacgaactgatgagatctctggcggaaatccgccgggaatatgcgctgccggtgcagtcccatctgtcggaaaaccaggacgaagtggcgtgggtgaaggagctctgtcccgaagcgcagttttacggcgacgcttatcagaggttcggcctcttcggcggcgaggcgaaaacagtcatggctcactgtgtttattcctgtacgcaggagacggaactgatgaaagataacggcgtatttatcgcccattgcccggcttccaatatgaacttggcctccggtatcgcgccggtgcgcagttatctggacagaggtctgaatatcggtctgggaagcgatgtggcaggagggcagacagagtccattttccgggcgatgacggatgcgatacaggtgtcgaagctgtattggcggctgatcgatcggaacagcctgcctctggcttttgaagaagccttttatctggcgacggcgggaggcggagcctttttcggaaaagtcggcagttttgagaggggatttgaactggatgcggtcgtcctggatgattcggttctgccctgtgtgcagccgctgtccgtaagggaacgcatcgaaagagcggcatatctgtccgcagatctgacggctctgtgtgaaaagtacgtgagaggcagaaaggtttacgagagagtctgcgaatcgtcggagagcaggcgccggtaagtcagatccataccgatggcccccagaggagccgtgatgagtatggccagaaccgctgtggagagcacgatttcgccgcagggcagtcccatggcgaggggaacagagccgatggccgcctgtacggtggctttcggcaggtaggcgatgatgcagaagagacgttcttttcctgtgagctgtgtgcccagcagacacagacagaccgcagcggaacggaagagcagagcgaggaggatcatggctgcagccgccggacccgcgctcagcgtataacggatatctacggcggcgcctactaaaacaaagaggaggacttcggcggcgatccacagttttccgaatttttcggagagacggtttgatacagatccggggctctgaatcttcagcatacaggccatgctgaccactgacagcagaccggagacagacactgtgcctttcagccatgtttcgactgccatcagcaggaaggacgtccccagtacaatgatgactttcatgctgtttcggatgtagtgctgacggacgtaagccgtctcgaagaaccggaagagaagataccctgtcagagcccccagcgcggttcccagaagaattgaaacgggaatattgatgaaatctgtcatatgagcgcttccgccctgcgccatactgacgaaggcggaaaagagcacgatgacgaaaatatcatcacaggaggctcccgccatgatgagctgcggaatgcttttggaggtgccgcgcttcgtctccatcagctgaaccatccgtggaatcaccaccgcaggggaaacggctcccagtacggcgcccatcaccgcggcttcgattctcgtgacgccgagaatgtgcggggcgaaaaggacaaaagcgagaatttcgaaactggccggcagaaacgacatcaggactgccggccggcctactcgtctcagatccgccggatccaaggaaagacctgctttcagaaggatgatgatcagcgccgcctggcgcagttctgcagatatggacagaatcgacggatccagaaaatccagcgcataggggcccagaacgattcctgtaatcagcataccgataatccgcggcagtttcagacagcggcagataccggccgcagacagaccgacgagaaagatgagtgcgagcgatgtcagcatgataaattcctcctgatattaaaaaatttctttatgaggctgataacttcgggcggtgcaatatatgtcacgggttttcgcgcgccggttttcgcgggatgcaagttcccgcaggcgcgatcacagtctctggagatgagaatgatggcccgtgatgtcgggaacgcaaaccggcggggaaagtcccgttatcgcatccggagagatcccgggctgcgattgttcccggtgcgagcctgatgggaagaccgcgttatcgcattcggtgagatccccggaagtcaaaaaacaaaaaactgatgacatctgtgaaaaaatcacagaagtcatcagctgaatcagcggtttcgatttctcgggggagaacttcattccctaaaaatattatatcgagcgatgcggagtttgtaaaccccgaaaaagacatctttcgttctctgccgctctccgcgcaggtattctacagcggtaaaagcgcctgccggaccgagaacgggatatcgccgttctccgtaaagtttgaaatctgaaacgtgtgaagctcccttttcttttatacggctgaactcggcggttcccgggagatttttccgtgaatagggtctctccgggataagaccggcgtcggattatatgtttattttaacggaaacggaaaggggatgcaagaaagtgcggagcgttgtcctgctcatgcggagattccgaaggatcttttcgtctaaaattctttgttttctatgattctgacgctgatcctgtaggaaatcagcagacacaggagagaaaatatcaggcatcctgcgctgaagacagacagcgaaagggactgtagcgcgttcagcatgctttttacgtcgataccgaagccgctgagaattttcatcgcgaagtaaataacggccgagccgatgaggaaaatcgccatcatagcgatgatgcctctgtttcccccgaatttcatctgtgtgggaatcatgacggcattgagcaggaaggtcagcgcagcgatgagcagcgctgtgaaaatatattcggagaggacgaggtccggaacccggtgcagatcgaatacgatagccagcgcggtagagaccgtccatacgatgatatttgtcagtatggtgagaatatatttttccgcagcataggattttctcgcgaaaggcagagtgaagaggaatgcgtttccgttgtccagatcgtcgtaggacagtgttcctaccgtgaacatcgcgctgacgatacaggcgtaaccgatgataatcgtagcggtgacttccgtgaaaagatagaaaaggatgactgcagcgaaaatcacggcgaagcttttctggtttttcatgagcttcagatctttgatcataagtcctttcattttacgtttcctccttttaccatcatggtgatcatctcgtcgatgctccctttttcgataacgatgccgggataattttcttcataataacgtttttccgaagtgaggcagctgatgccgaagctctctttcatcattcggagaagatatcttttgtcaaggcggtcgtactgctgtgcgctgactttcagcagcccgtattcactgagcagcacatcggtctcctcgtgaaacacgatatgtccgtcgtgaatcatgtacaggtcgtcgcagagtttttccagatcgccggcgatgtgggagctgatgaggacagaacggcgttcgtcctcttccagatattcgcggatcagatcgagaacggtgtctctggccaccacgtccagaccggaggtaggctcatccagaatgatcagctgcgcccggtggctcagcgccagaagaattttcagctgagctttcattccggtggagaaatctttcagttttttatcgaaaggcagctgaaagcggcggcagcgcgccacgaaggtattgcggtcaaaattccggtagaaatgattcataatgggaagaatatctttgatattcagataattgctgaaaccggaatcggatagaacgacgccgatattttctctgtcgcgagtattcagatcgcagagatctcttccgaatatttttacactgccttcgtcgatgcggacgagtcccagcacggatttaaatgtggtgctctttccggaaccgttggggcccaccagtccggtgatgcatccggggctgacttcaagcgaacagtccagccggaaactcccgtaattttttttcagatgatctattttcagcattttttcctccataattctttttctgccgtcaggcacgggacttgattttgtatgaaaatagcggcgagcgccggtatcagtcttcgataatcaattcaaacagcgcgcggatctccggatcggtgagaccgtactggcggcctttctgaatggctgtctccagatcggcttccacgtctttgcggcgttcttccagcatgagttcctgatttgcggcggcgatgaaactcccttttccatggatggtgacgacgaatccctcttcttccaggcggtcgtacgcttttttcaccgtcagcgcgctgattttaagttccttggacaaagaacgtaccgaaggcagagcgtcgtccgctttcagaattccgtccatgaccgaggccttgatctgcgcggtgatctgttcgtagatcggtatcatcgatgagtggttgataatgatattcataggcagccctttccatgcgattggcaattgtgccggtactccgcggaaaacccggaggagaaccggttcttttcgaaaagcaattttgtgttaacagcatataacagtgtatgactgttgtcaactgttatatactgtttttctgaaattttttgcgtaccgcaatgaaagaaaacggaaataagtgttgacactgtattagcatgaatggtacactaagaacagttgaagaacgagcgggattatcaggggagccggcgagtttttccggtgcggagttctggcaggctgtctgatcagagcgcgccgccgatttcggcatcgcaccggcaaatgtcggcgcgagatcagtccgtatgctgccggacgacgggggtatcgtttctcaggggcgcagtgtccggatctgtccggtttttccgttcgttcttcccataccagtgaaagggggaaatcttattgttccaggtagacatgaagagcagaaagtccatttacgaacaagtcgtagataatatcaaagaattgatcgttactggaattttatctgcggagtcaaagctgccgtcggtccgcgagttatcgaagacacttaccgtcaatccgaataccgttcaaaaggcgtatcgggaattagaacatcaggggtatatctacacggttacgggtctgggatgttttgtaaaggagagagatgagatgcagtttgacgagaagagattcagccaggtcagcgacgatctgaaattcgctgtcaaggagctgatgtttatggggattacttcagacgaagtgaaagaaaaggtagacgaggtttacagcgaagggagtggcagagcttgattaccgtgaaaaacgtaaataagcatttcgacgactttcacgcgctgaaggatctgtcgatcaatgtaaatactggttccatctacgggctggtaggcacaaacggttccggcaagacgacgattatcaaacatctgaccggaattctcagacaggactcgggggaaatcctgtttgacggggaaccggtttatgaaaatccggcccttaaggcacagatcggttttgtaccggatgatctgagctatttcgcaccgtatacgatgaaagacgcggtgaaatattatcaatctctctatcccgtatgggatcaggaacgttatgacgagatgagaaaggctttcgatctgggcagcggaaagaagatgaacagcttctcaaaggggatgcagaaacaggcggcgttcatcctgaccatgtgcaccaggccgaagtatctgattctggatgagcctatcgacggtctcgatccgatcatacgaaagctggtctggaaatatattatcgacgacgtttccgaggggatgacggtgctgatctcatctcacaatcttcgtgagatggaggggatctgcgacagcatcggcattttagacaaaggaagaatgcacattgagagagatctcgacgagctcaaatccgacatcaataagattcaggtggcgtttaacgataaggccgacgcggaaaaggggtacgcaggtctgaatatcgtacacagagaatcgagaggaaaggtggatctgctgatcatccggaacgacagcgaacagatccgccgggcgctggaaccgtatcgtccg

SEQ ID NO: 3302 - DNA, 15183 bp, Unknown
  16S sequences of unknown bacteria
cttcatgacaaagggcttgaacagctcgagagccatctctttgggcaggccgcactgatacattttaagctcaggaccgacgacgataaccgaacggccggaatagtcgacgcgcttaccgagcaggttctgacggaaacgtccctgcttacccttaagcatatcggaaagggatttaagaggacggttgttgggtccggtgaccgggcggcctcttctgccgttttcgatgagggcgtcgacggcctcctggagcattctcttttcgtttcgaacgattatgtcgggagcgttgagctcgagaagtcttttaagacggttgttgcggttgataacgcggcggtagaggtcgttcaaatccgaggtggcgaaacggccgccgtccagctgaaccatggggcgaagatcggggggaatgaccggcacaacgtcaagaatcatccactcggggcggttacccgacaggcggaaggactcgacaacgtcaaggcgctttaacacctttaccctcttttggccggtggcggtttccatttccttgtgtatctcggccgaaagctggtcaaggtcgatttcgcagagcagctttttaatggcctctgcgcccatcatggcctcgaaatcgtcctcgtatttttccttcatgtcctgatactgcttttcgttcaaaagctgtttcttgacaaggggggtgttgccggggtcggtaacgatatactgggagaaataaagcacgttttcaaggagctttggggaaatgtcgagcataaggccgatacgggagggaattcccttgaaataccaaatgtgggacacgggagcggcaagctcgatggagcccattctctcgcggcgaacctttgcgcgggttatttcaacaccgcacttgtcgcatattctgcccttatagcggattcttttatactttccgcaatggcattcccagtccttggtgggtccgaaaatcctttcgcagaaaagaccgtcggtttcgggctttaaggagcgatagtttatggtttcgggcttggtaacctcgccgtaggaccagcttctgatctgttcgggcgaagcaagaccgatttttatggattcgaattcgagttccttttgaggttctgtcatcataaattttcctccttacatttcttcgttttcggacgattcgccatcgtcgaaaagcatggtgtcgtcgtcggctctgtcctcgataacattgccctcgtcgtcctcaagggtatagccctcaaagccgtcggcaacatggtccatttcaagagtctcgccgtcgtcggcgggttttttgaccggaatgtcgtcgtcgtcgaagttctgtttaaggtcgacggcctcgccgttctgatcgagaacctccacgtcaagacccagcgactggagctccttcatcataaccttgaaggattcggggataccgggcttcggtacattctgacccttgacaatggcctcataggtctttacgcggccgttaaggtcgtccgacttgatggtgaggatttcctgaagggtataggcggcgccgtaggcttccagcgcccaaacctccatttcaccgaaacgctgtccgccgaactgagccttacctccgagaggctgctgagtaacgagggagtaggggccggtggaacgggcgtgaattttatcgtcaacaagatggtgaagctttaagaagtacataattccgacggttacgcggttgtcgaactttcttccggtgcggccgtcgtagagctcggttttgccgtcctcggcaagacccgcctccttaagagcctcgcggatgtcctcctcgtgagcgccgtcgaaaacgggggtgcagaccttccagccgagggctcttgcggcatagccgagatgcacctcaagcacctgtccgatgttcattcgggaaggaacgccgaggggattgagcacgatgtcgaggggggtgccgtcgggcaggaagggcatatcctcgacggggagaattctcgaaacaacgcccttgtttccgtggcggccggccattttgtctcccaccgagatttttctcttttgggcgatatagcagcggacgaccatgttaactccggggttgagctcggaggaattgtggcggtcgaaaaccttgacgtcgacaatggtgccgtattcgccgtggggaacgcgcagcgaggtgtctctgacctctcttgccttttcgccgaaaatggcgcgcagcagccgctcctcggcggtcatttcggtctcgcccttgggggtgaccttacccacaagaatgtcgccggcgcgaacctcggcgccgatgcggatgattccgcgctcgtcaaggtccttaagggcgtcctcgcccacgttcgggatgtctcttgttatctcttcggctccgagctttgtgtctctggcctcgagctcgtattcttcaatatgaattgatgtgaaaacgtcgtctctgacgaccttttcgtttataagcacggcgtcctcatagttatagccctcccaggtcataaagccgatgagagcgttctttccgagggcaacctcgccgttgcttgtggcggggccgtcggcgataacgtcgtggggctcgacgtgctgaccctccgacaccacggggcgctgatttatgcaggtgccctggttcgaacggaggaatttgatgatttcgtatttgtcgacctcgcccgactcggtggtgacctccacgctgtcggcgtcgaccttggtgacggttccggcgcgttcgcaaagcacgcaaacgcccgagtcgaccgcagccttatattccataccggttccgacaatgggggaatcggtcttgagcagcggaacggcctgacgctgcatgttggcgcccatcagggcacggttggcgtcgtcgttctcgaggaaggggatcatggaggtggccaccgaaataaccatcttaggcgaaacgtccatgaaatcggccatttctctttccacttctataaactcgtctctgcggcgggccgaaaccttggctctggcgaaacgtccctgctcgtcgaggggctcgttggcctgggccacgacgtaatcgtcctcaacgtcggcggtcatgtaaaccacctcgtcaagcaccacgccggtttctttatccacgcggcggtagggcgcctcaacaaagccgtattcgttaattctcgcaaaggtggcgaggtaggaaataagtccgatgttgggtccttcgggggtctctataggacacatgcggccgtagtgggtatagtgaacgtcacgaacctcgaatccggcgcggtcacgggaaagtcctccggggccgagagccgacagacggcgcttgtgggtgagctcggcgagggggttggtctgatccatgaactgggacagcggcgaagagccgaagaactcgcgaatggcggccacaacgggacggatattgataaggcttatgggggtgacggcctcggcgtcctgagcctgaacgcccattttctcgcgaaccacgcgctccatacgggtgataccgatacggaactgattttgcagcagctcgcctaccgaacggattcggcggttgccgagatggtcgatgtcgtcgacgctgcccacgtcataggtcagcccgagaatgtagctgacggtggcaaaaatgtcgtcgagggtgatgtgcttggggatgagcttatccttgtttgcgcgaagagcggccttaagctcctcctcgtcgtcataagcctctaaaagctttacaagctcgtcaaagcagacgcgctcgttgattccgcactcggcctcggcgtcgaaattaacatagtcctttatgtcgacggtgtggttggcaatgaccttgtgctcgctcttgccttcctcggtctcgacctcgatgtatgcttccttaacgccctttttgtcgaacagctcggcaagctcgcgggaaacggtaacgccgggttccgcaagcagctcgccggtcagcgggtcggccacgggtcttgtcagcgtgcggccgagcacacgtcccacaatgttgagctttttgttgtatttaaagcgtccgactctcgagaggtcgtatctctgggggtcgaagaaaagattattgatatgagtggtggcgccgtcgacggtaaagggctcgccggggcgcagctttttgtaaacctcgaggagagcctcctcgctgtttttggtaacatccttttcgatggttgcaagaaggcgctcgctttcgccgaaatattcctttatctcctcgtccttgccgattccgagggcgcggatgaaggtggtcagcggcagcttgcggtttttgtctatgcggacatagatgatctcgttctggtcggtctcatattcgagccatgcgccgcggatagggatgattgtggcgctgaaaagcttgcggccggatttgtccaccgcaacgtcgaaatatgcgccgggggaacggacgagctgggaaacaatgacgcgctcggcgccgtttatgacaaaggtgcccgagggggtcatgagggggaagtctcccataaagacttcgctttccttgatttcaccggtttctttgttgagcaggcgcgcggtcacacgcaggggcgccgcataggtcgcgtcgcgctccttacactctaaaatagtgtatttgggctgctcgtcaaagcggtatccgaggaaggtcagctcgagattgttgctgtaatcccgaatgggctgcatctcgtcgaagacctctttaagcccctgctccacaaaccatctgtaggagctcttctgaacctcgataaggtttggcatttcaaggacctcgttgatctttgaaaagctgtaacgttcgttggttccgagtcttaccttcttaacatttaccatcgactttaccactccgttttattaggattttgaaaaacatccgtcagccgcaccccttttccgaaaaggacggccgaaaaaatcggctaccccgcgtcttttccgtctcggagcaaaggtgcaaactaacctatattagtacaaagtagcattttaactcaagtggggtcaaatgtcaagagatttttaaaaatttgtttacaaacggcttttttgagcaaaatcggggcttgcaaagaacaaaaagaaacactcggcacggttgtctgtttttactcaggctttcgaatataatctccgaatctccttttaagatattcatccaggtcataacacggttcgtgttcttcgatttcgctctcgggcacgtcctcaaaccttcggtcgagaaggaaattggcgggcgaaggtatatatcttcccccctccttctgccagttttcgctttttttgaaatgcctaacgctctgcattattttttcgaaggtatcaccgtcgggggcgagaaactcaaaggcctttcttgccctgacaacattctgttttttcggatactctctccaaaactcctcaaaccgtccgccgcccgaatttttctgcggctctttttcattatcattgtctgtgtcattgtcattaacattatcattatctttatcattatcattatcggcttttttgggtttttcgaaaaagccctcgcttttttcgctttctcccggtttttcggattttttgttttcttccccccgcccgctctttttgggacgtcctccctttttgccgttttcggaatttttggcggtcaccgcctcgtatttttcggcgtcccgcttgatttggcttttcatgaaggaaaagcacatggcggtgacttcgtcgagagcgtcggagatgtcctctccccttatcccgtaggccatgacggccgaaaacagctttcccctttgctcgtcggagagccgcatacaattttgctcccaatcggcataaattaaaaatgattttttaagcttcataaattcgcctcctaaaaaggggtccgaaaacaaagaaaggttgcacttttgaatgcaacctttttaaaaattttttattttatttgttgaacacaacgctgtaaacggccgcgacgacaagagccggaagaaaattccccacctttatctttttgccgaacacgagatttatgcccacgcagaatataagagccgagcccacaaaggaaatgtcgcttatgacgctttggggcacaaaggagccgaaaaaggccgccgcagcggttatcagcccctcataaacaagaatggccgccgccgaaaaaatcgttccgataccgtaggaggaggcaaaaacgagggagatgataaagtcgagcaccgactttgaaacaagggtggtgcagtttcccgttgtgccgtcctcaatggcgcccacaacggccatggctcccacgcacaccacaagggacagccccacaaagccttccacaaagccgccgtcgccctgcgctcccaccgccgacttgattttctcgccgaggcagtccattcgccgctcaattccgcaaagctgaccgagcagcccgccgagcacgaggcttatgatgagcagcataccgcctgccgtttcaaagcccttttccgacggaacaagcattgaggcaaaggccccgcccgcgccgataaacattgttgccactccgcaggccgacatgagaatgttctgaacctgctcgcttattccttttttaaagagcatacccaaaaggcagccgacggccaccgccgcggtgtttataagggtgccgagccctatcataaaatcacttccgttcgacaaaatattctaaatgactcaggggaaattgtcaacgcgaatttttcggaaattttaaaccataaacttttattcaacgaaaaaaggcacggccaaacgccatgccttaaaatcgtcgtatttaagccttcacaaccgaaaccttgaccgttccggtgaggtcgggcagcttgcgtcccgaaagctttatcttttccattttcccgggaagaaccctttcgcggtattcggaggcaagctcggtgtcgtttgattccaccgttatcctgaccttttccatgggctttttgacacggaaaagcatgatcatgtcccgtccgaggtcgacgcagattcggtgaggaattatatatgacacgttctcgcccctttcggtggagacgaaattttccccgaaggtgggatttttgagatattcggcggccgaacgcccggcaagctcggattcgtttgacacaaaatccacaaggtcgtgaacgtgaagcacgttgccgcaggcgaaaatgccctccacaagggtctggcggaactggtcgacgatgggtcccttggtgacggggcttatgggaattcccgcaagctcggtcagctcgttttcggggataaggcccaccgaaagcagcagggtgtcgcactcatagaatttttcggttccggggacggggcgtcttgctttgtcaacctcggcgacggtgaccccctccaccctgtttttgccgtgaatttcggtgacggtgtgggaaagcagcagcggaatgttgttggcgacaaggcattcgtccatatttttcttggtgccgtttgaatatggcataagctcgcagacggcaagcacgtcggcgccggttctcttaagacggtcggccataataagacctatatccccagagccgagcacaaaaacctttttgccgagggtatagccctcgcagtttacaagcttttgggcgatacccgccgtgtaaactcccgcagggcggctgccgggtatggcaacggctcccctgctgcgctcgcggcagcccatggcgagaattatggctcccgcctttattgtgaaaaagccgttttgattttgataggtgacctcccgctcctttgttatggaggtgaccatggacgagctgtatattttaattcccagctcctcaagcttttgctcgaaaacggcggcgtattcggggcctgacatttcctttccgaaccgctcgaagccgaagccggtatggacgcactgaagcagtattccgccgggtctgacctcgcggtctatcatgacgatgtcgctgactcccgcgtcgtaggcggcggccgcggcggccattcccgcagggccggttccgattatgacaagatcgtgcttttccattatttcaccgtccgttccataagaatttccgagcccttgccctttttggtgacccgctccatgggggtctcgttgaccgcggcgataaggtgcatgacgtggggggtgcaaaagcctccctgacatctgcccatgcccgaccttgtgcggcgcttgacgccgtccatgtcgagggcggggggattgcgctttaaggcgtcgattatctccccttcgcttataagctcgcagcggcagacaatgtggccgtaggaggggtgttcccttatatagtcgtttttgtccttcggcgacattttgcggaaggcgtgaatgtcgggtcgggtggggtcgaaatcccgccgctctctgaattcgatgggcatggttttgaggatttccaccacatattcggcaatggcgggcgccgaggtaaggccgggagagtctataccggcgcaatgaatgaggtttttgaccttatttgagggtcttattatgaaatctccgccgggcaccgaggcgcgcaccccggcaaaggcggttatggtcttggaaaagtcaaccgacggcagcgtggttttggcgctctttctcaccctgtcaagcccctcggcggtggtttcggtgctttcgcaggtctccaccctgcttgcggtggggccggtgagcagattgccgtcgacggtgggggtgacgagaatgcccttgccgttttcgtcgggcatacggaaaatggtgtgccttgccttttgtccctccgacttgtcaagcagcaggtattcccccgctcgcggaatgacgccgaagatgtcgtcccccgaaagccttgcgatttcgtccacgccgcctccggcgcagtttatgagatatttacagtccatctgctgaccgttttttgccttgacggtgaaatactcgccgcggattatttcacacacgtcgaaattgcgcttgaaggtgacgccgttgtccatggcgttgcccacggcggcaatggcaagctcatagggggaaattatggcggcgcggcggcagagcatggccgcaaccacattttccgacaaaaagggctcgatacgtcttgcgtcgctgccggtcagtatttcaagaccgggcacgccgttttcccgccctctgagcacaagctcggaaaggccgcttttttccttttcggaaaaggcagtcaccatggagccgttttctatataagggacgttaagctccttcgccgccttttccataagaccgatgccgcgcgcgttgagcgaggccttaagggtgccgggaatggggtcgaaggcgccgtgaattatggcgctgttggcctttgtggctccgcaggcaacgtcgtttcccttttcgactatgcagattttaagctcatatctggcaagctcgcgggcgatgaggcttcccaccgctccggcgccgattatacctatgtcaaaaagcatattttatctccgtttttcgggtctccccgttttttaaactattatatctcaattatatatcaaaagtgccgaaagtcaagaaaagactttcggcaaaggcatttgaaaaaagctgtcagcgggcagcggaggttttcggcttcgaaagcgccgacacaaaaaggccgagcaaaagtcccgcggccgacggcaaaatccagcccattcccacgccgtagagcggcagcacccttccgattgccgagaccgttcccgacagcgcctcaataccgctcacgcggataaggtcgcaaagggcggcggcacccgtgaacagcatggtcgtgacaaagacgcactgacgatttttaaaaaattttccgaaaagattgagcagcacaagcacgatggcgagaggatagagtaaatagagcaccggcgccgaaaagcttatgatattcgaaaggccgatgttggaaacggcaaaggaaaaaaccgaaaatcccacggcataggtcttatatttcggccccttcgggaacatttcaacaaaggtctccgagcatgaggtcacaagccccacggcagtcttaaggcagcagaaggtgaccgtcagggcgagaatgacaagccccgccctgccgaaatagtgctcggcgataaccgaaaaggcgtcgcctccggtgaagtcgggatttgaaaggcggtctgcgtaaaggctgtagcactcggttcccgcaagggcgatgacggcgtatataaccgccatgaaggtcatgctgaatacgccggatttcaccgtacttttggcaatgtccgaggggttttcgaccccatagccccttatgacgtttatgacgataatcccgaaggcaagagaggccagcacgtcgagggtgtcatagccctgcaaaaaacccgaaaaaacggtgccgcgtgcatagtcctccgaaaccggcacctgcgagacgccgtttgcggggcgaagcagcacggcgaaaacaagcaccgaaagcagcaaaaggaaaataggattgagccattttcccaccgtatcggtgatttttgacggccgcagcgaaaaaatcagcaccgcagcaaaaaagagcagcgtgaaaatcagctgaaaaagcgttttatgctcacccgaaaggggcgcaaagcccaccgcaaaagaggtggctccgcagcggggaatggcaaaaagcggccctattgtcagataaagggcgcaggtgaaaaaataggcaaagccctttgacacccttcccgccatgtcgagaagtccctcgcttttggaaattcccatggatattatgccgagcagcggaaagcccaccgccgaaacaagcattcccaaaagtgcgagcggcatatcctttcccgcctttgcgccgagaatgagcgggaaaataaggttgcccgccccgaaaaacataccgaaaagcatggacgaaatcagggtatagtccttacccgaaattttttctttcattttttctcctccgaaaccgccgcaaaggtttcgcggccatttttgccattataacacaaaggaatataaatttaaagagcaatttgcaaattgagaaaaatatttgcttttttcgttccgccttgccgcttgcgagacttgtaaaatcccattttcggtatataataaatgctataatgggtatatgaaacagatcttgaatatcaagcctcccttgtgtaaagggagcctatgttacgcaaaaactttttttattttccacaagggagccggcaccgagcatgtaaattacggttaaaggaggaacagcatggaacgctcttacatttgtattgaccttaaatccttttatgcctcggtggagtgcgtcgaacgggggctcgaccccatgacgaccaatctcgttgtcgccgaccccgagcggtcggacaagaccgtctgccttgccataacccccgccatgaaggccttgggaatacgcaatcggtgcagggttttcgaaattccgaaaaacgtcgaatacatcatggctcccccgcgaatgaagcggtatatcgaatattcggccgacatctacggcatttatcttgaatttttctgcaaggacgacatttttgtatattcggtggacgaggttttcatcgacgtttcgccctatctcaaaaaatataaaatgacggcaaagcagctcgccgtcaccgtttgcgaggaggttttcgggcggacgggcatacgggcgacctgcggaatagggacgaatttatatcttgccaaaattgcccttgacatcaccgccaagcactccccggattttatcggaattcttgacgagcaaagctttaaaaacaccctttgggaccaccgtcccataaccgatttttggcgcatgggagagggcacggcgaaaaagcttgcctcaagggggatatacacaatgggtcaggtggcggcggccgacgaagatatgctctacgatatgttcggaatcgacgccgagctgctcattgaccattcaaaaggaatcgagccggtgaccatggccgacataaaaagctatgttcccaagacctcctgcatttcctcggggcaggtgctcatgcgggactatgaattttacgagggcaagctgattgtcagggaaatggccgacctcatgtgtctcgacatggtggaaaagggcgtggtgacgggctcggtctccatgaccgtcgggtattcaaacgccctgcgtctccctcccgcgagaggcaccgaaaaaatcgaccccgccgcaagctcggacagcgtcataatccccgccgtcgcgcggctttacgagcgcattgtttcaaaggacgttcccataaggcgggtgacaatcacctgcaacaatctttatgcaaacgacggtttttaccagaccgaccttttttccgaccgaaccgactcgcttcttcgggacaacaagcggcaaaaggcgattgtggaaattcgcaaaaaattcggaaaaaacgccctgctcaaggccatgaattttgaaaaaggcgccacaacgatagagcgaaatgctcagataggaggtcacaaaagcggtgagtaagcaacacgccaaaatgtccatgtcacagcgggcaaaacagttttccccctttgccgccgtcaaggggctttcggaggaaatcgaaaaaagggaaaggcttttcgaaagccgcgccctgctctcccccgaccgattttccgagcttgattttaccctcaaggggctttgccccggcgacaaaatcaaaatcaccttttattccgacggtctttacaacgagcgcgaggaaatttttgccgacgccgattttcaaagacggacgctcaaaacaaaggaacgggaaatttcctttgacgacataaaaaacatcgaaaaggagggatatgatgaattttgaagaacaaatcagagagcgccttttctctcttcgggacgaaaaatatcgggattttcattcctccctttgccccgggattccgaaggagcgcataatcggcgtgagaaagccgttgcttcgcgcccttgcaaaggagcttataaaaagcggagatggcgaaaaatttatcaaaattctgccccacaaatacatggaggagaacgaccttcacgggcttataattcagcaaatcgccgatttcgccggggtgtgcgccgagctcgaccgttttctcccctttgtggacaactggtcgacctgcgaccttataagcccgacggcctttaaacccctgccaaagggactttgcgaaaaggcggaggagtggatgaattcgtctcacacctacacctgccgtttcggaatcgagatgtatatgaaatattttctcgacgagggctttgatttgcaaatccccgaaaaaatctgcagggtcaacaccgaggaatattacataatgatgatgtcggcctggtatttcgccaccgccctggcaaaacggtgggacgagattattccctttatcgagcaaaaaaggcttgacaagcgcacccacaacaaaaccgttcaaaaggccgtggaaagcttccgcataaccccgcggcaaaaggagtatttgagaaccttaaggataaaatgactttttccgaaaagccgccttttacccttgggcttttttcaaaaaagtttttgccgcagtcgattttaaggattacttttccgcaaggagagagttttgtaagaacatcactcctttggcatttataatcaacgctcatataaacgggctgcggaaaataaacggcaaacccacggttgtataaatgcttttattgtgatataacaaaaatataaaatttaaggagattgctttttgattaagtacaacacatcggatattgtggcataaccgggaggtttgcacacaataaataaggcctcccgcatattgcattgaaatcaacaattttcaggaggaaaaacaatgaaaacaaatgatattattattcgcaccgaaagagagaacgattaccgagaggttgaaaatcttgtaagagagagcttttggaatgtttatgcgcccggctgcacggagcattatgtgcttaaaaggctcagagattgcgcggactttgtgcccgatcttgattttgttatggaaaaggacggcaaaattatcggccagaatgttttcgtcaagaccgacatttgctcgacaacggctcaaagctgccgataatgaccatgggtccgatttgcatcgcaaacgggtataagagaatgggatacggcaaaattctgcttgactattcccttgaaaaggcaaaggagcacggttgtaaggccgtttgccttgagggcagcattgatttctacggaaaaagcggatttgttgtctcctcgacaaagggtctgaggtatcacggcctgccggatggggtcagcgcggattttttcctgtgcaaggagcttgaacagggataccttgacggtgtaagcggcgaatattccacgccgaaagcttactttgccgcgcaggaaaacccaaaagatttcgagctttatgacgccgaatttccaaaaaaggaaaaacttattctttccgctcaattgcaaaaataaaaacggataaaaacataagccgacgaacttttcagtccgtcggctttgactttatgtcgctgatttgccctaatataacggaggcttttatatacccgtacgccttttacggtcttgcaaaaaagtggtgttttgcctgctgcataaaccgcaattttctgctgcgaagcagtttatgtccccaaaaactcccataatctattgcataataaggtcacagcatgtaaaataaaattgaggtgaagattatgctcggagcacgaccgaaaaaaatgatgaatatgtatatcctcgatatactgaaaaggaacaccgacgccgaccatcccatgacccagcaggaaatttgccggcggcttgaaagcgaatacgacatggccgcggaaagaaaggccgtcaaggccaatctcgaggatcttataaacgacggctcctacaacatcgaatattcaaccaaggtccgctttaccccgaaccgccttaccggtgaaatcgaaaaaagcgaaattctcacagggttttactgcaattccgttttcaccgattccaagctccgcctgcttaagcaacagatgctcgaacaccgtacggtttcgctcgtttcttttcctgtgcggcttcgcgttc

SEQ ID NO: 3303 - DNA, 5241 bp, Unknown
  16S sequences of unknown bacteria
aagtacttgtcgggtcactgaccgggaggataggtaattgccacttcttaatttatccgtttcagggtttccctgttgcggattttttttgtgttgtagaatcgttataggctccgcctaaaaaactcgccatacgggtgatatctattcgtccgattgtgaaatcgttacgggctccacctaaaagctacgccatgcgggtgatatctattcgtccgattgtggaatcgttacgcgttattctacctaaaagcctcgccatgcgggtggatagttattcgtccgattgtggaatcgttacgggctattctaccccaaaacccactatgcggcctgccgcgtatgagcgcttccttctccccaccaggacttcccgcaggagggtactttttaatgtcgcctccctacatacttgaccctatcattgtgttttaaagccgcacttcctttccttcttcacaccactccctgcttataaagaggcattctttacgtatcggatgctatgagggggaaagcgccgcgggaggggcaggcggtaaaatttgatttttcggcgtttttccgtttaaatcatttgtttttcgggcgcttttgtgataagattatggtaacggcgcaaacgcgttcgactgtttcggaaataaaatttttgccgtagaaaaaaatcgggttttgaagcggaagaaaaagggaaaaagaaagtatggtgcaattgacgcagacgggaaaaattctggtgaatatcttgctgatcgtcttatctgtcctctgcggcagtctgttttttttcgtcccgtggctcaaacggcgcaaggaactctctttaaagcgcttcttcgtcgaaaatcgcctccgattttttgcttccctagtcctgattgcgggttttcttacccgcgtcgcctttttagacctcttgccgggcggactcaatcaggatgaggcgagcgcgggatacgacgcttacgccatcttgaaatacggcgtagaccgcaacggcatgaaatatcccgttcatctgatcgcgtggggcagcgggcagaacgcgctctattcctacctctgtatgccgtttatgctggcattgggcgtcaacgagctttccgtgcgcctgccgatggcgatcgtgggatgcgtttccctcgtgctgctgtatcggcttttgaatcgcagatacgacgaacgcatagcttttctcggcctggcgtttttggcgatttgtccctggcacctgatgaagtcccgctgggggctggaatccaatttatttcccgatctcgtcttttggggcttctgtctgttgatgaaggggatcgacgacgatcgcaaagccgcgttttttctgtcgagtttcgtgttcgggctttcggcgtacagctacggcacctcctacttttttctgtttttcttcgtcgtcgccgcgcttgtctatctcttcctcaaaaagagagtgcgcgcgggcggtgcgctgatttatctgtgtatcatcggctgtatgtccctgccgatcatcgccttcgtctatatcaatctcacgggcggggaatccatccgctttctctgctttaccatccctaaactgacgcaggaccgctttcaggcggtgacgaatattttttcggatacatttttcttgcagagcctcttaaatatcgccaaagggctgggaatcgtgctcctgcaatacgattttctgccctggaacgcggtgccttttttcggaacgctctatctcgtttccctgcccttcacctttatcgggcttttcaaaaggcgcaaagaagagaatttgctgttcgggattctgaaaatatggctgatcgtcgcccttgccatgctgatcatcgtttccccgaatatcaatcgcatcaatatcgtcttttttccgctgatcgtctttacgattttcgggatacgggaggttatcgaggcaaaaccgcgtctgaaacgcaaaattttcgcgctgtacggcgcctgtttcgcgctctttgtttccgtgtattccacggtatggaatacgcagatcctcgaaaagaaattttacgattcttacggggaagccatcgagtgcgcggctgccgtggaaggcgcgcagtattgctatgtgacgccctccgtcgggacttcctacatctacgtgctgttttataccgaatacgacgtacgggattttatcgatacctgcgaatatgcagaccccggcgccgcgtttcgccgagtcgactctttcgggcgctatcggttttatcttcccgaaaaaatcgagcgcggcagcgtgtatctcgtgagccgttcggatgcgatttacgacggcgtcgatttgtcgccctatgaggtgacgtattttaaaaattattacgtgatcaacgccgtttagttccttttccgagcgggagaaggcaaagagcgcgtgcttgccgtagggcgtaagcgcaagcaacggaagcggcgaaaattctgtcgaggataaaaacggaggctgtatgctgactatcaaaaaagtgaattccatgaaagggggaaaagtgtggctgacgttcttttgctgcgcggcgatctctctgctctttttgtatattccctttatcgtgcggggacatcatctgatctggacggcgcaggcgggcgacgcggcgacgcagggcgtcacttttttggagagcctcagacgagtgggctggctgaaagccatcggcagctacgatttctacctgggactgggcgcggattatctcacctcgatgagcttttactcccttttcgatccgttcaacgcctttgcgtttattctgccgttcgacatcgtttgggtgtacgatatcatcatgaccttgaaattcctcgcggcgggggcggcgatgctgtgttatctccgttatcgaaagatcgcgggcgggtatgcggtggcgctctcgctgatgtatatgttcacgggcatggtcagttttacgttcatgcgccatctcaatctcacttcgggcgccatttatcttcccctgatggtgctggggctggaactcgtctatcggggcaggaatccctttctgctggtcggtttttctttcctgtgcctcatcaattccttttatatgttttttttcaattccgtgtttctggtattttatgcgctcgtataccacgccgaagcctgtcggaaagagggctgcgcctatttcggaaaatcttttttgcggcttttgaaaatagcgggattttatctcgtcgccgtgctcttggcgtcctttatgctgctgccgaacgtctacggctatttcaacgccgcccgcagcgagtccaagggactcgtttccttcacctccctcttcggtctgcaagcgctggcgtcttattttctccccatcgtcggcgggcattacagcgtcatcgccttcaatttgttctccactgtcctgttgatagcgacatttctttcctgcaaggacagggcttggacgtatcgcatctgtaccgccgtctttacggtgggattcttcgtcccgctcttcggctacatgatgaatatttttaattacagcaacaaccgctggtcgtacattctctccttttgtatgctggcgatgatggggctgaatacgcagtcgcccgaaagcgaaaagatgtattccctgcctaagcgcaggcgcatcgccaagatcgtcaccgccgccgtttcggcgtgcctcgtcttcggactcagcttcctcgtcgagtatctcctaaaagggagctttcccgtcggcgcgaaaatttccctcgcggcgcttttgattttgctcgccgtcggcgtgacggtctttgccgtgttcgccgtttcccgcaccaagctctctatcttcgccgacagggaaaaagacggcgcgatgacggcgcctaagatcctcgacggaaccgctgcgcggcggctggcgacgcccgaggtgttgtggcggctcgccgccctctttacggtggtgtgctgtttcttctactattgcgtctattcctctcaacataagggcgcggcgctgtatcgctcgctcgcctccgccgaggagcagtacgtttccaagctcaacgaaacggattttttcaggacggacagcgagggcggggaagaatggtggcagcggtttcacaaccgcggcgaaaacaacgtctatctcggcacgtttgcctataattcggtgcataacgacgccgtatacacctttctcaaagagaacgccgtttacaacccgacgcagaatctcggcatttcggggcttgacaatcgtcccgctcttcaaagccttctctccgtcaaatatttttacgatccctcgcacgccgcccgctacggcatggcgcagacggaggaattcgaatccctgtacgaaaatgaaaattatgttccgttcggcttcctgtatacggataccctgtccaaggcgcagtacgactctttggaccccttgcttcgtcagtacgccatgctttcggcgatggtcgtagaggggaccggcacggcggaatcggcgtctgcgggcgctttggaaacgctgtccgtgacgggaacgcaacaaagcgagcttatcctcactaaaaagaaatcgattcaattctccgtgagcggctgtaagggcaaggagatatacctgcggctttacggcgcgtcggtgcccgatcagacgacggaattcagcgtcagcggcaacggcaagacccgttcctatcgctatgcgcccaaaggggatttgatgtacagcgaacagcgggatccctgcattcagctgggcgtcgccgggaacgacgagttggagatagagttgactctgctccgcggcagggaaatctccttcgattctctcgaagtatgctcttacgatatctccgattacgaagcgtccgtggccgctttgcagcaagcgccgcaccttgcggacgtttcctacgacgaaaacggacttcgcggcagcatctcttcgcaaacgggcggctgggtatttctctctttgccctacgacaaggggtggagcgcgacggtggacggcgtcgccgccgaattgatccgcgcaaattcgggatttatggcggtccgcgtcgagggcgggactcattcgatagaactttcatacgcgacgccctggctcaaacaagggtgcctgctgtccctggccggcgcgggggtattcgcgctgtccgcgggcggctgggtgtttttcgtactgcgttcccgaagaaagaaagattcttaaaagaaaaaagactttacgaaaaaag

SEQ ID NO: 3304 - DNA, 1848 bp, Unknown
  16S sequences of unknown bacteria
cttgggccatcacccaggatttccacagtgtgtgcgattacaatatcgatctgcattccggcggaatagacgaagagatgaagcccctgatcttcttctcggtgatgggcggccctgaaattgaagaaacttcccggcagatggcgctggcttgcagtgtgagttatatcgtccgttccaccgccaccaacggagagtacagctcggcggtgctgcatggccttccctcttttttgctggagcggggaggaaacggattctggagtcaggaagaaaccgatgccgataagcgggacgtccgcgcggtcttaaaaactctgggcattttaaacggtgaagtagcccctgcacccaagccggtggaaatctccgtgaccaaatactatgagtcagacgataccggctgttggtatccttgcttccggccgggagatctagtaaaaaagggggaattgctgggtgaaatccgcaaccaccaagatgaggttctctcccgctattacgccgaatttaatggggttgtgctgtaccaaacctcctcactggctattctgaaaaataaagcgctggtcgcttttgggcaactgggcgaaaaccagatttctttttaaatcttcttttccttgtcctgtttgtaaaaaggctgccgcagagcatatctgcttctgcgcagcctttttctttttaaaaacaaaatcacctgtacggaaagtcctcaaaaaatccgcctcacggcaacctctgtcaccgcagattggctgttaatatgctattttgcgccatagacaaaaaggaaagttcctatgattttgaaaaaccaaataccgcactaaaatcgacctgaaggagttttttttcgcataactattttaaaaaagtgcaaaaaagggttgcatccagacagaaaatatggtattataaattccgcgatagcaattatgggggcgtaactcagttggtagagtgtcacactggcagtgtggaagtcgtgagttcgagtctcatcgtctccaccaaaacctgcggtatcggatgggtattcgtaggtttttccattacaggaccatccacttggaggcgtagctcagctggttagagtgcctgcttcacacgcaggaggtcccgggttcgagccccggcgtgtccaccaaaacaatataatccgaaccttgtgccgattggtcatgggttcggatttattgtttttatagaagaagttgaagactggtaataaagaaaccgggaggactgccgattattgcaatcctcccggcttctttatgtagatgcacagtccgtattctctttctttgctttccattcggcaaatacctttttaccgtctgcactttcgtagtacttctgaattaccggaagcagactccgtgccagcgattcaaagacgtattccgggatttcggctgcatccatgctgttttgaatattcgctttttctgcgttcacatagtacctcctttatcgcttctgtagaacatttaggcgcatttggggacgatcataagaaaagatattcccctgtgctttctcagcgcttgtggggcggaaaacaccttgttttcgacctttattcgtgcgatattgcgccatcctcttttggctgaatcagctttgcgtccgctgggtaattcagcgtgatgagggcgggtttgcccaaaccctgcttgcgccgaacaatcaaaccgctgtactccagctcccggaagatccgcgtggcgctttggcggctgcggtggagtttggtctgcgcctgctccaaggtgaagtacagccggatcgtgccgtccggctcgacgtagccgttctgccgggaaatgctggctctgtcca

SEQ ID NO: 3305 - DNA, 20922 bp, Unknown
  16S sequences of unknown bacteria
atcaaggtttttaaaagattttaaaacaaaaaaacaggtagtttttgacactaccacagaaaacagggaggaaaaatctatgaaacgcatcaagaaactgctctgtgccgttgcattcatgcttgccgcatgcatcctcgtagcagagccattacagctgaccgcacaggcagctacaagtaccacagcaaacgcaaactggaaaaaagctccgaatctgaaaaaaacaggtgcctacgcggtaacggcccgcacggatgacacttacatccgcttcgttgctccgacttccggagtttacaaatttaccatcagcaatctgcatgcttacaaaaagtcatccaaaacttcttatggctatgcttccatgcttgtccagagaccggtaaaacgttccaacgtaaccaaactcagcacacagactgtttctaccgccggcggaagaacatctgcacttcacctgtccacacagggtatgtatacaaaaccgaaaaaggtaacggcaactgatttcctgctcaccagaagcttttcgatgcgtcttaccaagggtcagtccgtttacctcagaagcaaatacgtaacaccgataaaatcaaaaatttctcagtacaatttcactgtaaccagaactgcaaagtaaacaaattactgcttcacagtgattcgtctgattgcgaatatttatttcgccatattgtaaaaatcagtaccaccggttatgccggtggtactgatttttttatctttctctgtcggatcagttttacgatattcgtaacactgaatgtcagaagtttttatctgtattttttccgttttcccagaagcgcaaggcttcccgcggagagaaccgccaggaaaatccacagcgtcacattggtatcatccccggttttcggagcagcggttgtggtggagtttgcaggctgccctgtttttggagctgcttccgtccctggaatttcatgaggtttcttcgtagtgggctcggtagccggttccgttgcaggctctgtggccggctccgtcgcaggctctgtggccggctccgtctctggctcggtggccggttccgtctctggctctgtggccggttccgtctctggctcggtggctggttccgtctctggctcggtggccggcagctttggaacttcctccgttttagtttcgttgcagtttttacaggtgtaggttttgatgccgacctgacctaccgttggctcggtggtgatttttccttcatcccagtcatgatttatggcactgatttcccgcgtttctttcgtctggcacacggagcagatccgctcctcgcttccattttccgtgcaggtcggtgcggtcacggtctgccattcgccaaagctgtggcccgtggccggaatctctgtcgcatcttttaccacatcacagttccggcaatggatggactggcttcctgtttcgatgcaggtcgccgcctgatcaatcgtaaaatccgtatcccagctgtggcccgtggccggaatctctgtcgcatcttttaccgcatcacagttccggcagtggatggactggcttcctgtttcggtgcaggtcgctggctgatcaatcgtaaaatccgtatcccagctgtggcccgtggctgcgatcggttcctcataactgtgcgtatcatcatttttacagatgtaggtctttgtcccctcttccgtacacgttgccggtttcgtcacagttccttcatcccagtcatgatttatggcactgatttcccgcgtttctttcgtctgacacacggagcagatccgctcctcgcttccattttccgtgcaggtcggcgcagtcacagtctgccattcgccaaagctgtggcccgttgccggaatctctgtcgcatcttttactgcatcacagttccggcagtggatggactgacttcctgtttctgtgcaggtcgctggctgatcaatcgtaaaatccgtattccagctgtggtcggtggctgcgatttcctgataggtggtataatcacagttcatgcaggtatagtagttattccagccaaccgtggtgcaggtcggcttctgctcatcatgtaagcaaagtgcatgacccggcgctgcgattacttctgttttcactctgtcgcagcatacagtacaggtgtatgttttttgccctggtgttgtacaggttgcaggaatggtgatcgaaccgctatcccaagtgtgcacggaaacatcttttttttcgttgcagacattgcacttatgccaatgattgttttcatccgtaatccagtttgagtaccagtcgtgccctgtggcatcgattcgctcggtgtaaaagtaaccgcagttattcctgcataaatgggcgatgactccttctttagtgcaggtagctttggtatacacgacctcttccatatcgtgtcctggtgcaggaatgggttcagaataagagtcgctgcagcggctgcactgataaaggcgggtgccggcaaggaggcacatcgcaggtctggtactgataagtttgtagtcgtggccaagaacaccatattgactgccgcatacatcacaggtaattcctctggtacaggtggctgttccactgccagaatggtactcccaccctgattccactgtagtgccgcattttttgcatgtactaaatcctagatgatgctcttcatcgccatatttccagatcactgtcgtgtcttgccaattgttacaaatctcgcaccacctcttcgcatataccgtcatcggcattacgatcaccatcatgcagactgcaagcagcatacccaaaattatctttttcatatcgtttcctccatttcttttccatgtactcccggaatctttttgtgcttgattttgtgagaagattttttgtcagttgtgcccaaatttctgaggcgtacacggtgtgtacgttgatgaaatttgtgtgcagctggcagaaaatcggccacaaaagcaagtgcaggaaagactccgagagtacatttcctgttccgcagcatcgcactctcttatagatattatatttctttttcccttttccagaaatgcccatttaagcgaaaaaaagtgccctgcccgggatgcgaaatcccaaagcaaagcacttttcttttctgttctattttacttatctggtaactgttcagagccaagcagattttcatgcaaaagtgtgaatcatgcttgcatgaatgaacacttttacatggaaatctatttggcggatacgccacaccgacgaaatgcgcagcattttggaggtggttctgaacagttaccttatctgtttacaaactgcagcagttcttttctgctgttcacatgaagggtagaaagaatatcggaaatgatatgtttcacagtattgaccgagatgcccatacaatctgcaatctcctgattggtccagttccggcaggccagcatggcaatggcaaattcctgcggtgtcagcgcatccgttacattccgttcggatttctggttatgaagcttcatccagccacgactgaaacgaaggacgcctctggtcagtgctttatatgcctccggttcttcttttttcagacaggactccacaatcccctgtaaaagaccatgatgctcaataaaagcctccagaagcccatccggttttgccatcccccatgccttcagaaacgcttctttcgctccatccagatccttgtttttgattctgcatatggaaatcatacagttcagatagatttccggtatcggatacggcttattgacagacatcactgtcgcatccaaaatcccaagagcccgctcatattttccttccagataaagcttgtgagccatcagataagccgcaaaaatccgcagccctgccggtaaataccggacataatcccgaagaggaggtagatcatcggtcggaagatggaccagaatgcaggtcatactggccgcaaaaacgcagctggcctgcagttccctgctttcatttccggcaaacacagtcttcaaagtttcctgtatcttctgaaacccactctgtgccgcctccgcatttccaagagtgaaattggaaaaggaatacagcaggcaggcagaaagccgcatgctgatctcttcctcctccagatagctttctgtgatcgccgtgcacttctccgcttcaccggaaaaataataaagttctgcctctgcaattcttcgaaggtcaggatctgaaaagcttgccaccgtcttttttccaccgcctggttcaaaagaagtgtttaaaagaggaagcagcccttttggctccgcttcatccgacatgttcgttttgtaattcttctgacctgcctgcaatgcttccggtctcaggcatgtcgatgcgacgctcacgaaccttcccgcttcgctgctctccatgatcttgccgatcacatccagtacatggtaagccatctgcgcgtccgctcttgccgtcctgccctcccggatggccgccgccatctcagccggtccgagaccgcggctgttttctccgtaggcaaagccataatccagtacctgcggtgtaatcacctcgtcaaatccctttgccgccggaatataaatcacctctccgccaaagcagttcggatccgtcagcttcaggattcccttctttccgtaaaccgtaaaggctgcctggtcgttgatcgcactgtctccgtttacggaaaacgtaccggtcactccgtttttcatccgaaggatcgtaaagacctggctctcattctgataagaaaaggtctctccatagcccgtacttcccggcgctgtattggttctgttttcggcaagattgcgcaccgaagcgacgagcgaatccacaggtccaaacagactgacaagcgcggtcaggtaatacacgccgaaatcatagcagattccgccgccctccatccgaaggaacgaaaacatcccggccaggagatccaggtcgcggttggcacacgcctcaaacgatgtaatctcgccgatcagcccatcatcaatcgccttccgcgccgtctgcagcgccgctccaaggaatgtatccggtgccgcaccaagatacagccctttctcttttgcaagtgcgatcaattctcccgccgactcagtggagagtgtcattgttttttcggtataaacatgcttccctgcctgcagagcctgacggatcagtccttcatgcgtcggtgcaggtgtcaggatcaccaccagctcaatcgacggatctgataagatctcctcataagtccgtgcttcaatcccgtactgctccgcctttttctgagcatgctcaacatgattcgcacagcatgccacaacctccagattattgaagcgctctgtcatatttgtcaggtaaatatcgctgatcgcaccgcagccgacgactgcggttctcattcttttcatataagtccaccctttccgttccatttcacgaacatgatcttcttaccgttctgtttcatgagcatgatctttttaccgttccgtttcatgaacatgatctttttaccgttttgtttataacaaaaccatctccggagccttttttacacggtcaatcaccagaagcagctttggctgaatgacaaacataaaaagctgcagcagtatagaaatccgtcaagatatggttctgtctgctgcagctctctgttctatttatttatctgatatcctatacactttatttatctgatatcatatacactgcgcagcgtcagcctgctgacatcgccgctctcgatcttcacgcgctttgtgcctgcgttcatatcgaagtagttgtctgacaggatcagatcctcattctcgttgaggatctcaacactcttcgcgtaagccttcgccgtcacttcgatctcatccccgatcacgcggcacgtaagctgcggatcctcatagcggaagtacttcggataggagaagttgacacttcccgctgaaatgatctcgccatccttttccagttcatagctgatgtattctgagtacggatctgcctccgggaactcgatcttgtcaagccatacactcttcagagccggtaccgtgattgtctcctcaccggacctgatcacctctgccgttgccctgcgcagtgcccagtgaaccgtcaccttcgcatcctctctcgtctcgtttgccacatttaagcggatcgacttctcgaactcaccggaatgctgccagttgagcggctgtgcattcgacatcatgccctgctcctcacaggagagcatcagcggtgcaaagaagcgctttgcataataatgaagtgctttcagtctgccgcagtagtcaaccgatgaccaggatgctaccggccagcagtcattgagctgccagtaaacggctcccatgcagcgtccgcggttgcggcggaaatgctccactccgtagcggatgccatctgcctgcagaagctgagatgcatacagtaccgtacggaaatctgacggataacgatacgtctgctgcatatagttcatgatctttccgtttgcacttccgtttctctgatgacgctccatcacataggagaaaatattcatgtcagcaggatcgtccgtgaatgtctcgatcgtcttaatggacgggaaggactggaatccgaactccgacaggaaacggaaatagaacttccgatactctgtaaacggcttgtcgccgtgccatacatcccagtaatgcacgtcaccgcgctccggatcctgcggctcatccatacatccgcctgaagacgggctggacggccagtagaacgtctgcggatcgtattctcttacaatctccggaaggatgcgctcgtacatcagataataatcgcgtacctcctgcggctttgtcagccagctgttctttgcgtagacaaattcctccatctcattgttgccgcaccacagaccaagacttgcatggtggcgcagacgtttcacgttatcaataaactcagcgcggatattttcttcaaactccggcgtcagatcgtacacagcacatgcaaacatgaaatcctgccatacgacaaagcccagttcatcacaaagatcatagaaccagtcttccggataataaccgcctccccagacacggatcgcattgaaattcgcccatttacacttctccagcaggctgcgcgtcgtctccggtgtgacccgtccgagcaggtgatcctccggaatgtaatctgcacccattgcaaagatatccactccattgacgcagattgcaaaattctcgccccattcattctttgaacggtctacagtcatcgtacgaagaccaatgcggcgcttccagcagtccagctcttttccttcaaagtataaagtcacttctaccgtgtacagatcctgtctgccatagccattcggccaccacagctgcggatcctcgatcacaagctgctccgggctgccgttcgcacttacctgtgtgccgtccggtgctgtcacttttaccgtataataaaggccgctttcctgcggatctgcctcgttctcagatgcgccctcagcctccgcattccacattcctgacggatcttccatctccgggcagcagtccacatccactgcaaagtgcagtgtcacctttccgtctgcatgctcttgtgtcacataaacgctgtcaattcttgcctcatcaatgccaagcagcgtcaccggacggaacagtcccgcatccggaaggtgtgcgccccagtcccagccgaacatacagtgtgccttacggatgtttacaaagccctccatcgcatcctcactgccgtgtgtcttgcttaccttaaaggcctctgcaatgtattttgtcggtgaatgaaacacgatgcgcagttcattatccttctcttttacttcctccgtcacatcgtattcccaggtacggtgcatattgtccgggcttccgatcatttctccgttcagataaacgtctgcgatcgtgtcgattccgtcaaaacggagtaccttgcggtctgagctgcaaatggcttcttcgcaatcaaagctcgtaacatactcataatcttcatccatgagctttaacgccttcagctcattgtccttgaaaaacggatcctccatctgtccgttgcgaagcaggtctgtataaacagagcccggaacaacggcagggctgaatgcttcatcgcccacacggcgcatctgccagctgctgtcaatcttctgctgaaccatcttgttttcctcctgatttcatttattctgtgtcatttcaggccgccggacccggctgttttttttcagccacagctttgttctgccgtaaacgatcggccggacgtcctgttgtttcttttctgagagcgtgtctgaaaaatcctttctgcagcctgcacaccattttgcagaaagcatttttcaggcacgcccctgtcttttccattataaagccaccacgaaatcccgtcaatcgttttgcacaatttcgcctgttttttctccatttctcttctttttctgtctatttttctattttttccgtattctttttgtgccttttatgttataatgtaacaaatacccgcccgtgaaatacggcaaaactctgaatcctttttccgtatctgtgcggtactatttttcatgtgataggaggttttttatggaacacgatctaaaaaaaatcatcagtcaaatgacactggaggaaaaagccggcatgtgctccggactggatttctggcatctcaagcatgtagaccggctcggcatcccggaagtaatggtcagcgacggcccgcacggactgcgcaagcaggatgacaaaggcgaccatctcggcatgaacgacagcatcaaggcggtctgctttccgcctgcctgccttgctgcctgctcctttgaccgtgatctgatgcacgaaatgggaagtgccatcggacgggaagcgcaggcaaacgatgtttccgttgtcctcggtcctgcagtcaacattaagcgttctccgctgtgcggccgcaatttcgagtactattcggaagacccgtaccttgcaggtgaaatcgccgctgcattcataaacggcgtacagtccgagcacgttggtacatcaatcaagcactttgcagctaacaaccaggagtaccaccgtatgagcggctcctccgaggttgatgaacgcacacttcgcgaaatctatttcccggcatttgagacagccgtcaaaaaagcacagccgtatacgttcatgtgctcttacaaccagatcaacggcacttttgcttccgaaaataaatggcttctgactgatgtgctgcgcggagactggggctttgaaggatatgtaatgtccgactggggcgctgtcaatgaccgtgttccaggtcttgaggccggtcttgatctggaaatgcccggttccggcggattcaacgatgccgagatcgtaaaggcagtaaaagacggaagccttgatgaagcggtacttgaccaggcagtagaacgtattctgcgcattatctacctctacgcagacaaccacacccctcaggaatttacgatggaagctgaccacgaggaatctcgccgtatcgcggaggaatccatggtacttctgaaaaacgacggtgtccttccgctgaatccatcagaaaaaattgcatttatcggcggctttgcaaagaacccgcggttccagggcggcggcagctctcatatcaactgcttccgcacggccagcgctcttgattccctgcctgagcatgctcaggtcacttatgcagaaggcttcccggcagaccgtgatgcttatgacgaaacgcttgccgctgcagcaataaaagcagcagaaaatgctgacaaagcagtcatttttgcaggactcccggacagttttgaatcagaaggctatgaccgcagccacatgcaactgccttcctgtcagaatcacctgatttcggaaatcctgaaggtacagccaaacaccattgtcgttctgcacaacggttctccggtcgaactgccgtggcgccatgaagtaaagggaatccttgaagcataccttggcggccaggcaggcggtgcagcagttacacgtattctgttcggagcagtcaatccatccggaaaactcgcagagaccttccctgaaaagctttcggacaatccgtcctaccttttcttcggagacggtgataaggtagaataccgtgaggggatttatgtcggataccgttactacgacacaaaggaaatgccggttgcctatccgtttggctacggcttatcgtatacaacgtttgcctacagcaatctccgcctcgataaagagaccatgactgattctgatacgcttcatgtgtcattcgacatcaccaacacaggaagtactgccggaaaagaaatcgttcagctttacatccgggatctgaccggaagtacaaaccggccgctcaaagaactgaagggcttcgaaaaagtctctttggagcccggcgagacaaaaacagttaccatagagcttgattaccgcagcttcgcatggtacagcaccaatcttggcgactggtatgcagcaggcggcagctatgagatcctgattggtgcttcctcccgtgatatccagcttctttcaaaggtcacgcttaagactgcacgtgtacttccgcttcatgtacacaaaaacacaacgcttggggagctctgccgtaacccgcgtacgaaagaaatcgcagagaagcttgcgaatcagatcctcgcaggcatgggcgccggtgcttctgaagccgcttccgaagcaatttccgatgagatgaataccgcaatgatcgattccatgccgcttcgcgcactgcgaagctttaccggtatgagtggcgaggaaatggagggcattataaagcagttccaggcagccgcggacggaaacgtctgattcattaaaaataccccgcatcactggcgtcttatctttccgcctttgatgcagggtattcttttttaaccgaccagcgaagcggattgcgaatatccgctttgacccgaacaggaatcacaccgtactcagatcccactcttcatagatcttcggcacatcactgatcagacgcttcgtgtaatctgccgtcggatgcagaatacactcttctgccggtcctgactccacaaatttgccatgctccataatatagaccttatcggaaatatagtacgcaagtccaatgtcatgcgtgataaagataacggtcatctgaatctcatctctcagctttaacagcatatccaggattgttgagcgcgagcacgcatcaatcatggaggtcggctcatctgccagcagaatcttcgggcgaagcaggaagatacgtgcaatcatcagacgctgcatctgtccgccggaaagctcaaacggatacttgtttgtcagctccttaaactccagattgacgaagctgcaggcctcctccatcattttaaatttctcttcatacggcagcttgcccatgccgcgcatcttgatgcagtcaagcagcaccgaatcgatcttattgaacatattgtaggaggaaaacggatcctgaaaaatcggctgaattcccttccagtattctttctttttccggccgctgctgatatcacgcagcttgtcctgataataaacctcaccctctgtgacgctgatcaggccgagcagcatcttggaaagcgttgttttgccgcttcccgactctcctacaattgaaatgatctcgccttcccgaaaatcaaaatccacatggtctactgcgaccgtccttttgttgccactgccgaaaaccttcgtcagcccttttcctctcaggcactctgctcttgtctcactcattctcatacaccccccggatctttctttcggacatcagacagcggtaaacgcgtccgtcagccgtctcaatattcgggatttccattcccctgcatgtcggcgttgcatacttgcagcgctctgcaaaccggcagcctttcggcggatgcttcaggtttggcggtgtaccggggatcgccgcaagctttttgccgcgcacgccttcctccggtacaataatcgatcccatcaggccctttgtatacggatgcagcggatcaaataccatctcttttgctgtgccaagctctacgatctgcccggcatacatgaccatgatatcgtccgtaacattataaagaagcgggagctcatgagtgataaaaatcatgctcttgatataacccttttccatcaggtcgcgcatcatcttgattaccatcttctggctcgttacatcaagtgcagaggacggctcgtccgcgatcagcacctttggtgaaaggatggttgagattgcgataacagtacgctgcttcatacctccggagagctctaccgcatgcttttccagtacttcagccggcaggccaagaattccgaaacgctctttggccagatcataaatgtccttctttgacatatttggctcatgtgcatgaatcacatcctcgatgaagcggatgatcttctgtgtcgggttcagcgcattcattgctgcctgcggaatatacgcaatctccgttccaagcaccttcttacgcacatcgtccggcttcattcctgaaatattttttccatctacgatgatatctccgctcatatagtgcagaggcggaaaataatatcccatcagagaaagcgccagcgttgattttccgcatccgctctctcctgcaacaccaagtgactttccttcctcaattttaagggaaacaccgtctactgcatagacatcctcacgcagacgggtcacatattttgttttcagatcttttacttccagcattacttttcccatgaccgttcctccttaatctcgaagctgcggattgaatacctggtcaagacctgtattcatcagattcagcgaaaatgaaatcagtgcaatgacaagaactaccgggaaatatgcccaccaggaaccgttcaggtgtgctgcataaagcgtcgaccagttcatcatctgtcccagtgtcgccacgttcgtcgtggacggtccaaggcccagcatggacagctgtgcttcggaaagaattccggaagaaatctgaaggataaacgccatgacaacgtaggaagccacatacggaagaatatccgtcagcacaatccggaacatactgtgcccggaaagcttggagagattcacgtgatcacggtttctgagggaaattacctgcgaacgaaccgaacggcacgtccatgtccacgaggtcagtccgatgaccgcagcgatcgtgccgacacctctcgcactctgtccaaccgaatatgtgatgaggatcagcagcacgaatgacgggatcacggtaaacaggtttgtaatgaaaataatgatatcatcaaacatgcctccgatgtaaccggaaagcagtccgagaatcagtccgatcagtgtcgcaaccgtacctgcgatcagtccgatcttcagggatgtcttcgtagccgctaccagctcggtcaacacatcgcgtccgaaggtatccgtaccaagcaccaggcggcgcttgtttccgacatctcctacattcacatacgtctgcgaatcgaagcttccggtcgcctccagctctccgtcctcgttttcctgggcaaggatcacatccgcatcacttgccagctttttcagcttttccgtcaggcggacatatgattttttcttagaagcagtcagccccttctggtctgctttggaatcatatttttcaaaccacagctccacaagcgcattatcgtcagttgcatccatgtcttcctgggagactccaccgtatttgaccagccactcacgcatgctcgctttgtccttatcctcgacatgagcacctacgttgttcgattttgattcaatattcagggtataatttttggattccaccgtatcctttacagaaatataggtacccggtttgaaaaagtttccctgaccgatcatttccatcggatctgctgtgacaacccatggatacacaaaggtaaacagaagcagaccgaagaaaataatgaatccgatcacaaatttgggagaatgaaagatatttctgattgtatttttcatgatgcatctccctccttaatcctgctgtgccgctttgatacgcggatcgatcacaccataaataatttccacaagcaaatttgccaccagtaccatgaccgtaatgatcagtgtacaggccgacagcagcggataatcatttcccttgatcgcgctcatcattgtcgtaccgatgcccggatagctgaaaataatctcagataccagagcgccgcccatcattgtaccaagagacattgccaggccggtgatctgcggaagcattgcattgcggaacacgtagccaacaatcttgcggtccttgatgccaaggaaacggctgtattttacgtaatctgcattcagttcataaatagacattgatctcatgccgattgcctggcctccgattgtggtcagaacgatcgcccagaatggcagctggtaatgagcaaatacagattttacaaacgtccagctcatattcggaatcagatcgtagccgtatgcaccacttgttggtgcccagccaagcgttacgccaaagatcgtcagcaaaacgactgccataccaaatgcaggaacgttgctgataaacagaaatgtaggaagaattaccttatcaaaaacaccctttatgtaagcagccactgctcctaacacattgccaagcagccagcccagcaaaatcgccggaagctgcagcgccagtgtccatccgaccgatgacttgataatgtccgccacggttctcggatactgactgaaggaaacgccgaaatcaccatgcacagcgccctttaaccattttgcgaactgcaccggtattggctggtttacgccaaatttttcaatatattcatcgtatactttcttgatcgcctgcgcatcggtcataccctccgcagcctggcctgcgattgccgataccgggtcccccggcatcaggcgcgggagtacgaaattcagcgccaccgcaaaaatcaatgtaatcagataccacactattttctgtgtataatattttttataccctttcaaactgactcacctcattctctcttaccgctcagattagctttttcgtctgttcagaacgaacctccaagtccaaaaacaacctttccaatgcagctattcgcaaaagtggccggagatgctttctccggccaccagactcatcgcattgcccctgtaagctgtcaaatgtcgttcgtattctcttgttttcagccttctacgagttcaaggttgtaaagagctgcaataccgtaaccgtctgtacagtctgccggcgggatattgcttccatcatcctgcatcggatatcctgtccatacggtttcatttacggtatagaacatatccggtctgtacatcaggccaaaggacggaacgtcagttaaataaatctcattcagtcttgtgtagtactgcttcagagttgcttcgtcagtttcagttgcgagtttgtcaagaatctcatctgcttcatcattgtgataatgtccgtaattaccctgatagttgatctctgcgtctgcatacggaccatacatgaactgcttgcagcgatagaacgggttggtgatggatgctccggttacggagttcatcatgatctcaaagttgccggtggtgtaatcgtcggtccatacggatgcctccgggaagtaggtctccagctcgatgccgatgttctttgcacttgctgctacgatctcaagcgctgcattccactcggtccagcctgccgggcactctaccttgtaggaaagctttgtgccgtctgcttcacgaatgccgtcaccgtcggtatctacgatgcctgcatcgtcaagaagcttgtttgcaccgtcgatatcattgccggtccactgaagatctttcagtgcatcatggtcaaagagcgcctgctccggatcacttgggttcatcatggtacgcggtacgtccttaaagctcggggactggttggtcattgcggaagtcaggatctggtcatagtcagttgccatagcgatcgctttgcggacttctacgcggtcaaggcccggcttgtcaagattgaaccaacaggacgggattgtaccggcaaggttgtacggcggctcgtcgatataagtcgtaatcggaagatcctgctcctcccagagcttctctacaccggtgataaatgcctgtgaaacgtcaacctcgccattctgcagtgcaaggagtgctgctgcattgtcgccaaagatcgtatgtccgatgtacttcggtaccgggagcttgccccacatggattctgcctggccccagtaattgtcatctcttacgaatacaactttctgatcgtcatcatagtatggcttgtacggaccggatgccacaagatcatccatcgggtcaagcttcattgcttccggagactcacatcttgcttccacggtctcaagatatgccttctgcatgatgtacatcttgccgagcatctgctgaaccatcagctgattcactgccttgacatcctcaccaactacagttttaatcgtaacagtctgatcatccaccgcggtcatggactcgatatatgctgtcatctcaacaccataagaagactggcattttacgttgtaatcaaatgtcgctgcaacatctgctgctgtcactgccgtaccatcgctccattttgcatccgggtttaattttacggtcatggatgacatgttgtcatcatcccaggaatactctgtaccaagaagcggatacatcttgttgtccagcaggttgtacataaacagtgtctcgtaaatcagagtacgtgtcgcatccttctgctgaattcccattgcgttgttggaatttgccgacatcggattccagtcattgatcgcgccccactgctgtcctgcgaaatacagtgtctcgtttctcggagtggatccgtctccctctgctgcaaatgctgcgccggcaaagctggatgctaccatacacgccgatgcaagtgctgctaccaccttgatcattcttctcttcatacctgacctccatattctttttttcagaaagaaaaccccccaatggcttctttccgtgttgattgtattatagtctttttattcaaataaatcaaggctaaatcgtttaatattgtgtattttattgtatcgtttttacgtcgttcgtcttattgcttaagtattttgtattgtttttttttgctttgtcacatttttttcgtttttttgtatgttttttgtgtccattttgtgttctacaagaacaattaaaggtatcttatgtttttctgcgtaaagcaaacgttatcatttacttttatagcttacccgcgaacgccgtcaccaaaaacagctttctccgtcaatcccacacgtctggtgcaagcccctctataaatccactcagttcaagcgccatctgcatcgcctccgatgcccgcacatgtcccggtgtgccgcgcccgttttcctgatacagaaaatggacgatcttcggatcacgaagttctgtacaaacttttccgatgctgcggtcccagcccggataatgattcaggatcgtcgtggcgagcacaatccacgcatgcggataaatttcccgcagccgacaaagaaaagctttataatgttcccgccactgctgcgcctgttccccgtaataatcatttttcatgatatcctccggccaggcatcattttgcccaatcgcaacgacaaccacatgcggggtataccttgcaaaattccaccgtggttctccacttttttcgcctgaaaaataaatccggtcaaagcagctttccatgccgcgtgttccattctcatagtatcccgttccatcacgcagcgcgatccctccctgcgcaacaagatgcaccgccgcatgcagccgccgcgccgtcgcccaggcataggaaaaataggcgttgttatattcgccctcgcttggcggatccggcatggccgcatagttctgtgcctccgacacttctcctgccgtcacagaatctccataaaactctatttttttacgtggcagaggacgtgccttttctacacgcgccccatattccacaagaaagccaagaaactgatacgtgtgacactgatccatccgtttaaaaaacgttacttcatgtgtcgtttctttttccagattttccgccagcgtcagcaccaccggttcctcgtctttttcgatctttacccggtactgattccggtctgaaagcacaccaacccatgaatcataatagcttctgtggttgatcacgaccgcacggatccacgaagacccggtaaaggaaatccgcacaaagctgcccggctgcacaaacaccggggcatccggattcgacacatcaatgcgcccgcaatacgtcagttcatcgtgcaccggtggaatcaggcgcgtcgtcgcctcattataatctgtgtaattctgcatcttttttcccactttcttttttcaaaaatcctctctgttttgcacagctccctctccgccatacgattgctccgcatcgttctccggaaagtttttctgattctgcaaaaacaaataaccgtaacttgttttctcttattgagagtaccgcgttcctgtgcaaagtgcaacttttattcgctcttttttaccgagtcaggcaggtattcactgcttttcttccgtatccgcgcacaaaaagaggcagctgcgcatttcttcgcacagactgcctccttaggatgattctttcttatcatttttgtctgaatgttgtttttccttatttttgtatctgatgcacagcgttcttttctctgtgcctctcttcattctcagccaaatttcgcttcccggcattccggtacgcgccagaatcccttccacgcgctgctaaaacgcgtacgcagccttgtaagtgtcctgcatcgataagatgtctggatacagaacaccgggttgcgaagttctgccacacccgcatcctctgccatgatctgcggcagcattgctttttctgtatatacggtattataaagataaaaattcatagtgtctcctccattccttacgtactgcgtacaaagcggacatttaccacttcacgacctgtctgcgttcccatcgttctcctgactgatcttgctgtcaaaaccactgctgtttgtaaccacacgctcaagcgaatcgttttttcacagctcatccattatccgtttttccaggcggcagagcgtgcaggtacctttcacctgccgctttgcaaaacccatctcattctgcagtatattccggaaatctacagtgataaagaaggcccgtcggccattgggggggctttggaagatcatcttctgtgacagggccgttctttatgtctgtattataatggattcttttttctgcttcaaccgtcctttttatccttatttttgctgatattgacatttaccgtttttcatggtagtgtcagattataatatgagttcactttatcctgccaaagaagcccacgctgcttattgctccgcgcaactttgcagcggacttgcttgactcgattaaactttcaggaggcgattttatgtcagacaacttcgaatcttctgctgtactccatggcaccagatccacagcgcacaaaaatttttcacaagtcacgcattccgtttcatctgatatggccggcatggtccatgcaacgcacgaactcgtccaggaatccgatcatcttccatttcatatctgtaccccaaaacaggctcgaaaccacggtacccctctgccgaccgagcctctgcttccatatggccacacttcctccaccctttcatgtacacagaacgcagattccgttatgaccattcccatccattggcatgaatatctcgaatttctttatctgctaaacggccatatgtcagcagttattaatgcgactacctatgagctggatcccggtgaactgctcatcatcaacagcgaagatcttcacatgacacggatgtactttgataaaaatatggacaaaaccgaatgcccctatctcctcatccagttttctgccgccagactgcgtgaaatcttccctgatctggatctgctgcatttccagacctgcatccggcaggaggaacttcaccagattgccggaatgaccgaactgctgaaaaaaatgcagacattattcgaggagcatccagatggttaccagctgctcctcacctcttatttttatgaatttctgtacatcctgtaccagaatttttccgtctggaatgtggaacgttcccgccctgcttccagccgcgatcttgagcggatcacagagatcgtcagctggaccagagaacattttaaaaatccgctcacgctgaatgacgccgcctcacacctcgctctttcccgcgaatacttctgccggatcttcaaaaaatacaccggacagacgtatctggaatatctttcctccgtgcggacgatgaatttttataatcagcttcttacaagcgatctgagcattcctgtgctcatggaacaaaatggtatcacaaattaccgcacctttctgcgtaccttccgtgccctctacggcgcaacgccgcaaaagctgcgtgccgggctttccgggacagccagctgagcatgctcattttcgggtcaaagcggatattcgcaatccgcttcgctacttgtaggatcataagggatcctcccgcaagcgggtccttccttatgatatttcataaccgagcagctgcttcgcagcttatcaggagtggcttgtaccactcctgatacaagcaagtcccaacccactgcttattgctt

SEQ ID NO: 3306 - DNA, 32759 bp, Unknown
  16S sequences of unknown bacteria
tggcgggggctgtgcccccgcctacggcggccgaaggccgccggccctgcgggcgtccgggatactgcagaagcccggaaaggaaatcccccggcagaaccttggattctgtcgggggtggaaaaaacgatgaaattacaggtctgcggggccggaaggatcctgcttatcctcgtcctccttgggttcctccatcggcggggccgggggctcctcatggggcaggtggaaatccaaagggtccaccgagaagccctgctgggccttcttttcctcggcggccttctgctgggcttccttctgcaggcgggctcgctcggccttttcgcgggcggaggtcaactcctgctcggtgcgctcggcggcctcgccaaaggagatgacgccgctcatgacttcggcgaagagatcaccgtcgatcttttcgtacttcattaggaattcggccagggcatgcagctgatccatatgctcttccagcagggaaacagccttattgtatccctcatcaatgaagcgacgggcttcctcgtcgatctggccggcaacctcctcggaataatcacgggcgtggcccaggtcgcggcccaggaatacctcctcctggtcggagccgtagatcatggggccgagcttttcgctgaagccgtagcggcacaccatggcgcgggcaatcttggtggcccgctcgatgtcattggaggcaccggtggagacatcctccagcaccagttgttcggccacgcggccggccagcagtacagcgatttcctcctccatccacttcttggtctggtagctcacatccttctccggcagagccagggtaaagccgcccgcccagccgcggggaacgatggaaacctgatgcaccttatcctgctgggggcagtagtaggtgacgatggcgtggccggactcgtggtaagcggtcaggcggcgctccttatcggtgatgacatggctgcgcttttcggggccaacggcgaccttcagggtggcctcctggatatcctccatggtgatggccttgcgattcttgcgggcggccagcagcgcagcctcattggtcaggttctccagatccgcgccggtaaagccaccggtaaagcgggcgatcacggcaaggtccacatccgggccaatgggtttgttgcgggtatggacgcgaaggatcgcctcgcggcccttcacatcgggataattgacggtgatatggcggtcaaagcggccgggacgcagcagagcggggtccaggatatccttgcggttggtggccgccataacgataacgcctagattgggcgcaaagccatccatttccaccagcagctggttcagggtctgctcgcgctcatcgtggccgccgcccaaaccggagccgcggtgacggcccacggcgtcgatctcatcgatgaaaacaatgctgggcgcgctctttttggcctgttcaaacaaatcgcggacacgggaagcacccacgccgacgaacatctctacaaagtcggagccggagatggagaagaacggcacaccggcctcgcccgcgacggctttggccagcagggtcttaccggttccaggagggcccatgagcaaaactcccttgggaatacgggcgcccagcgcattgaacttgccggggtccttcaggaactggacgatctcctccagttcctccttttcctcatcggcgccggccacatcatcaaaggtaacacggttgtggggatcctgctgcttgggtttcagcttggcaaaggccatggggttgcccccgccgccagagcgcttcatgaggatataccagaagccgcccatgagcagcacggtgagcagcagcggcagcatatcgatccaccagggcatggcctcggcggcatcatagtactgcttgatgggtgcatcgggatgctcggcattatacttatctaccagggcgtgggtatcctgcaggaacaggctgagattcggcacactgtaggtgatggtggtctttttctcatcattgagctgcatggtcagctcgccggtgccaaaatccagctcatactccgccacctgctcattcttaaagtaatcgatgatggtgcggtactccaccttgggctgggcggtattcatgctgaaaatgcggaccgccatgtagaagaacagcgcgatgagcactaccgggacgatccagtttctctttttgggtgacaatgacttcactcctgtcttgggcagatttgattattcgtgggaataaacgctgggggaaagcacgccgatgtagggcaggttgcggtattcctcggcgtaatcgaggccgtagcccaccacaaaggcatcgggaatggtgtaaccgacataatcggcgtagatctcctgctcccggcgggcgggcttatccagcagcacgcataccttcagggaggcagggttgcgctccttgagcatcttggtgagctggtgcagggtgttgccggtatccagaatatcctctacgatgaggacattgcggccggcgatatcggaattaagatccttggccacatggatattgccggaggaggtggtgccgctgccgtagctggaaacggacataaaatcgatattgatctggcggtcgatctggcgcatgagatcggtgacgaaaacgatggcgccattgaggataccgacgattaaaagatccttgccctcatagtcctttgtgatctgctcgcctagccgcttgcatacgccctgcagctccacctcattgaacattaccttgcagatgtccttatccattctcatggtgttttttcctcctggcactcaattatcacatattgtccggttttttcggtcacagcagcgcgggaatcgctgctgaggccctctgcccacagcacaccgttatcatccgccagtaccgccaaagcggggcgcagcggcgccggaatgccggcggcggcccaggcctctcccagcgggagcggcttccctgttttggctgtgcggatgcggtcgccggggcggcgggtacgcagaaccgaattacctattatcttatcacaatccaccacattttttaagagggaaatgttaaatttttcggactgtttcgcaactattttgttgcaaagcgtcagttttatccgtttttgccggccaaagggcagaatgacaaccttttgcggcaaggggaacggcaccaaaaccggcgggatgccccccggcggctggtaactcaagaacgcccagctgccctcggcgatgaggtaccaggcccgctctgcgatatccagcttgccgccggagcggagggtctccttcatgcgcgccagcacagcggccgaacggggcaggccatgctgctccaataggcgcagcagcagccggtcgcagaccggctccggcaaggccaaaaggccctgccgatccagggtgccgcctgcggcggcaccctgcagctgctgcgccgcgctctcggcgagctgctcggtaagggcccactgggcagccagctggggcagcatgcgggccatggccccggtaaagttcgggttcaattcgcgaagccgcggcaaaatatcgtgccgaacgcggttgcgggtatagtcatcggaaagattggtgctatcggtgcagtagggctggcccagcagggccaggtattcctccacctcagcgcgggtcacatccagcagaggacggacgatgttgccccggatgcgggggatgccgcacagcccgtgcagaccggtgccccttatcaggttcatcagcaccgtttcaatggtatcatccagggtgtgggcggtggcgatgcgccccccctcccctgccgtttcggcaaagaaagcataacgggcgtcgcggccggcttcctccaccgaaaggtggttttccagcgccagggcggcggcatcaatatggcggacagtatagggcagtcccagctgcccggccagctcccgcacaaactgctcgtcccggtcggcttcagcgccgcgcagcccgtggtgaatgtggcagacgatcagctcccagcggtattcctcccgcaggacagccaaaaagcgtaaaagagcgacagaatccgcgccgccggagaccccgacagcgatcctgtcgccctgggtaagcagggaatattggcgcagggccaaaagtgccttttgctccagcggtgtgctcattcgcggttgcgatccacgctgaagaaccgggtataacggccatcccaccgcaggttgatggagccggtctcgccgtggcggttcttggccacgatgcactcggcttccgactggtcgtcccggtctttttcgtagtaggcttcccggtacaggaacagcacgatatcggcatcctgctcgatagagccagattcacgcagatcggaaagcatggggcggtggtcgctgcggctttccggaccacgggaaagctgcgacagcgtgatgaccggtacattcagctccttggccataattttcaggctccgggtaatctcggagacctcctgcacacggttatcgctgcggcggccggtgctcatcagctgcaggtagtcgataacgacaaggcccaaattccgcacacggcgcagcttggccttcatctccgccacggtaataccggcggtgtcatccatatagaggggcgccgcgccaaagaggggggaaagatcggccaccttgccccagtcctcggtggaaagctcaccggtgaggagccggcggctgtcgataccgccctccgaagcgaaaagacggttcatcagctgctcacggctcatttccagcgaaaagatagcgacggtctttttgccccgcagcgccacattggcggcgatattgagggcgaaggccgttttgcccatgccggggcgggccgccaccaggataaggtcggatttattaaggccggtgatggtacggtccaggtcgccgtagccggtggaaatccccaggtaatcggcccggttttcgccggaaaggcgctgcaaatggtcaaaggtctccagcaccacgcgggaaaccgggatcaggctatcgttattgtggccgttgcggatatcatagatccgctgctcggcatattccaggagcccctccggctgggccgtgggggcttccgcctgctctatgatatcccgggaggtggtgatgagtgcccgcaggtggtacttactttgcaggatattggtgtaggcctccaaattccgcaccgaaggcaccatctgcgccagctgggccaagtaggccttggtctcctccggggtggagaaaatctcctcccgcacagcggcttccatcaccgtgacgatatcgatgggctcacctagggtaaactttccggagattacctcaaagatcttgcggtgctgctcccggtagaaaaactccgggcgcaccaaccgtaccagatccggcacgcagccggcgtccagcagggccgcgcccagcaccgattgctccgcctccaggctgaagggcagacggctctcggtggtcatataatccgcgggcatgggggtcactccttttctgtgggtggtttgggggcactcctgggaaggggaagtgcaaagggcagggccggggcgcagcccgcccgcctacggcgggctctgcgcgcttcgcgcgcagctttcggctccgccgaaaggggctgcgccccgctcccggatactgcagtcaaccgggattattcttccccgacaaccacaaatacattggcggaaacaccgttatagatcttgacctcgatggtgtaggagccaaaggccttgatatcgtccttcagcacaaccttgcgtttttccagtgtgacgcccagctgcttttctatgccctcagcaatctccttggcggtgacggagccgaacagcttgccgttggcgccggccttggcggtcagcttcacggtcttgccgtcaatggcggccttctgctcctcggcggccttctgctcctccgccaaacggtaggccttggcggcctcgcggtttttcagctcgttcatggcgccggcatcggcggggatggccaggcctctcttcagcaggaaattgcgggcgtagccatcggctacctccaccagctcgccctttttaccggttccttttacatcctgtttcagtactactttcatgcgtcttttcctcccttggggttttcttcataataccggtcgatggcgaccagcagctgctggcggcaatcctccagtgtaatatctttgatctgtgcgcccgccatggtctggtggccgccgccgcccatcccttccaggatgagctgaacattgatggcacccatgctgcgggccgaaatattcacggcgccgtcctgctcatacagcacaaaggaagcatccaccccgctgatacccaaaaggtcatcggcggcctgcggcgccactacccggatgccctccacattggcgccggaggtgcagctgatggcacagccgcggtatacctccgcggcactcaccaggcggctgcgctcctggtagctttccatgctggaagcaaacagcttgcgaaccgccacagtatcggcgcccatgcggcgcaggaacgcggcggcctcaaaggtccgcacgccggtgcgcaggataaagctcttggtatccagcataataccggccagcagggcctcggcctccgccacgctgatgcgcagcttgccttccttgaaatactgtaccagttcggccaccatttcgctggcggagctggcatacggctcgtggaaaaagatgatagcgttatcaatgtgctccaccatcttgcggtggtggtcaatgacgataacattgcggcaggcttcgtagatctcccggctttccagaatggaggggatgtgggtatccactaccaccaacagggtattgcggcccaccatatccagcccctgcgccggagaaacaaaggcgtcctcgtagcgtttatcctgctgcagcatatggcggtacagcggctgcgccaagctcttttcggtatccagcacaatggaacagggcttgcccagtgtggaaaggccggcgtacatgccaatggccgcgcccagacagtccaagtcggcaaagcggtggcccatgatgaggatattatcgcaggtggtggccacttcggtaatggcgttggccataatacgggcgcgcaccttattgcgcttttccaccccgcggccggtgccgccaaaaaactcatagccgttcttctgccgcagcgccacctggtcgccgccgcggcccagggccatatccagcgcctggcgggagatggtctcgctctcatgcaggctggccgccatgggcgaaacaccgatggacatggtcgcgttgttgcggtcgccggtatccactgcccggatagcatttaggatggggaagcggtcctcaatgacccgcttcatatagcgctcctccaccaccgcaaggaagcggtcgcggtccagcttttttaccaggccgtggttttcctcggcaaaggtctcgatgatatgctcgatctgccccatggtgcggctgcgctcgttttccttggcatcggtaaacagctcggagtagttatcaatgagcatggtaagcacatagggccgggaatcaaagtattcctgggtatagtgcttcaggtcgttatcatccaccagacagatgatggtcagcggctccttggtggagctggagtgcatgaggaacacggtgtagtgccgctcccctattacgatatcccggccttcggcgctgctttcggcctgccaatccagtccgggtaccagctccgctatattatgcccaaacagttcctgcccggggaacaccccctgcttggcggggggattgctccacaccacctcaccgctttcccgcacgatgagggacggcatgggcagggacagcacggcgtcgctcatgatgtgctccagcgaatccttcaatcttccaaagcggcggcggttctgccgggtgataacggtcatccagatgatgcacccaagggagagcaatgcccacgcccccaggcagatatagaacagggtcatatcgtagcgggaggtgacggcagccatcaggccgcaggccactatcagcaccgcaagaataggacgatattggttcaatcgttcctgcataagatccctccgtttcggtcgttggatcggccccgccgctggtgcggctgggaaaaatggatatagcttctcactttacgctccattataccacgcccgcccgcaaaaggaaagcactatcttacacggggcggggttttcatttgggcgccggtgtgctaaaatagcggcagaaggaaccttcgcttggcatggaaaccggccatacatcgggcgccccgccgcttcagtcgtgctgacccttacgggcagccctccccgctgcagtgcgcccgcctttccccgccgggtggctctccacccgcaaggcccatgtttttccgcgaaggtatttgctgcagcatcccggcttcctgcgccccgcgccgtgctgccccctacgggggcagcacgaacccgcccctacggggcgggcaggccggccctatgggccggccgcgcggggcgcgcagcgggaccctgcaaaaattttaacatgtgatgcaacaaaatccgccgccagcgacactattatggtgaaagccggttggggcggcatcacaaaaggaaggtgcgttatgaccatcacccagctggtgacccaggcgcaggcaggcagccgggctgcctttggtgagctgtacgaaagcctggccggcgacctataccgcatggcgctatataccctgggcagccagcaggatgccgaggacgccgtggcggatacctttgccgaagcgtggaagggcattaaaaacctgcgggagccggaggcgttccgcagctggatgttccgtatcctctcggccaggtgcaagcggcagatcgcccaaatcgtgacccgcaaaaaggaaatagacctggacagctactacgaaaccgccgaggaagcgatgccggaaactgccacccgccgggcagagcttagcgaagcgctgggcacactctccccggaggagcggcagatcgtgctgctctcggtgctggagggctataccacgcgggagattgcgagcatgctggagatgccgcagggtacggtgagcagcaagctctcccgttcgctgaaaaagctgcggctgcaattacaagataccgatggaaaggaggcggcaaggtgaaggacgagcgtaaaacagaacggaataccgagtggaacgacgaggcggaagctgaccgcgactttcttcgggaaaagctgaaaaatgcgggcgatccggcactgcccgcttccctttccgctgcggcgctgtttgagcgaatggacgccgcagatcaacaggctgacgctccaaagaaaaaggggggcgtgatatggctgcagtggcggcgctggggcagcattgccgctgtgctggtgctggcggcaggtactgcattcctgttgcagaacagctccttgcaaaacaaggcctcgcaggacgagtcgagctatgacgcggcattggcgccgaatgaggcggagaaccaagaccagtggaatggcgcgccgaccggcgggccgccgaccgacggactgatgatggctcccccgccgaaccccagtacggcaggcggcgacggcagcgtgaaaaaggagtacgccaccgatgagattgactcggatcgcggtctgttcgaggagttcaagagtaagatcgtctcggtgggagaacagcccattccggacatgatggattatgacgcaatggctgccgtttcctcgcagcttttcgggaacgactacgagcaggcaatcgctatgttttatgacagcggcgagcgctgggagggctgcgaactgcccacaagctgcgcccactattttatgctggataagacgctgtacggcttcttcccggaggagcgccgggtggtggattacagcggagcatgcgccacggtgctgaatgaggacgaggcggcgatgctctcggcgattttgcagattgagtttacagcgaaaaccgaataagggatttcccctcgcggcggagtgagcgatcaccccgctgcattttttacaccctcgcagcatatcatgccggtagtggggacaaacattccccagccggtgcagcatcccggcgccgcgcccccgcacgggcggcccgcccctatggggcggaggaagcggtaccccctgtggaggcaccgcttcgcggggcgcggcctgccagggattctgccccgcacattccagccatggaggaaaagcctatgaaagccgattggggactgctgggcggcgctgccgccgctatgctggcgctgccgctgctggtactggcctggagcggcaccccgctgggcaccggtctgcccggcggaaccacatccgatccaacaccgcagcaaagcaatatcctccccggcaccaaccgggaagaaccagaggagccaccggccgataccttctccgttctcccctccttccgcatcctggatgaaaccaccggccaggtggcggaaatccccgcggcagactatgtagccggggccatcgcggcggaaatgcccgcctcctacgaagaagatgccctcatcgcgcagggcatggccgcctacaccaatgcccactacctggcggcactccgccgggccgatcccccggaggagctgaacggcgccgatttttcagccgatcccgccaagcggctgggctatgtcaccgatgacaccatgaaagccatgtggggcgatcactacaaagcctaccgtgaaaaaatcaccaaggccgccgaaaaagccatgcggtacctcatcacctacgaaggccagcccatcgtggcggcgtattttgccatcagcgccggaaaaaccaccgaagacgccggaaatgtgtgggagggtccccttccctacctcacccccgccgatagccactgggataaagaagccgccgggtaccgcagcactgtcaccatcaccgccgccgagctgcgcaaaaaactgaccgcccagtccatcctcaccggacaaaagccggaagaatggctcaaggtcctcacccgcagcgaagccgggtatgtcacggcggtgcaggccggcgaccgcgtgctgaccggccagcagctgcgcaccctgctggggctgcgcagcgccgccttcaccgtggaatacaaaaacgagcttttcacctttgatgtgctgggctacggacacggggtggggctctctcaggccggggcacagtacctggcacagcacggcaaaaactatcaggagattctgctgcactactaccccggcgccgcccttacccccgccgcgcaaaaataatccaatttccgcttgacgaaccccctcccgatatgataatatactggagtacgatataaagccgtggagaggtgtccgagcggtttaaggagccggtcttgaaaaccggtgactcatcagagccatgggttcgaatcccatcctctccgccaacacctccgacagtaattcgtagcccttggagatgtacccaagtggtgaaggggctcccctgctaagggagtagggtgcgaaagtgccgcgagggttcaaatccctccatctccgccaaagaaaaacccgcagaaatgcgggtttttcctttgttcatgcgggttttcagtattttcagtctttgcaaatcttgctgtttcttgcggtctttttgcgtatatgtggcacagtaatggcacagtaaaataccccctccagttacggagggggcatctctttaccacaccttctctgacactccgagtgcctcgtacaaaaggtgcttttgctttgtgcttgcgcctggaacggccccaccacaatatttctgctttccattccctgtggaatgccggaaggcagcgccgccatctcggccagcacagcaaaagctcccccggcgcgggagagcttttgggcgaatcacggattactttttgcgggcaaggacggccatgccaagagcggaaacagccatgagagcgaccgcggcggcgaccacatcattggcaccggtggtgggattcttttcgggctcggtcttgggggtgtcctcggtggggcggtcgatgatgatgacggtagatgcgttctcatccttgccgttaccggtggggtcaagggtcagcttttcatcggtggtcgttttccacaccataacatcggtaagctttacatcggtaccgttggtgttcttgatggtggagccttccggcagagcagtctgatcggcgggaatggtgtaaagacccgccgtatttgcgctcttagtgttcttttctactacaaggtcgaacgccgcattggcaccgaaatacataccaacattcttggtgctggtatcgccattctgtgcggaaatatcaaagtggttattggtagcagttagagtcgtgtccatctcccactgggcaattcgttcaaactttacgggacgggtacttgtcactttattattggtaaagttgatggttgtgagggaacggaaatcgttaccctgaccctcgttatcgcccttgctccagttaccgtaggcaggtctgatccaagtggggttggaattgttggccttagatgtattggtgtaattgttaaaagtgcagttattgaaaaccaagctctgtgtagccatagcaccaacgataatgccatcaaaggtgcagccttcaaaatccacgcagcccaactgactccaagggccggtgtaaagctgataatcaatgctgataacattcttgaaggcggtgccctggaaggttacatgggtgtaggcaggaacagccaacagcaggctggtgccgatatgatcaatatcctcataaccggtagcaccgctggtaatggtaccgccaacaaaaacaatatttttaccgttggcaccgtcattacctttggtgccgtcatttttctcgccaaggtagccattggaattgtagccattcagcacgctgcggtcttcagtctggccggtggtatcattgcgaacgccattgccgagaacaccgttagtatcatagctataattgccaacggtgacatacatagttccgccgagccgttcctgggcagtgatgtaggcatcacgatccatagcgccaagctgcgtcagcgtataggggttggactgggaaccatcaccagtagcaccctcatcggccatagcggtgaccggcagcatgacggccagcataaggatagccagcaaaatgcttaaaaactttttcattttgtatacctctttctcttttttatttttcccgcaggtggggttgtgtttgcggagcaaacacaaaaatatccccatggggatataagaacaggataagactaccacttttgggcaggggatgtcaacctaaatgagaaattttggggaggtgcacaaattcttgtgtaatttttatgcaaaacagaagagcagcgccgcagcgctgccctttgcaggagaaaatccgggatatcaaatcattgctctgttacttgcagagggggctttccttggggcgggtaaagtactccttggtgagcctgagaacgaccggcgaaagcagcgccacggcgatgaggttggggatcgccatcatgccgttgaaggtctcggcaatgctccacaaaagatccagcttgaccgttgcgccgatgatggcgaccagcgaatagatgaccataaagggcttgatgaccttttcgccaaagagatactcgctgcagcgggcgccgtataagccccaacccaaaatggtggtaaaggcaaagcagcacatcgccacggcggtaaagatggtgatccagttgccataggtgctggtaaagccgctgatggtcagctctgcgccggcatccgcgccaaagttgatgggcacgccgctgcacaggataacaagcgcggtaaaggtgcagatgatgatggtatctacaaatacctcaaagacaccgaacagaccctgctgcaccggatcattgacctcggcgcctgcatgggcaatagaggcagtaccaagaccggcttcattggagaagatgccgcgggcaacacccttttgtacggcggtgaacatggcgcctactacgccgccggtcacagcggtgggattgaaggcgcccttaatgatggaggagaacgccacagggagattcccgatgtgaacaatgataacgccaagacccagcaccacatacaaaagcgccataatgggcacaagacgctccgccacgtgaccgatgcgcttgataccgcccagcaggatcatgccgaccaaaacagtaataacaatgccgagaatgagattgagggtcgcggtgctgccggcttccatcacgccgaagctgatgagagcggtatcaatggaggcaacgatggtattgacctgcgtagcgttaccggtgccgaataccgcaaatataccgaaaatggcaaacagtacgcctaagaatttccacttcttgcccagaccgttctggatataatacataggaccgccgacccagtcgccgtgcttattcttctggcggtaatgaacggcaagcgtaacctcgctgtacttggtcaccatgcccagcagcgcggagatccacatccagaaaacagcgccgggaccgccgatggcgatagcgcctgccacaccggcgatattgccggtgccgacggtagctgccaaggcggtgcagaccgcctgaaaaggggtgacggcgccgcgaccagcctcggtggagcgatggaacagcttaccgatggtattctgccacacggtgccgaacttgcggaactggaggaaaccggtgcggatactgaggtacagacccacgccgaagatgagcaccatggcgggcacaccccacacgatgccattgacggtagaattgatactgctgatggtttcaagcatttacgatacttcctttctctacacaatttttcacgggatttgtgcgggaaagggtataaaaaaacgcccccgcccctgcacttcggcataaggacgaaagcgaaaaacgcctgcgtggtaccaccttacttcgcaccgccctcacgggcagcgccttatgggtgccaaggacaccctgccgctgtaatgggcggcgcccagcgcagcctaccggggttccctttcggtgcgcggctccgggagagcttcatacaaaaccacacccgcgcctctcaccaaccggctgctctctttgggggatctttgtactactaattcccttcgttgctttttattatgttgcatattgtagcggatgaaagcgggaatgtcaacgggtttgacgcattttttgtagtttttccaaatcataaattcatcttagctggctttttgataaaaaagacggtaaaaaggctggaaatatgaaagtttctcattgaaattcctgcaacatggagattttttgacggaagccttgctataactatactgctgtggtataatataagtaaccggaacacccggtgagaaaggatgaaaaatgatatggcaatgaatataaccgaactgcacgcggaaaattttgaacaggaagtagtaaacgctgaccggccggtgtgcatcgacttttgggcgccgtggtgcggtccctgccggatgctctcgccggtcattgaggagctggcggcggaggagccggccatcaagttctgcaaggtgaatgtggatgacgagccggggctggcggcccagtttggggtcagcagcatcccgacgctgatcttcagcaaaaacggcgcgctgaccggacggacggtgggcttccggcccaaggcagagctgctggagctgatcgacgggatcaaggactaaaactttataaaaatacccccggtcactgcggccggggggtgtttttctttattctgtttattctgtttattcggttttctccggggcgggctgttccgcgtactggtgcggggtaccgctgccggggtagcaatccaccagggcgtgatacatcagcggccacacatgctcgctgacatccctggtgccgcggtgctcgctatcgtagggcagcacctccagtaccttaagattgacggtggtgggctgccaggggaaattcttaaggatcttttcggtattttcgatgacgcagaccacgatggggactttggccttttgggcgatcttgaaggcgccattgcggaagggcagcagtggctcctcggttttattggtttggccctcagggtagatgcccatggaaacgacattctcatccaaaagctccaccgcttcattgatggtcttaacggcggcgcggttatcctcgcggtccagcggcaggcagaagcacatatgcataagtttattgacgatggggatcttgaaattctcctttttggagatgaatgccagggtgaattccgaaagctccgccatggtgaggacaggatcaaaaatggtgcggtggttgctgaccagcaaaaagcgggtatcgtgtgggatcttctcccggccggtgacattgacccgcacccgcagcaagaacatacccacctgcacgatgttggtcatgagccagtggtagaagcgggtcctgcggtcggcgggacaatcgatacggatgaacaccgacagcagcgccaccagcagtaggaaaacaataatgcagcccagtgtatagcccacggccaacagaatgccaagaatggggccgatgttgtggaggatgcaggtatagacggccaggccgatacccagcaggatgagaatggtgaggatcaagggagtccctcgctttcaggtggatgatggataagaataaaaaaggaaagattaagatttccttaaggtatagtatctattctatcgaaaagattttgatttgcaagggatttttccgttaaattttcgtaaacgatggcatgggcttgcattttacgaggtatagcggtatactattggcggaataaccgttctgaaaatacatttacaggaggtattgtgatgaatcatattgacgcaaaaggcaaggcctgccccatgcccgtaatgatggccaaaaaagagatggataccggctgcgaggcgctttccatcacggttgataatgccatagccgtacagaatctgagccgcctggcggagagccagggctttgccgccgagaccgccgaggagaacggctgctataccattaccatgcatcgcaccggcgcgccggcccaggagatgcctgaggagctgctgaactgcgctgtgcccgccgcgagcgactatgtggtatttgccgggcgggatgtcatcggtgagggcgacccggagctgggccattccctcatcaagatgttcttctacaccctgagcgagaagcctgacctgccttccgccatctgctttatgaacaacggcgtgcggctggtgactgagaacgagcagaccatagagcacctgaaggtactggaagcaaagggcgtcaagctgattgtgtgcggcacctgcctgaatttctacgggctgaccgacaagctgcagtgcggcaccatcggcaacatgtatgacattgtggagaccatgaccaaggcgggcaaggtcatcaccgtgtaagcaaaaagaaacagctcttcccccggccgaaaggttgggggagttttgctggggacgggtagacgcaagacggccgcaggccgccccggctgcgccggggcggcctgcggccgaaaccagcaccctgcaggggccggcggtgtcatattttacaggaatgtgaacattttacaccatttgccccggagtgtggcatgacatcttgattttatgaaggcggacagctatactattgatattgaaaatccgccggcacaaaatgccggcacaaattatctttttccgaggtcaacaccctatgacaaagctgaaagattttttgcacaagcggccctccgcatggtatatgctgtatatcccggtatatctgctgctgtttttcattgtggagcagctggtaccctccacctgcgattactgggtgagctacctgccgctggatgatctgatccccttttgcgagtactttgttatcttctactgcttgtggtatccgctgctcatcgccacggccatttacctttttgccaatgatgaccacagctttcggctgtacggatggtttatcatcatcgcctttaccgggacgcttttattctgcctgattttccccaatggacagaacctgcgcccggccgaatttaccgatccgaacatctttacctggctggtgggacggttgtaccatgccgataccaacaccaatgtcatccccagcatgcatgtactgggctgcatggccgccgtctttgggctgttccgctgccgctgtactccacgctgggccaagatcggtgtcattatcctgacggtgcttatcaatgcctccacggtgttcatcaagcagcacagcatcctggatgttatcattgcgctgatcgtcagcgtggtgctgtactttgtggtattccggtggatggataaacgcatcggcggcacaccgttgcccctgccggaggatgccaagacctgatcccgcagaacaaaagagaacctcccctgactttccggtcaggggaggtttttgtgtatttatttgttttgggccagccagtccatacggccgatgcgttttctcagaagcccagttagttcctccattatttttcttttgttttatgatatgccagccgctcgccgccatctgccaggtagatgatgccgcactgatgaaagccgtttttggcaaggcagccctgcatgggcagattgatgcgatgggtgtcggcgcggaggttggggtgctgctgccagcaccacgccagacagaagctgcacacgccgccccggtgcgcccccacgcccagccggtggatgacgccgtagggtttctcatccagccaggtgccctggtagattttacggtaggtgggttcttcccctacagtgaagcagaataccgccagcggggtgccattatcattgcagcagagatagctctgccctttggtgatatcctctgtcaccagttcccggctggggtagccgccgccccactgctggtcattgccgttttggcgcatatactgccgggcgtggtcgtacagggccatagcggcgtctaaatcttctatttgagtggggcgaataaacatcagtaatctctcctttgcgggggcatattctttgtgatggggatactatagcacacgggagaagccggtgcaagggggaagtatggagctcgccggcatttcgccccaaagggcgaaatgccggtgggcccctgcccttagcaggaagccacgggggtgcagggagtacggaaaggccgccggcggagccgacggccaaaatgctcatgtgcggtttttagatggtttcgtcccggccagctttctgtccggccagcagggccaccatgcaggtaaacaggatataccccaggccgatgttccagttgggggtcagatcatgcagccagcccaccaccagcggacctgtagcggccagcgcatagcctaccgactgtgcaaagccggaaagccgggcggcatccacagcgtttttggcacggaagcccataagcgccagccccatgctgaaggcgcagccattggcgaggcccaggatgatggtggcagcgacctgcgccgcagccgcggaggaggccatcagggtggtgatgccgatgatattgaggatggagcccagcagcagccaaccgcgctgatcccggcgtttaccggccagggtgggcaccagcagcgagggggccaggctgaccacctgatacagggaggtgaccatcccggcggtttggccggccatgccggaggactgcaaaatggtgggcagccagccgatgaccgcatagaagataagggaattgatgccgaaatacagggtgacgcaccaggccagcccgcttttccagatgggcttttggtcggatgcagcttcagccgggtcggtggtgcccagccgcagggagacattcttgcgccagataaaacctgtaataactaccgcgatgccccagatcatcaacgcgccgttccagcccaagccggcggtggaaagcggaacattgagcgccaggccgatggcggcggctgccaccatggccacggtgaaataggccgtaacctgccccacccgggtgggatattccgccttgaccacagcgggaagcagcacattgccgatggcggtgccgacaccgacgatggcagtaccgaggaacagtccaaggatgcctgcggtgctcctaagcacggtgcccagcaggatgaggcacagcccgataaggacggttcggccctcccccaggcggcggccgatgccgccggtaagcggactgaccacggcaaaggcgataagcggcagggtagtaagcagcccggaagcgctgccggaaaggcccaggcttttggtgatctccgggaggaggggacccacgccggtgatgatgatacgcagacagaaggccaccaggatgatgctgagcatcatagtgcggcctggggaggaaacggtgttggtttcagctttcgtaatgatccctcattttttacttatttttattgcagtggtattgccagtagatcttattgacaaggccgcccagcaggatgatggtcccgatgagatgcagccagagcatcaaaataataagcgaggccagtgacccgtataccagcgtataccgcgccgaggcactgatcatggtggagaaaaggatgctgaccgccaaaatggccagcccgccaaagatggcgcccggcagaaccggcagcgcgggacggttgtggggggtaacgctgcggtacagcagcagcaacagcagcatgataataccggtgagcagaataaaacgcagccaggtccagctggcgatgatctcgcccacatggaaccactggtccagcagatcgatgaaccaatcgccggtggccactaccaccacagaaaggtagatgatgaccaggaataccgccgaatagaggaagcacatcaccgtgtggagcagcccttgatagcgctgctggccgtaaagatcccccatggtggccatgatggtaccaaaggcgccggaagccgccgtaaacaacaggatgatgccggcccacagcatggcctgggagtagttatcgtgaatatagccgaagaaggtgaccagtgtttcggtcacctggggagggatgacctcgctgagcagttccagcagctcgccggtatcgatgcgggtgcggccgatgatgctggccacgcagatgagcagcgggaaaaagctgagcatcaggtagtaggcgaatgctgccgcgctgcggcccatgcgcctgctgccgtacaggtccaatatctcatacaccttggtcaaaaacgggctcttatcgatgattttttgcaggaatgggggcaaggggttccctcctttctcctaaattctacaagccgtcggccccccgccgccccgctgcctggctgcgcccggcacccgcccgcagggcgggaagcgccgccccctgcgggggcgccgcggcggggcggcgagggcctgcggctttattcaaattctggttggcgctgccgcggcagcggatacgcttaaccgatgccaaacagccgcttggcgttccggcaggtacttgcgatgatctcctccggggtcaccccgcggatctccgccagacgctccgccacccggggcagcatgctgctgtcgcagcgcttgccgcggtagggctccggcgccatgtaggggcagtcggtttctatcagcagccggtcggcgggaacggcagcggccgcctgtggggccttgcgggcattcttaaaggtaatggctccggtgaagcccaggtacattcccagtgccgccacctccttggccatctccacgctgccggaaaagcagtgcagtaccccagctgggtgcagctcccgcagcagcgccagcgtatcggcatgggcctccctgtcgtggatgatgactggcaggcccagctccttggccagcagcacctgctggcggaacagctccatttgccgttccttcggcggattttccgcccagtaatagtccagtccgatctccccgatagcccggcacttggggtgagcggccagggctttcagctcttccaaatagttttcgggggcgtcccccgcctgctccgggtggatgccggcggcaaagtacacaaagtcgtaccgttccgccagttcgcgcgcggcgtagctcgtgggcagatcggcccctatggtcattatatattccacgccctcccggtggatgctttccagcagttcgtcccggtcggcatcgaaccgttcgtcatcgtagtgggcgtgggaatcaaatatcccgttcatggcttctcctttgggaaaaaacggggccggcggcaacgctgttgtcccggccccgcaatttatatcctctgctcaagggtgtatcagcacagctttgcaccggcaggaatcgcatcatccagcatcaaaagatgcaggctttcgccctgctcggcagagataagcatgccgttggattcccggcccatcatcttgcggggcgccaggttggtgcacgccaccaccgtcttgcctaccagctcctccggcttatagtactttgcaatgccggagaggatctggcggtccttgccggtgccgtcattcagggtgaagcacagcagcttatcgctcttttccaccttttcgcaggccagcaccttgcagacggtaaactctaccttttcaaaatcggggaaggcgatcggcgtcttggcgggaacgctctcctcctgcggctcctccttgggggcagcgtcggcttccagctcggccagttccttttccatatcaatacgggggaacagcaccgggcccttctgcaccgttgcaccggcatgcagcccgccaaaggcggcagcggattcccaggtgcgctcattctcagtggcaccgcactggtccaagatcttctcagcggattccggcatatagggcttaagcaggatgcctgccaaacggatgctttccagcaggttatacataacggttgccaagcgagcacgcttggtctcatccttggccagcacccagggggcgttttcatcaatgtatttattggcacgggaaaccagcttgaaaatctcggccaggccattctggaaggcgaaggcctccatctgtttttcgtagctgttccgcagctcattgccaatggcaatcagctcgtcatcagcgggggccgcttcccgttcagcgggcagggtgccgccaaaatatttttccaccatcgccacggtacggctgacgaggttgcccaggtcgttggccaagtcggtattgatggtgctgatgagcagctcattgctgaaaacgccatcagagccaaaggggaagctccgcatcaggaagaagcggatggcatccacgccgtagcgctggcacagcaccacggggtccaccacattgcccttggatttactcatcttgccgccctccagcagcagccagccgtggccgtatacccgcttgggcaacggcagatccatagccatgagcatggcaggccagatgatggagtggaaccgcacgatctccttgccgacaaagtgcacatcggccggccagtatttctccacatcgtggtacttatcgtttttgtagcccagcgcggtcatgtagttaaagagggcatccacccacacatataccacatgcttggggtcaaaatccaccggcacgccccaggtaaagctggtgcgggaaacgcacagatcctgcagcccctggttgatgaacgccttcatctcattgacgcgggaggccggggtgaggaattcggggtgctcatcatacagcttcagcagccggtcggcgtacttggagagccggaagaagtaagcctcctcctcggcatccaccacggggcggccgcagtcggggcagcagccgtccttcagctggctctcggtccaaaaactctcgcagggagtgcagtatttgcccttgtaggtgcccttgtagatatccccacggtcgtaaagctcccggaatatcttctgaatagcctccacatggtaatcatcggtggtacggataaagcggtcatagctgatgttcatcagcttccacagcgacttaaagccgccctcgccctccacaatcttatccacatactgctgcggggtcacaccggccgccttggccttatcctctattttctggccgtgctcatcggcgccggtgaggaacatgacatcgcagccctgcaggcgcttgtaacgggccatgcagtcggtggccacggtgcagtagctgtgcccgatgtgcagcttatcggacgggtagtagatgggcgtggtgatataaaactttttccgttccatattttttacctcctgcgcaaatgagcgcaattcttcattatcagtatagtataacacactttgccgccaaagcaaagcatttttacagggaaccggccgctaagggacggctcccccaccggctgctgcaaaccgcaggcaccggcccggcgggcagcccgtcctgcggacgggctcagcggcctgcggccgccgcgcggcgctacgcgccgcggcccgccgggccggcttgccccctgcagggaccctaaaaagcaaaaccgccgccccgaaagccggaacggcagccgcttattttttccttttgcccgtagggttcttggggcgctttttgcgcactgaatagccaaaggagccaatctttttacccatggcaaagtactccccgtgggaataggccatcagccctgccttttccaggtgcagcttgccggcctcatccagcagtctttcctccacatccactgccacaatctccgccaggaacatatcatggctgcccagcgggatgatctgcttgacccggcactccagcgccagcgggctctgcgcaatgaccggcgccgctatttctttggcgggctctacggttaaaccggtggccgccagcttatccatctcccgcccggagcgtaccccgcagaaatcggtggcgcgcgccatggcaccgctggtcaggttgatgacaaattccccggattccttgatgatatcgtaggaataccgttccggccgcaccgagatgtaggtcattggcggatcgctgcaggtgatgcccgtccaggcgatggtcaaagcgttgggcttttccagcgtaccgcagcttaccagtgcggcgggcaccggggccagcagggtggaacctttccattggagcttactcatagtatgatcgtcctttccggcggtcagcccgccaccatgtcgcttattactttaatgaacagcagcgccagcaccgtaatgatgaccggccgcacgatcttgctgccgtttttcatcatcatcccggagccgataacatgccccagcaggcaaaacccaccggagatgagtcccagcgtgaccagcacctgccccgtggtgaggaacagcacaaagctggtgatattggaggagagattgaccagctttacagtaccgctggcccgctccaggctcattttgcacagcccggtatacagcatcagcaaaaaggtgccggtgcccggcccgtacaggccatcatacagcccgatgataagagaaaacaccgccgctaggataagctgcttactgcgggacatggtgctttccggctgctcccccgactggatgggctttcgttttaataccacaaaggcaatgaccggcagcgtgcccagcagcaggtactggatgtactgctgcggaatgagcaggatgagccgcgcgccaaaattggcgcccaggatggccataaccatgcagggaatggccgcctgccagtccacatagccgtttttcaggtaccgtgccgtggaagcgcaggtcccgatggtggagctcattttattggtggcaatggcctggtgaggcggcagcccggccagcaggtacgcggggagcgagatcagcccaccgcctccggcaatggcatccacaaagcccgccagaaagaccagcgggcagataatcagcagggttttcagggtcagcatagggggtcttctttccaatgggataataatattaaagttatactctcatagtggggaaaagtcaagggaagccgcctttacatccgggggaaaaatgctataatacccttataaagcccgcggctgccgcaggccgcccttcccccatccaaatctctgccaaggaggcggcagcccacgctgccgaataacgccatgaaatacggatttatcaaagtcgccgccgccagtcccgccttacgggtggcggattgccgctacaatgccgagcgcgccgccgagatgatgcagcaggccgctgcggccggggcgcatctgctcgtcctgccggagctgggcctgaccggctatacctgcggggatctgctgctccagcccaccctgcagcagggcgccctttccgcgctgcaaacgctgctttcggtcagtgcggagctccccctcaccaccatcaccggcctgccgctttcggtggaaggcaagctgtataactgtgccgccgtgctgcatcaaggacaaattctcggtgtcgtccccaaaaccaacctgcctaattacggcgagttctacgaggcccgctggttcacccccgcccccgccgggacccgcaccatctccctgctggggcaggaggtccccttcggcaccgatctgctgttctgctgccgggagctgccggaatataaattggcggtcgagatctgcgaggacctgtgggtagccgcgccccccagcacccgccacgctatcgccggggccaccgtcctggccaattgctccgccagcgatgaaaccatcggcaaggcggaataccgccgttcccttgtcaccgggcagagcgcgcgcctgatggccggttacctctatgccgatgccggccggggcgaatccaccaccgatatggtctttgccgggcacaatctcattgccgaaaatggcaagctgctggcccaaactgccctcttcaccaatgagatggctatcaccgagctggatgtgtaccgcctggccgccgagcgccgccgcaccaccacctggcccaccgctgaagcggccggctataccgttattccgttctccctgccggtgagcgagacctccctcacccgctttatcgatcctcacccctttgtcccggccgacagcaccgagcgccgggagcgctgcgaggccatcctggccatgcaggcagagggactgcgccgccggctggagcacatcggctgccccaccgcggtgctgggtatctccggcgggctggattccaccctggccctgctggtcgcggttcgcgcgctggatctgctgggccgtccccgcaccgatatggtcgccgtcaccatgccgggcttcggcaccaccagccgtacccgctccaatgctgaaattctttgtgaaaagctgggggtcaccctgcgtaccgtttccattgcggcggccgtccgccagcatttccaggatatcggccacgatgaaaaggtgaccgatgtgacttacgaaaacgcccaggcccgggaacgcacccaggtgcttatggatatcgccaaccagcaaaacggcatcgtagtcggcaccggcgatctctccgagctagccctgggctgggccacctacaatggcgaccatatgtccatgtacggcgtcaatggctccatccccaaaaccctggtgcgctacctggtgcgccacgccgccgatacctgcggcgatgaagcgctggccgccgtgctctatgatatcctggataccccagtgagccccgagctgctccccgccgaggaggacggcaccatcgcccaaaagaccgaagatctcgttggcccctacgagctgcacgatttcttcctctatcactttatccgctacggctgcccaccccggaagatcctccacctggccgagctggcctttgccggccgctacgaccgtgccgccatcctaaagtggctgcgtaccttcttccgccgattcttccagcagcagtttaagcgcagctgcctgccggatggccccaaggtcggctcggtcaccctttcccctcgcggggattggcgaatgcccagcgatgcttccgccgccctgtggctgcgggaactggaggacctgcaataacccccccattcggcggccgctccgcttccccctcgggctgaccctccgggcagccctcgcccgctgcgcggccgcctcactccccgtgtatggcaaacctctcatcccccacaaagaaatccccaagccgtgccggttcgccgtgcggcttttcttctcccgaaatattgttgaaaatttcactaagttgtggtatgatatagaataaactatttgcgcatagtattttcccgggcggtctttggccgctgtccatattcacactccccccaaaggaggtcctattatgacagaactcatctcccgcatgaatgaggccatgccgctgggttaccagctcgccttcctcatccgcgtactggtcgccaccctttgcggcggcgccattggtctggagcgcaccaagcgcctaaaggaagccggcatccgcacccactgcctggtctgctgcgcttccgccctcatcatgatcgtttccaaatactccttcgccgatctttccgtcggagatgccttcttctttggcgaccgcggcgccgatccggcgcgcattgcggcgcaggtggtcagcggcatcagcttcatcggcctggccgtcatctaccgcaacggcagcaccctaaagggccttactaccgcggcgggcatttgggccaccgcaggcatcggcctggccatcggcgccgggatgtaccccatcggcatcgccactaccatcatcattattttgatgcagaccatcatgcacaagttcaatatcggcaatgacgccctggccactcgggatatcaatatcaccatgaatgataccccggagctgcgggatgccttcctggcggagctcaagcggatggatgtttcggtcatcggcagccacattacccacaataacgatggcaccgtcaattacggcctcaccatcaagttcagccgggaaattaagttcgaggagattctcgcctttatggatagccaccccggcatccggaacatcgccatgtaacaaaaaacatctttcccccgtccagcaaagggcgggggattttttgctttgtgccctctcatccccggccccgcgcaccgccccacagcctcccccgcgcaaggggtaacgaagcggcatcgccctacaccacaggctcccctgtgtaaggggtaacgaagtggcggcgcggtagtgaatgatatgccggtggcatatcagagccgcgccgtgaccgagccgcagcgagaggctgtcagccgcaaggctgactgaggggttgccggcaaaaggtaataattttatctcgcctgtcggcggcgcggagccttttgcaaaggaataatctgtacggctcgccgccgaggcgttccttttgtgcgtacaaaaggaaccaaaatacggtcaagggggaccgagcttcccccttgacaaacccctttgacgcttagctgtgctggatacggatttagatttttctggggcgaaaaatccaaatccgtactgcgcacagatgcgctccaaaggtagccgcgggcgcatctgcccccggcgggacgcgaggcccgctggggaaaggaggagcggcggagcgttggagggttaccccaagcgtaagcggggtggcccgacatggagcacagcccgcgacgacgcgcacatacaaaagtagggccccggcggcgagccgtaccggctttgcgccccgccgaaggcgaccaccaatttggcttaaaaactctttttcccacttttcttcatagaaaagcaagccccgccgccagacgaatatgatataaaaagagccgcccccatcgggcggctctttgcggttaagcagtcattattatagccccagccaatcctccaccgaggccttgatctcgtcgtaggccttttcagcggtgggccggtcggccgcccgcagggagtagtagaacttgagcttgggctcagtgccgctgggccgggccaccaggctgccttctttccccagccggaattccattacattggaggcgggaagccccgtgggggtctcgccctcaccgtcctcataccgcttgccggcttcgtagtcggtgtggccggtcacaggccggccggctatggcaatgggcagctcggtccgcagcgtttccatcaacgccgccatctttgccatgccatcgctgccggggaaggtatagctgtccaccttgttaaaatagtagccgtactgcgcatagaggtcgtccagtgcctcaccgaggttcttgccccggcccttgtaccacgccgccatctcacagatgagcatggaagcgaccaccgcgtccttatcccgcacatagccgcccgccaggtagccgtagctctcctcaaagccgaagatgaaccgctccggatggccttcggactccagatgagcgatctgctcaccgatgtacttaaacccggtcagcacctgccgcatctccacaccatagtgcgccgcgatggcgtcggtcatggtggtggaaacaatactgcggacggcgacggggctttccggcattttgtgcagctccagtcgggtccggcagatgtaatccagcagcagcacgcccatttcgttgccggagataaggcgcggcgtgccgttctgcagcacggcggtgcccacccggtcgctgtcgggatcggtggccagcagcaggtcggcccccagcttctcgcacaggttcagccccagctgcatcgcctccagtatttcagggttggggtaggggcaggtagggaagtccccgttgggctgctcttgctccggcaccacggtgatatcggtgtggcccatccgcttcagcacggtcatcaccggcaccagcccggaaccgttaagcggagtatacaccagtcgcagaccggcagccttgcccagctcggggcgcagcgcctgggccatcaccgcggcatagtaccgctcaataagggcatcgccaatgtattcaatgcgcccgtcggccagcgcttcctcaaagtccgccagcttcacatcccggaagatatccgtcttttcaatctcctcggaaacagcggccgctacatggccggagatctgcgcgccgtcggcggcataggccttgtagccgttgtaccgggcggggttgtggctggcggtcaccatcacgccgcccgtacagtgccggtccagcaccgcgaaggaaagcgccggggtgggcatcaggtggggatacagataaaccttgatgccgttggcggccagtacccgtgccgtttcccgcgcaaaaacatcactctggtggcggctgtcgtaggaaatggcagcgctcggtttttcatcctgcgtcagcaggtaggcggcaaagccctgggtggcctgccgcacggtatagatgttcatacggttggtgccggcgcccagctcgccccgcagcccgccggtgccaaattccaacgaccggtaaaagcgctcatgcacctctttctcctcgttgcggatggaaagcagctcggcggaaagctcagggtcggtcacttcctccagccagcggcgcagctcggcctgttctttactcatatttcagcactcctttcgggggatattttccaactccataatagtcaaaaagggcctggctgtcaatcgggaaaagcggcgggttcggctgccgccggggcccctcctcggccaatcgcagtccctgccgccttgcggtgcccgaaaaaatcttcgcgctgctcgcttgctcgattctttcgaccgctgcgggtgctccgcctcgctgcatccgccacaggcggcgctcggctccgcatcccctgcccccttccccacatcggggaagggggactctatccgcagtccctacataaaaatgcgcctgcggcaccttataagcgtcgtctaatcccgctccgggaagccgtcctttggctttccgggcggggtgtaccgacgcgtcggggggctcggggcactccccgagtgacttttgcctacttttcttcatagaaaagtagggccccggcggcgagccgtacggaccgttaccctccggtgactccgccccgccgccaggcgaccaccaatccgcccttaattcacacaataaatcccagtctcacttccccagcaaaatccatcatttatgcaaaattaacccaacatttccccattttgtaaatcttccgtaaataaaagtgaaatattaacctctcaactgcaaaaaaggctcgattttgccgtattagtgaaaggactttttctcaccggcaaaaaaattctttcccttcggcatctctcaccgaactaaaactgagagcctttttgtcccaccggtcaaacaggggcgccagtccaaaatttctcagcagacctcatcgggcaatttgggggtctgccttaagcgggaacccgcctcccaccagcaccttgaaaactgaataagaccccgccaaaggcccccgcataaaagagggcccggccgaatatagttccattgaaacgatgggacggcaccccctgccgcccaactgcggagaggagaatgaaaatg

SEQ ID NO: 3307 - DNA, 10536 bp, Unknown
  16S sequences of unknown bacteria
atgaagaatggaggcgaatgtatatgacctggcaaattcgtcaacgggaagcggaactgctcggcgaaaagcgcggcatagccattggcgaagagcgcggcgaaaagcgcggcattaccattggtgaaaagcgtggcaagctggaaacggcgcgggccatgctgaaggaactgcccatagaccaggtcgcgcgcttcacgggtctctcgcgggaagaattgcaatcgctggctggcgaaattgccccgcgagcttagccagtatgcaaattctgggcgcggggcagcagaggcggcgccatttgatacaatcgatactcgcgtcgcaaaattcgcgacttgcggcagttgcatagaaggcctgatcagtcgcgtttttgccgagcggttgagccgtactccgctagccggttcgaacatagccatctaatgatttactgcgggaacggccagaaggtcgcagcaaaggatctacgcgcttcccccaaaggctgatgaacagggttacaaggagcgttctcttcgcaagggttggagccaataccacgactgcatgaagcgccaaatggacttgattttcgatgctatctatcgcatccgcaaatcctttggcgcctgtctgatttctcccggaattgtttgacacgatctttattgtttacaggctttacattatgcgtacgctgtggtatactaaagaagtgaacgggttccaaacaagctgcgcgttggcggaagggcgcaggcctcgcgatggcgatctgccccacgcgtgtggggatgaaccgaatatgtgatgcggtaactggtttactggcacatccgccccacgtgtgtggggatgaacttgcaaatttcacctgtgcggggagaatttgcggctggatggggtgtttgcgcccaggcaaaaaatgaaagttgcacaaaagttgcatgcgatctccaaaagccttagcgtacacaaattgacaagcccttgaaatctcaatgatttcaagggcttatcgtttggcgcgcccggcgggattcgaacccacggtctttcgagtcggagtcgaacactttatcctctaagctacgggcgcaagatactacattattatataccaagccttcctacattgcaacgacttcagaaaatttaatataaaaagagacgcggtttgctttcgccgctgtgttataatccattgacggcctggcccgcgggaccattaaggaattttgatagaaaagagggaatgcgccatgaaacaaaagagcgtttttctgcccaaggattcgcttggacggcccgtacacgcgcacggcggacagattctgctgcgccaaggcatgtattactggattggcgaagaccgcacaggacgcaaccgggtttcctgctatcgcagcgcgaacctgcgcgattgggaattccgcaaccacattcttacggtggatagcctggcaaaaccccacccgcaaatgcccacggacttgcgccttcgcgtgaatggcgcgggctgcaacatcgagcgccccaaagtgctgttttgtagagaaaccgggcaatttgtgatgtggatgcactgggagttgccggacaattatcaagaagcgcgttgcgccgtggccgtgtgcgacaccattgatggcgactatacgtatttgggttcttttcgtcccatcgggcacatgtcgcgcgattgcaccgtgttccaggatgacgatggcagcgcctatttcatctcttccgcgcgcgacaatctcgatacgcacatttaccgtctagccccagactatctttccatcgaccggctggagcgcgtgctctggcccgggcagcagcgcgaggcggccacggtgttcaagcggcgggggatatatttcatgctcaccagcggctgtaccggctgggcgcccaatcaaagctcttacggctggaccaggagcctgacgggagaatgggccatccggcgtaacctgggcaatgagaccactttccattcccaacccacgtgggtgttgccggtgtataacgctgaaaaagacgaattcaattactggtacctcggcgaccgctggggtggcaaggggcgctatttcgaatcgcaatatgtgctcctccccctgcgttttgtgggagatacggagctttttctcgaatggcgggaggaaattgacctgtaactctgcaaatctacaaagcgctttgcgaaaacgccgcaaaaaacgaagcgcccatcttgcgactgatgcaacgcaagatgggcgcgccaaactttgaccactggtttattccatgctggcaagcagattgactacggccttggccgcgtccgttttttcgcaattggcgaacacaaagattctcatatccacaaggccggtgagcgcgctggcgttttcgctgaggacaaagccgcacgccgcgctggtttcgccggtttcctgcccttcgtcatccagcacgggcacgccggttgcctcggcagacatcgccgcaagctcctcctctgtaaacaattccgacaaagcgatataggcttcaccattatcgccatagcggcgcgcgttgtccgcgtcggtaatcaaaacatccacttcacccgcggccatcatgccggaaagtttcgccatacccgccacagtgcccatggggtcggcttcagaatcgcccatggctacggtggaaatggtgatatccggatagtccgtgagcgtagccaactcagtctttagcccttccaccatgctatcgtccacataggtggccgccaccaccacgtttaacgccgtagacgagttctcttccccgccgccggaacagcctgccagcagcaaaagcatcgccgcaagcatcaatgtaacgatgcgctttttcataattttctgcctcctttttgtcaacgcctttatggtaccataaaagcgggatttgtcaacccaccatccgcgattgctcacgctcgcgccgcaattgttcctgtccatggcgcaatcgcttcaaaattcggccagtccatggagagacgcacggttacgcccactcctttgacgctctgctagaacctccggttcatacccggagcgtcacagaggcgatgcggtgagaaccccccctccggagaaaaggcaaacaaaaaagctctgaaaggcataaactttcaaagctttttatggtagcggcgatgtgattcgaacacatgacactccgggtatgaaccgaatgctctggccaactgagctacgccgccaaatggttgcgggggagggatttgaacccacgacctccgggttatgagcccgacgagctaccagactgctctaccccgcgacgattccttcagaacgcgagagttattataccgcactacacccgcgctgtcaagcactgcacaaaattttaatatgacgggcggcccatccgcgcaaaaggccgcccgtattttggcttaccgctcgggcaacaagctgccgtcgatggcgatggtggccacgcgcagcgggatatcttttccgctcgcggcaatggcctggcgcacggcgcgttccagcccgccgcaacagggcacttccatgcgggccacggtaacgctgcgcacggcattggccgcgaagatggcggcgaacttttccatcgcatccgcgggatcgagcttggggcaggcgatgaccgtcgcgcggccgcggataaaatcgcggtgaaacgcgccataggcgtaggcggtgcaatcagcggcgacgagcagatcggcgttttcaaaatattccgcgcgcacgggtacgagccgcaactgcaccggccactgccgcagttcgctcgcaatggttgcgggctcgctggaagggcaaaccgcttcgcgctggatgcggcgcgcgtgcgtgcccggacaaccgcagggcaaaggagcggctttttgttttttggcggcttccaccgccgccgcatcgtaggcaggggcctcgcgttcctcgaaagaaatcgcgcccgccgggcaggcgggcaaacaatcgcccagtccgtcgcaataattttcacgcgtgagtcgcgccttcccatccaccatttcaatcgcgccttcatggcacgcctccgcgcacaggccgcaaccggtacacttttcttcatcgattttgataattttgcgaatcatacgtccatatctcctctccgtcgtgggacactggattttgtgcttttattatgctataatgggaaccaaaagtctgttggaaatccaacaaaaagaggcgatacgcgtggaaaatttggcgatcatcgccgcgtccaaactattttacggtgtggcgcaagaggaggtcgcggccctactggcctccgcgaacgcgcgctggcgctcttgcgcgcagggcgaagtgattctcctggcaggcagccgggcgcgcgacatcggcgtagtatgcgccggggaagtttatgtggcgcgggaggaaatcacaggcgagcgttcgctgctcgcccggctgggcgcaggggaactatttgcggaggcgtatgcgtgcgcggggactacgcgcctacccgtgagcgcgattgccgcgcaagattgccaggtattgctgatagacgcgcagtcgttgctagcggcgcgggaaccggtcgcggcatgcgcgcgcgtgcgggaaaacctgatccgcattctggcgcaaaagagcgttttgctcaaccggcggctgacgcatctttcgcgccggagcacgcgagaaaaggtgctctcgtattttgccgaacaggccgcccggcagggcaatcccttcaccgtgccctcgcggcaggaaatggcggattttttgtgcgtggaacgcagcgccatgtgcgccgttatcggcaaaatgcgcacggcgggcgaaatcgccgtggaagggcgcaaaatcacgctcttgccgcaaaaaggcgctagcaaagcttaggcgatactttacaaagcggataccacggctctgcttgcgcggccgtgcgttttcctatataatttgttagaagaaatccggcaattttgctgtgatcgcaagaatgaatgccgcgccacgcccgattttccctttagtaaggcaatttttacccgcagcaaggcatccatatgcgctgcgctatcaaaaaaggcaaccgcggctcgatagcaaaacgcattgcgaaaggaagaaaacagtccgtggattttgtgcagactttgcccaccttggaagtgctggtgatcaatttgattgccgaaggattttgcctaaaacgaaagtattcccgcggttttaccgcgttggtcctcgccgcgttctccgccatcattgttatactggtgttccttttggccaaacccttaaactttcaaggcaatggccggatgatgctgggcggctttgtttatcttcccgtgctatgttttctgtaccaggcgcgcccattggtgctcttcatcattatgtgtacctgttggtcgtatagcttcggcgtattttccctagcgtttttgtgctctgccacatggtttgctggcgactttctgtgcagcctagggattgaaacggccctctttctcctcaccgttgtgcccttttatcgcggcattgtggtgaaattcgcctttgccatcgaaaacattcgcgcatgcgatgaaaattggaacaaatacatcttgctcaccagcggcctgaatttggtgacgctggcggtgctgcacaacgttctcctggcagagagcggaagcgtgatgaaaatctgcctgctattgttgctgctcctttctacgtttgtggcgaacttcacgctgtatcgcattgttttggattccatcaaaatccagcatctggaaaaaaccgcggcttcggatcccctgaccggcctgggcaaccgcaccggtttgctcaaccatctggaggctttgctggcaggcgcggaaccattttccgtgctatttatggatctcgaccgctttaaggccgtaaacgaccgctatggacatctattgggcgacgcctatttgcggcattttgccaacatcagcgcgggtattctcgcgggccatggggaaatgtatcgctttggcggggatgaattcatcgccctttgccggggcgttgttcccgaaagcgttgtggacgatttgcgcaattgccgcggctgggataacgacgctccctgcccctttcgccaggtcagcatagggattttgcattgcgagccgccccacagcgacggcgcggaagccatcctgcaaaaagtggaccaaatgatgtacggccacaaggcgcgcaaaaagatataacgcggcgctttctccgcgccggaagcttttttgtccatattttgccataaagttcgccctatcgaggcaattcggtgttacaagcaattcttttcgctgtaaaattcataaaataaatatcagcagaaaaattttttatatgcaaaaatccttgacgcaacatataaaatatgataaaattacatatgctatttgaatttaccaaagcgaggagggggatccatggctgcaacttcgccagtgagcgccatggcgccagagcgcaaaaagaaacggtaccgtcaagacattgtaaaggaaaacatcgaagtatggctgatgatgctccccgtgttggtcatcattttcattttcagttacattccgctttggggcgtgattatcgcctttcaagactatcaacccggcagccccttctttgacaccgcgaactgggtgggccttaagcacatccaccaatttatcaacagcctatatttcgaacgcctgctggtgaatacgctgcggttgagcctgttacagttgctgtttgcgttctgggtgcccatcatttttgccctatttttgaatgaggtcaccaacctgcgctacaaaaaagtggtgcagacgtgcagttatatgccctacttcgtttcctcggtggtggtggccggcatggcgatctccttcctagacgtgaacggattgatcaacaatgtgctcagcctattcggcgttgaacccaaggaatacatcaccgatcccaacgccttccccaccatttacaccattaccaccatttggaaagactttggctttggcagcattttgtatttttccacgctatcttccatcgatcccgcgctgtacgaagcctcgcgcatcgatggcgcgagccacatgcagcagatctggcacatcacgctgcccggcttggtcaacgtgatcgccatcaaactgatcatgagcgtgggcgcgattctcaattccaacacggacatgatccttttgctatacaatccctctacctataagacggcggacgttatcggcacttatgtgtaccggttgggcgtacagggcggcaaattcagctataccaccgcggtaaacctgtttatggccctgattggcttcttgctcacgctgatggcgaacaaattcagcaacaagctcacgggcagcggactgtggtaaggaggcggctgaaatgacgggaatttccaccagcaataaagtcaacaggattcgcgaccgcagccccctgagccgggcgatcctgtattttgtggcggcgctcgtcgcgttcatcacgatctaccccatgtactatgtgctggtgctttcgctcagcgccccgcgcgaggcgctcaccatgcgcgtatattggtggcccaaaggttttttcgtggatagctacacgcgcattttgagcgacaaccaattgtggacttcgtaccggaacaccatcatttattgcagctcgcgcgcggtgcttacgctgctcacctcggtgatggcggcgtatccgctcacggtgccgcacctgttcggccgcaaattcgtgacgatgttcctgctgatccccatgtatgtgaccggcggcatcattcccgaattcatcctgatgaccaagctgggcctgtataatacgccctggtccctgatcctgcccggctcttattccatctggtacatcattctggtgcgctcgtatttccgcaccgtgccagaggcgctgcgcgagtcggcaaagatcgacggcgcgaatagctatcagatcctaaaggacgtattcttgcccacctcaaagccgattttggcggtggtggcgctatacaccatcatcggcgtgtggaacagttggtaccatgcctcggtgtacatcacagaccgcgaatggcaacctttgcagctcttcctgcgccgcgtgctggtggaacaaaccgagcagctttccaatttggcgtttgccgacgcggaagccgtggaacgcgcgcaagagcagcagatttccaacaatcagttgaaatacacgatcatcatcatttcctcgctcccgatgctcgtcgcgtatcccttcttccagaagtatttcgtgcagggcgttatgctgggctcgctaaaggaatgattcttggattcgtcgcgcacgcggccggcgtttccggcctgaaatattgaggaggtgccttatgaaacacatcaaagtcgtactcgcactgttgctcgtgctgtctttgggcctgggcatgaccaacgccctggcagaggacgggctgacgaccgttacggttctgggctataaccagggcagcgccctaatgggcagctttgaaaattcctatgcctacgaatggctgcaggaacagatgaccgcgctgggcattgatttgcaaatcgaatacgtggaagcggatcagtattcgactaccatcaccacccgcctcgccaccaacacggatcttgcggatatcatgttcctcgagatcgacaatgtgacgctgaacaacctgatcaatcgcggcatgcttaccagcgtggatgaaatcctcgagtatagcgatggcacggcctcgggcttcctcgcgccggacggcgaatacagcgccatccgcaactctggcacgggcccggacggtacgttctgggtgctgcaaggtgtgatgacgggcattttcaacgtcaatggctggacggggtcctactccgtcggcatccgccaggattggctggacaagctggagctgcccatgcccactacgattgatgaatttgtggacaccatggtcgccttccgcgagaaagatgccaatggcaacggcatcccggatgaaaaagtcctctttgccagcgatttgagcctgctccgtcacagcggcatcgcgggctggttcggcctgatcatgaacaacatcggcctggatccgaacaccgacgagatcacgaccgtgttctaccaggatggctttaaagattatgtgaaattcatcaagcgccttgtggacgcgggcgtaatgtcgctggcggacgagggttccctctacaccaccgatacctcttcgctaatttcgcaaaacaccatcggcgccatgttctatcagacggccagcatgtactcccgcgatgagctcaccggcgacgcggcgtgcgattaccgcccgatttccctgcagggcgtggaaggcatcacgcctacccgccgcggcgactacaacctttcaatttacaccggatactatgcgttcatgaactccatcgatgtgcaggccgctgcgaagttgctggacttcttcttcagcgagccgtactggagctggaaccgcgagggcctggaaggcaaggatttcgaaatcgacgagaacggcaacaagcagagcctgaccaccggcatgacgaacgatgaaatcattgcgcagcgtctgggcggcggccgcttctacatggatcgcgctatactgccctgcctggatatggccatgacctattacacctacaacggggaaaaggttggcacgttcaccacggcggaagacttggccaacagcgcctatggtcaggaagaattggccaagcaggacgcggcggatcccacgggcaagcgtagggaattgctgatggccagttgggaacagatggagcagacggacgccgtgatgtaccagaccaatatggcgacctatctggccttgcccacggatgaagaagtggaaacgttggatttctacaccaccgatctggacatggccatgaccgacctgttcatcgacctgatcaatggcacgaaggacatcgataaccttgacgagtatctcgaagagctccgtgcgctgggtctggacgaagtgatcggcgtgtaccaggcgcgttacgaccgtttcaagggcgaagcgtaagccaacaattaagcgatagaaacgcgagggccgttccaatggcgttgccattggaacggccctcattggttgtttgaaaaaattgcgcctatgccttgcgctttccctccgcgtcgaaggtcttcttgagcgctacctccgtgagtcccacggaaacaaagagaaaaacgatttgcgccgcaaggacgcaaagccccgctataccgattgcctcctcgctttgcccgcgcacgcatagcaggatgagcacggaaagcggtagggcgatcaacccgccagcgaaccagagttttccgcaatggtgatgcgcgaaattccacgtatccatgctttgcatggagcagaccactgacaaagcccgtttcaagaagtggaagacgggctataagcctgagc

SEQ ID NO: 3308 - DNA, 6218 bp, Unknown
  16S sequences of unknown bacteria
gcctgcccgcccatgccgacggacagcgtgaagaacgcctgccccatggcagcgtagacggcgctgccgaacgtgctcgcccgctccccgaatgtgtcgcccgcaaacaggtgattgaagtcgggcatgaggtagaacgcgatgccgtccgccgcgccgggcagggtcaccgcgcggatgcacagaatgatgaggatgacgaacagggccgacatcatgaacttggtgatacgctcgacgcccttctcgatgccgagggcgcagacgagcatgccgatggccacggtgacgaacgtccaggcaagcatctcggaggggttgcccaccatcgcgccaaacgccagagcagaagtcgaggcatcggcgccgtcgaacatgcccgaccccaacttgaagatgtaggcgagcatccacccgcagatcgtcgtgtagaacatgagcagaagcatcgagcccacgtagccccacggggcaaaccacttgaagctcttgccggatggcaggacatcaaaagagcgtgccgtcgatttctggctcgcgcggccgacggcaaactccatgaccatgatgggcaagccgagcacgagcagaaagacgaggtacaagatgatgaatgccgcgccgccgtactggccgacgatgtaggggaagcgccaaacgtttcccaagccgattgcgcagcctgcagccacaaataaaaacccgaggcgcgacttgaaatgctcgcggccctcggatgccgattcttgctcctgtgccatggtgatactccccgtgcatgcgtcttgcaaatgtcgcgattgtaccagaagcaagataatgcgagccacgggacgaacgaccgacggcctacggcagaaagcgctcgggcgacctgcgttggctctactcccacatgtagccgacaccgcgcacggtacgcaggtgggaggcgagctcgtttccgagcttggcgcgcacgcggcgcacgtgcacgtcgaccgtgcgcgaacccccgtagtagtcaaagccccacacacggctcagcagcgcgtcgcgcgaataggcatggctcgggtgcgtcacgagaaacgcgagcagcgcatactcgaggtacgtgaagtcgacgggctggccatcgacgattacctggtaggtcgacaggttgatggccatggacccgaacgtgatgaagtcgctgctcgagacctcctcgcccggccacagcaggtggcgcatgcgcacgacgagttcttcatccggagagctcggcaagacgaaatctgccgcgacgtgcgtggggagccggagcaccttgagggcatcggggtcgacgacgagcagaaccgcggtcccctccacggtctgcagggccttttccaaatccgagaggctggcggcgcgtgccgcgtcgacgctgcagatgacgaggtcgacgctgggcaagtgctccgcaacgttggtggggaggcagacgtcgaagtccgcgtcaagctctgcgaccgccttttggtagcgggcgtacccctgcatattctcctgtacgtataaaacgcttttccgatgcaaaatatgctctttccctgtcagtgcctacagaatcgggaagttcctgtcgatctcccactgcgtgacctgggcctggtactcacgccactcctcgcgtttgttgtccacgatgaacttgtggagccgctcgccgagcacctctttcatgagctcggattcttcgaacagggtgaccgcctcgcccaagtcgcccggcaggaccgcatagccgttgcggcgcagctcgtttcggctcatgtcggtgaagtcgtccgtgatgggctcggggagctcaagaccgtcttcgatgcccttcaggccggcgccgagcagcgcggcaaacacgaggtaggggttgcacgaggagtccgcggcgcggtactcgaagcggaccgactcggacttgccgcgcttgaacagcggcacgcgcacaagcgcgctgcggttgctgcgcgcccacgagaccgagagaggcgcctcgaacccggggacgaggcgcttgtacgagttgacgtactggttggtgagcagcgtgaactcgggcgcgtacttgagctgaccggccatgtagtgctttgccagctcggaaagctcgaacccctgcgggtcatctggatcgtagaaggcgttctcgtcgttgcggaacagcgactggtgcacgtgcatgccgctgccgttgtagtcgggcatgggcttgggcatgaagctcgcgtgcacgccgtgcttgagggcgatttccttcacgacgaggcgatacgtcatgaccgcgtctgccatcgacagcgcgtcgtcatagcgcaagttgatttcctgctgcgagggcgctgcctcgtgatgcgagtactcgacgggaatccccatcttctccaaggtgagaatcgtgtcacggcgcaggtcggaggccatgtcgtcggcggtcaggtcgaagtaacccgcatagtcgatcggctcgggcgttttgctgttcttgaagtagaagtactcgacctcggggccaacgttcatgacgtagccggcatctgccgccttcttgatcatgcggcgcagcacatagcgcgggtcgcagtcgaactgctcgccttcgggcgtgcagatgttgcagaacatgcgggcgacgccatcgtcttttggccgccatggcaggacctggaacgtgcgcgcgtcgggaaacgcgagcatgtcggactcggtgctgcgggcaaagccctcgatggagctgccgtcaaagctcagtccttccgaaaacgcggcgtcgagctcgctcggggtgatggcaaaggacttcatctgccccatgacatcggtgaaccacatgcggatgaagtggatgtggcgctcgttgaccgtcttgaggacgtaatcggtgttcgcggcgttggcaccgccgaagaaactattcagtgcatcgggcatagttcggcactcttcctcccagccgtctgtttgcatagttcgtatgatacctactcgtgcgaaaaacagtagcagcacaatgtaaacagcaggtttcacgattgggcaagcacggacgtgggcagggccttatactactttgcgtcggataatcgaaccgagacgcgcgcgttccccgatgtgcgccgccgcctaacgcgggcacatcgcatcgcagcaggggttcgcggcgccgggcggttccaaaaggaaaagagatggacatgattgcaaagacgaccatccagcacatgatcgacgcgctcgaaaaggggcagacccccaaagtcgaccccgaggagatcccctgtttttccaaggcagcgctcgcggagaaccccgtcgtcaccgagcagcacctggaagagatcttgaaggggctcaccaaagcggacatcccgacgctcgagcgcgccctggtgagcttggagcacgacgaccaggcgtggctcggcttcaaggtggttaccgacccggcggcctgcacgagcgacgaccccggcgacgaggacacgcccatcagctccgactggggcccttccgaagacgggcaatcgtgcatcttctttgccaacgagggcaaggacatcgtctgctcgcgcccctggaacaagcgcgaccggttccagatgctcgacatcacgcgcggcccgagcatgcacaaagaccagtttgccggcgtgacctgggtctcgaccccgttgttcgccacccagcgcgtcgtcatctacggggcaggagacgtgagcgtcgcgctcgcccgctacgcgcgcgactgcgggttcgacacgctcgtcgtcgacgatgatgcgagcttcctgtccgaggagcgcttcgcgacaagcgagcgcgtcttgctttcggaggattggagcgacctgcccgagaaggtcgagctcaccgaaaacgactactgcgtctgcgtcagccgcgggcacgtccacgacgtgtccacggtcgccttcagcgtgaaatcgcctgctgcctacgtcggcatgatggggcaccccgccaagaacaaggacgtcttcgacaagctcgtcgcccacggggtcgacgaggaggcgctcaagggcgtgcacgcccccatcggcatcaagattgccgacaagaccccggcagaaatcgcgatcagcatcatcgccgagctcatcgacgtccgcggcaaggcgcgcaagcaggctgctgccaacgtcgcggcgctcgtgagcgaccaggcagccagcaaccgatagacaacgcgagagaaagaagaccatgggcaagctcgacacgatagagaccattgccgcgaaggtatcggacacgtccattgtgacgacacccaagcgctgctcgtacatccgcaactggaactcgaagtgcaagcagtgcctgaacgtgtgccagcacgaggcgatcagccgctcgatcgggcacctcaagatcgatccgaacgcctgcaccaactgtggggcgtgcgtggcggcttgcccgaccagcaccttcaacacgacggcgccgagcatgaacgagcttgtgcggcaggcgcgcatctcggcgcagcgcaacgacggcattgcagtgttctgctgcacgcctcacgcggtgacgaagcacatcaacaccgaaaacgccgtcgtgctcccctgcctcaactacctcgacgagtacctgatcatcgggttgttcgcgatgggcatccatacggtgcgcatcctccatatcgactgcaccgggtgcaagaccgactgctcggagccttatacggacacgatgctggagagtacgagaaacctcatgcgcctgtggaagatcccggggacgctcgacgtgctcgacttcgtgccaacgcagctcaagctggaggcgagcgggcacaagggcagctcgatcacatctgaccgcaggggcgccttcaaacaggcgggcggttcgcttctcggcatgatcatggacgccgtcgacgacacggtaggcaaggtcaccggcgagcaaaagcccaaggaagacccggacaagcaggtcatcgtgcggatggacgaggtctttccgcccgacagctaccgcagcgtgcgcttgctgcacatgctcgaccacctgggcaagcgcccatacggctcgactatcgacacgcgcttttgggcgacggtctccatcgacccgaacaagtgccgctattgcggggcctgctcgaacatgtgcgtgacgcgtgcgctcaagtacagcacggacgagcaggggctcgcgacgctcacgttccagccgtcgctatgcatcgggtgcggactatgcaaggactcgtgcctcacgcgttcgctcgtctacaccacgaaagtgctcgccgacgacctcgacgccgacacggtcaagtatctctacgaggaccacgagcagcccaagcgtcgcaacagcttcttcagctagtgtggcagtgccactcttttcgtgcagctcacgcgggatgtgtggcactaccacgtttcccgtgcgttttgcagcaaacgcgtggcactgccacgtttctcgcgcaggaagcgtaggggatatggcaaggccacgattcccgcgtgcgagaaccgtggccaaacgccagctgtctattccccctaccccagatccagcgagctcacctcgcggacgtggtctttctcggtataggagaccgttaccgtcgtgccactcgtgacaaatggcaggttctcgttcaccttgaccgtcgccgtgtaaatgctcgaatcatccttgagcttgaagtagtacaccgtgtttccgtccacgacgacgctttggatcgcatcgactgtgccggtaatcgtcgggacgtcggtcgccttcgcgatctccgacgcgttcacgtctacctggtcgtccttggcaagtgcggtgatgtagtttttctgagcctcgctaaccgtgctgcccgttccgacgatctggtactgctgcacgtcgatgaaggcgtacatcttgacgagccccgcactgtccttgagcgacaagaagtacgtcggcctgtcggcaatgttcagcagcaacggagacgtcgccttgtacgacatctgctgcacctgtccctcggcagacgacatcgccgaagattcggtcgcaccggcgcaggtgtagtacttggtctgtttcgtacgaaggttgacgagcgtgaagccgacgagcgattcgtcgctgtttgccgaggtcatgcccgtgtacatgtacacgtcgtcgttgatggcgaggtagttgtagccgctggtcgagct

SEQ ID NO: 3309 - DNA, 7664 bp, Unknown
  16S sequences of unknown bacteria
tagtagacaggagacagtcacaatgaataaaacccgcccttttggccgaggggtgcgcctcggaatatatcagcgacggcgttaacggctattttgccgaagccgcgcccgagtccatggccgaaaaaataaaggaaatctttgcttcgggaaagcttaaagaggttgggaatgttgccaaaaacaccctccccgtaagctgggacgaaattgtcagagaggtaaatacgagatacaaaaaggcggccaaggagcttagaaagtgcaactgaccgcagatattcgccatttaatttcagaggtgtgtttttttgtctgacagatttttcagaagaacctgggcgcaggtcgaccttgacgcccttataaacaactataaagtgttgagagaggccgtcccgaaaagcgcggggattatgggaatagtcaaggccgacgcctacggccacggggtggagatggtttccaaaaccctgtccgagctcggagtttccatgttcggcgtttcatctatttccgaggccgagcagctccgcgacttcggcataaccgagccgattctcattttgggctacaccccctgcgagcttgcgggggagcttgcctcaaacgacataacccaaactgtttacagcctttcctttgcaaaggctctttcgaaaagcgccgtcaaacagggcgttaaaataaagtgccacataaagcttgacgtgggcatgggtcgactcggctttcttgccaaaaacgacggatgtatcgacgaaattgccgaaacggctgcccttgaggggcttgagataacgggaattttcacccatttcccatcggccgacttcgacggcgaccgaagcggagacataacaagggctcaggcaaggctgtttgtcgaccgctgcaccgcccttgaaaaacggggcatacattttgaaaccaagcattgctgcaattcggcgggttcgctgacggtgggacgggattttgccgccctcgactgcgtccgcgagggcataactctctacggactgtgtccctcggccgcccttaaaaatgcggcggcgctaaaacccgtcatgtcgcttaaaaccgtggtttccatggtcaaaacggtggaaaagggcgataccgtgagctacggaatgaccttcacggcgcaaaaaaccatgagacttgccaccgtctgtatcggctatgccgacggctatccccgccgcctttcctccaagggatatatgctcataaagggcaaaaaggctccgattgtcggcagggtgtgcatggatcagctcatgctcgacgtttcggacatagatgacgtaaaggtcggcgatgaggtgaccgttttcggcaaaagcggaaatgccgagctgtcggttgacgaggtcgccgcggccgccgacaccataaattacgagcttgtgtgcattttgggcaagcgcgtaccgagagttttcattcgcgacggcaaggttttgaccgtcaccgactatatttgcaaccgctgaaaacagggggaaacaaaaatgactcaaggatttttcgacatgggattttcaacactgtcccgcgcggcggggcgctgccgctatcttcccaaaggaagccccgtcgattttggttccgatattaaaagcccgtcgccgaccgaggtttctttggccggagaatgggctttttgcctttttgagggggaaaaggcggtgtcggaaaaatattttgaggaggatttcgactgctcccgccttgaaaagaccgagcttccccgcctttttgaaaagcgccgccaaactcccttctgctttcccgaccttccctccgccgaaccctgcgccctctttttaaaggacgtggagctcgacttttccggccggaaaacctatcttgcctttgagggctttttgggggaaatgagggtctttataaacggcagtcccgccgccgtgtgcgacggaacgggtcatttgaccgagtttgaggtcacgagatttttaaagccgggcaaaaaccgtgtggcgattttgctttgctcttcgtcaaaaacgggctttttcctggaaagaggtgcccaaagcttcggaattttcgcccccttttattttctttcccgctcaaagggtcacatttgtgatttgaccctttcggccgagcctgacgacggattttttgagggcagcctttctgtccgcgccttcggggaattcatcgacggcggaaaatgcaccctttatgacacaaagggcgagcgggtgagcgccgccgatttctccgaggatggcaccgccgatcttaaggtcgcccgcccccgtatctggtcggacgaacagcccgagctttacattctcgaggccgagatatgcggcgaatatatatataaatatgtgggctttaaacggcttgacagcgacatgaccgaggggctccgccttaacggaagaagatttcgcttttgcggcggagtttacgaccccttcggcaaaaccgccgagcagataaaggccgatattgtcaccttaaagcaaaatcacgtcaattctattattttaaagggaaacggcgactgcgacagggtgctgtccctttgtgacaaatacggtattctcgtcattgccgacgtcggggtgagcgccgacgcatttaaggcggcgggagattttcgaattttttccgacggaacccttttcccccttgtcgaaggcataataaccgagagggtaaccgcccttcgcagccacacctgccttgcaggctttgcctttttaagcttttgcggcgagggcaaaaatcttttcgacgcaatttcccttgtcaaatccctttgcccccttccggttttctatgccggcgaccccgccgacacggtgcgcacttcgggatatgacagccgccccgacatctttgtctgcccgccttcgctgtcggttttcgacgaccccttcgccggcaaaaagcctgccgttgcggcgggaggccttgtaaaaagcgacgacatacgccttttcggctgctttgtcgaaaacccctttgattgccttttcgacatcaaaaatttcctgcccttcttcaaggtggaggaaatcgacgcctcgtcgggggatttttacataacgaatctattttccttcagctttctttcgcatctcgagtgctcctttgaggtcacatcgaggggaaaggtgacggccgagggctttgtgggggcgctgcccctttctcccggcaggtgcgagaaaattcatctggatttcgacctgcccgagggggacgaaaatttcattcgctttgagtttaaaaggctcggggactgcaaatgggcgaaggacggtttttccgaaggctcggtgcagtttgccctgccctcccgtccccgaaaaacgccgcccgagaccgacggcgacggcctttcggtgaaaaatgaggacggaaaaatctttataaagggaaaacgcttcaactatgtcttttccgaggttttcggccgctttgaaagcatggaattcgaccgaaaaaagctgaccgacggcgccgccgagcttaagtttgaatgtgaaaaagctcttttccccgccttttgcggttgtgatttttccatggacgggaaaaccgccgtgctttgctgcaaatatgtttacatggccgaaaaatcggcaaaaaaagagaccctaacggcggtttggtgcgtttttcccgacggtcgggtgacactcgactgctcaattcccgcgggggactttgaaatttcccgtttcggccttgaaatccctcttaaaaataccgactttacctatttcggaatgggaaagaggtcgggctataacggaattttcaaaaccgagggaagcgccgagcgcagcgtgcgaagctgtcttttcgacaaaaacgacagagggctttgcgccttttgcgccgaccgcatgacggttcaaacgagcgaaaaaaccgcctttttccgctgcggagacggtcggggcgagctttcgctgaccctttgccccgacagggagcacaggcttatttttgaataaaaggtgattaaatgtttaatatagttctggtcgagccggaaataccccaaaacaccggcaacatcgcccgtacctgcgccgcgacaggctctcggcttcatcttgtcgagcccctcggctttaaaatcgacgataaaaaattaaaacgggcggggcttgattattggtggctgctcgacataaactattataagaatctcgacgaatttttcgaaaagaacaagggacggtttttcttcttttccaccaaggcgacgaaaaaccattgccaggtcgaatataaggatggggactatctcgttttcggcaaggaaacaaagggcctccccgaaaagctgctttttgagcacaaggacagctgcgttcgccttcccatggtggacgacgcaagaagtctcaacctttcgaattcggtggcggtgggagtttacgaggcgctgcgccagacgggctttgagagccttaagcaggcgggcagccttcgggaatacgagtggtaaagccgttttcgccgtttaaccctttgctttgattttagggaggaagcatgaaaaaatatatttcaaccgaaaatcttctcagtttgcttgcctttttctgcgggagcctgctttattccctgtcggtcaatgttttcaccctgcccaaccgcattgcccccggcgggctgacaggcgtttcgacccttataaattatgtgaccggctttcctgtcggtacggcggtcattttgatgaacttgccgctatttttcttcggtgccaaggtgctcgggcgggactttcttttaaaaaccgtcgccgccacactcatttcctcggcggttatagacgtgcttgccccctttgtgccgaaatacagcggcgaccccatgcttgctgccatatacggcggagtgctgtcgggagcgggcatggcgctgattttcgtccgcgggggaaccacgggcggcaccgacattctcgcaaagcttataaagcacgcctttccccatatttcgctggggcatataattctcgctcttgacgccgtcattctcgccggggcggcgatcgtttacaaaagcgtcgacagcgccctttatgccataatcgtcattttcgtttccaccacaataatcgaccgctcgctctacggggcgggaagcggcaaggtggtctacgtcttttcgagaaaggccgacgaaatcgcaaaaagcataaccgtcgagctgtgccgcggcgccaccctccttaaaaccaccggcgcctattcgggtgacgaccgcagggtggtcatgtgcgccgttagaaagcatgaggttttccgtcttaaaaagattattatacaaatcgaccccaccgcctttgtcattgtgggcgacgtgggtcaggtcatgggcaacggattcaattcgcttaaaaacagcgactgaacaggagaagagtatgaacgacaaaattttcggcgccggccttttcggtatcgacgccttcgccgcagaggtcgagacctacatttccgagggacttcccaaattcgacattgtggggcttcccgactcggcggtcagagaatcgagagatcgggtgcgcgcggcgctgaccaactgcggattttccttcccgccctcccgcataaccgtcaatctcgctcccgccgacataaaaaagtcgggagtgctttacgatttgccgatacttttgtcggttcttgcaaaaagcggtcagcttaacgccgatttcgacggtcttatgtttgtgggcgagctgtcgctgtcgggggagatacgccctgcggcgggtgtgcttcccatggtcataaaggcgcgggagctgggctttaaaggcattttcattcccgaaaagaacgctcccgagggagccgttgtggagggaatagaggtttatcccgcgaaaaacgtgctgaatgtcgtggatcacctcaccgggttttcaaaaatcccgcccgcctctcccgaggactatccgccgtcggttcccgttcatttccccgatttttccgaggtctgcggccaggaggcggccaaaagagccctcgaggtggcggcggcggggggacacaacgtgctgcttatcggccctcccggctcgggcaaaagtatgcttgcaaagagacttccgggaattcttcccgacatgacctttgaggagtcgatagaaaccaccaaaatccattccattgccggggctcttcccgacaatgtgggtcttataagaacccgccccttccgctctccccaccacaatgtttcggcggtggcgcttgcggggggcggcaccttcccgaaaccgggagaggtctcccttgcacacaacggcgtgctttttctggacgagctccccgagttttcccgctcggcgatggaggtgctccgtcagccccttgaggataaaaaggttgtgatttcccgttcggcggcctcggtggcctacccctgcgagataatgcttgtggcggccatgaatccctgcccctgcggcaatttcggccacccgaaaaagaaatgcacctgttcggcaaaatcggtgtcgaaatacctcgggcgggtgagcggaccgctgctcgaccgtatagacatacatatcgaggttcctcccgtggagttcgacgagctgaccgacagccgcaaggccgagccctcaagcgcgatcagagagcgggtcaacgaggccagaaaaattcagcaaaaccgctttaagggactgcccttttcctgcaacgcctccataacccccgacgtgctgcccgaggcctgccaaatgaccgatcgggcgagaaatatgctggaggtggcctttaaccgcctcggcctttcggcgagagcctatgaccgcatactcaaggtggcgagaacggtggccgatcttcagtcgtcttcggttatcgaccaaaatcacatcatggaggccatacagtatcgctctcttgacagaaagtattggaattcctgaaccgctttttgccaccgaccgtcattttgctccgaaaaggcggcagacggcggatttaagcgattcataaatctccaccgccttgaattttaccttatatcggtctcctcccgacacaagctcggcgccgccgtcgcttaaaatttcctcgaccctttcgccgtccgacgcaacctcgcagccggccgaaacgcacatgggcggaaacatgacgcaccaccaatttttcccctcgccccggccgataaccacccgcagcgcctcatattccccggcggggagggtgataccgtcgtattttcttgtggaaaaatccgcctgcccgagggtgacgcaaacgccgtcgccgcagccgttcttttcaagctcgtcccgcgccgcgtcggtaagataggggagattttctcttatgatttgctcggcctgctccttggtttccgcgttcccgagaaaaagccgcccctccttaagcagtcggtcgcgcaccttgattttaagctgctggtcggcgggcgaatcggaatttgccacaatgtgaagccgcagcagattttccctgatttcccccgaaagggcgttgagagaaagggcctcaaaggccagagcggcgcaaagcccaagcaaaagcgcggcggtaaaaagccgctcctgctcgccctgcgcgaccacatcgtcatatgagccggtgtag

SEQ ID NO: 3310 - DNA, 12756 bp, Unknown
  16S sequences of unknown bacteria
tcagacggcagccgccgcacattcccgttccgtctatcattatcgggttcatggaaaccgtgcacgggatccccgtcggcttggttgcggcaacgacgaatttcatcattataagggaacctatcgttataacttcgtcaaacttttcgcccgcttcaaacatttcgttcagaggaacgcagacattgccttggcggccgtatgaaccgtcatccgtcataacgacaagtttttcggatgccgcgcgaaattcatcttcaagaatcaaaaggtctttggagcggaaaccgatgattgcggtaacgtcgcagcctgccgcgtgaagttcttccgctatgggcagcgcgattgcgcagccgacaccgccgccgacgatacatacctttttcagtccgtcaacttttgtggggacgccgaggggtcccacaaagtcctgaatatactcaccctcgtttttatgattgagttttgcggttgttgcgccgacaatttgaaaaattatttttatcgttccgcgtgcacggtcataacccgcaacggtgagcggaattctttcgccgtcctcatcgacacggagaatgatgaactgtcccggctttgcctttgcggcaacaagaggggcttctatctccataagtgtaacggtgggattgaggcttttctttgttactattttatacataaaagcattcctttccgcaaaatcggcagaattgcgatattgcacggataatacagcaacggttaaaccgccgctgttttcggtataaataataccacttttaacttgctttttcaacaaacaaattgtatgaattcatcaaaaacatagggctgtaaaaaaacgtaggtttttttacagcccttccggggataggaaaaaatgttcagaatgagtgaatcgaacccgaaggcgtacataggtacgtcgagaggtgagattcgcttatagcaaaaaggcacttttcactttttgcaatttaaaatgtttaaaactgccgttcagtgtgaatactcttctcttttatattgccttattatacattttcagcctttttgcggtccgggcatttttaacatcccctactgaacacgaatcagaaatcaacttcggtgtcgtagtagcagcacttgagaagtttttccatttcttcctggctgggctgacgggggttggagcctgtgcaggcgtctgcaatggcgttctttgcgatttcgggaagacgctcaaggaatacgttctcgggaacgaagccgttctcggtcggatagctgtccgcgccgtagttcttgatgcagtgaggaatattcaactcatcgttcatatgacgcaggtatttgataagttccgcaaccttttcatcgtcggaagcgttcttgtcgcagatacccatatagtcaacgataacaccgtaacgtttctttgcggtttcgtcttttgcgttgaatgcgataaccttgggcagatacatcgcgttagccgcgccatgaatgatatgcgcgccgtagtcggcaaatgcggcaccggtcttgtgcgccatggagtgaacgataccgagcagagcgttggagaatgccatacctgcaaggcactgtgcattgtgcatacggtcacgggcgtccatatcgccgttgtaagacgggataaggtcgttcatgatcatctcaatcgcatggatcgcgagaggatcggtataatcgcagtttgcggtggaaacgtatgcttcaacagcgtgcgtcatagcgtccataccggtgtgagcaacgagtttctgcggcatagtgtgcgcaagttcggggtcaacaatagccacatcgggagtgatctcaaagtccgcaatgggatatttgatacccttgtggtaatcggttatgatagagaatgcggtaacttcggtagccgtgccggaagtcgaagaaatagcgcagaaatgagccttgcggcgaagtttgggaataccgaacaccttgcacatatcttcaaatgtaagttcgggatactcgtattttatccacatcgcttttgcggcatctatcggagaaccgccgccgatagcaacgatccagtcgggctggaatttttccatagtttctgcgccgcgcataacggtttctacggacgggtcgggttcgataccttcaaaaagttgaacttccatacccgcttctttcaaataagaaacgactttgtcaaggaagccgaagcgtttcatgcttccgccgcctgtgcatacaatagcgcgtttgccttcaaatgttttaagcgcctccaaagcatctttgccgtgatagacgtctctgggtaatgtaaatcttgccatttcaattgcctccgttttgatattcctgtttatagtcggaattttttttctgattgtattatatcatacttttttcaaaaacacaaaggcgaatgttgcatacctgttatataatcgaaaatataacgttacaaacgtcgaatttttcgtcacatttccgtactgtttgcaagacaaatacacattacggagaacaaatattcaaacattgatttttccgcagaataaacacaaaaaaagcaagttgtgaacttgcttttcacgatataatatatgttatcatttttgtaataccccgctgaaaagggttttggaaatttctgcaaaacaattaaatcacggcaggcacagcctcatacggtgtttcgacagtgtaaaaaaacagtcaaaaaggttacgataccttttttgttaccctttccctgttattttcccttatgcgctcggtcaatgacaacggcgcggaacgtcgtttcatctgttccgtaaaacagcttgtatacgcaataaatatcaagaatatatagggcattccgagatttgtttcaagaagagagttgacgataagcggagcgaatttttcggagagagcaaagcctgcggaacgtatgccgccgataagaaggcccgcttcccaaccgaactggacaagcactccgattgcaagaagccacgggatattcacccgtttttcccgttctttctgccacagattatagattataagtccgagataacccacgacaaggatcgcagccatataaccgtgatattcgcccgtcgtgcgctgaatcactatgttttcaacatttgcgggagcaaaggtttttgtaagcagagggcagacgaaccaccacatcaggataagaaaagaccattcaaaaagatgcttgtcttttgaaatccacagccatatccatgcgaaatttgtaaagccgtaactcatcgacatccaaagcaagacccaaaacaggctgtaaccgtcggaaatgcttcgggagttgcatacaagatgaaaaatgccgaaatcgacaatcatatacagcaatcccgcaagaaaaccgacaagcacggtcatgtatttctttttccacaacagcaacgccgcaaaaaccgccaaaaaggctatatcaaaaatgatataatacggagaaaactctttccgtgcgattatttcggtcatatatctatccctccgacaagactgaatacagtatatcagatattctgtcggatttcaagatgttttaattttttaccgctgcaaaaaaacaatccccgcactccttttgggaagtgcgggggttaccatgtcaaaaattacatcaacttgcggaaaagttctttcaggtcttcaacgtttgtttctttcgggttacccgggcggcaagcgtctgcataagcggactgtgcgaggaagtcaagatcttcttctttgagtgccgaaagtttggtcggaatgccgacatctacggaaagttgacgaactgcgtcaacggcggcttttctgtaagcctgctgatccattcccgtggtgtccacgcccatagcctcggcgatatacttgaacttatcaccggtggtctccgcattatattccataactatgggaagcatcattgcgcaggcaacaccgtgcggggtgtcgtaaacggcgccgagagtgtgagccatggagtgcgcgataccgagtccgacattggaaaatgccataccggtaacaaactgtccgagagccatcccctctctgccgtctttgtcattattgacagcgccgcgcaggctctttgcgataagtcttatcgcttcaaggttcaggcaatcggcaagttcccatgccgcttttgtggtgtaaccctctattgcgtgcgtcagggcgtccataccggtcgaagcggtcaagcccttgggcatcgtagccatcatatcggggtcaacgacagcgacatcgggaatatcgtttgtgtcaacgcaaacgaactttctcttgcgctcaacatctgttataacatagttgattgtcgcttccgcagcagttcccgcagttgtcggaacggctattgtgaaaacggttctgttcttggtcggagcaactccttcaagactgcggacatcttcaaattcggggttgttgataatgataccgatagccttgcccgtatccatcgacgagccgccgcctatcgttatcatgtaatccgcacccgacgctttgtaagccgcaacgccgctcttgacgttttcgatggtcgggttgggttttatgtcggaataaacctcatacgccatgcccgcttcgtcaagcaggtcagtcaccttcttggtaactccgaatttaacaagatcggggtcagacgcaataaatgcttttttgaaacctttggcggaaacgattcccggaatctcctttatcgccccgttgccgtgataagaaactgcgttcaatacaaaacgatttaccataacaaattacctccggtcataccgaaaattttatttacaactgcattatatcttattgtgaaaaaattgtcaacggaaatacgcgaacaataaagacggaacttgtgaacaaaaatataaaatatttgtgtcaaaatatctaacggatgtttcggcgaatatgctgcattttccacggcaacaatatacaaagaatgaaaagaggtaaacataatgaactatttatggactgacgaagccgaacaatttcggcataaaacgcttgaaaaagatatttcgacggacgtttgcattatcggcggcggcatcgcgggaatcatgtgcgcggcaaaaatgacggaactcggcatagacaatgttgtgcttgaatcaaaacagataggacgcggcataacaaagggcacaacggcggtgctgaccgcacaacacgatactttatataaagatattatcaaaaaatacggacttgaaaaggcaacgcaatactacaacgcaaacatcagtgcattgcaccgcatcgaagaaaaagcaaagactgtcgaatgcgattttgaaaaaatgccctcgataatgtattccgtcggcggaaacgacggattgagagatgaagcgttggcattgaaatatctcggggtaaaagcgagatacacaaagtcgcccgaattaccgtttcgggtagcagacgcgatagaatacgaagaagcggcgcagttccacccgctgcgctttcttaacggagttgcggcagggttaaatatttatgagaaaacatttgtccgcaaacttgaaggcacaatggcgttcacggataaaggcaaagtaaaagcaaaaaaggtcatagtcgcaacacacttccctttcatcaaccgttacggactgtattttatgaaaatgtatcagaaacgctcgtatgtcatagcatattcgggcgcaccgaacttcaattgcacggcagaggacgcgggcaacggattttatttcagaaattacaaagacctgctcctgataggaggcggcgaccaccgaacggggaaacaaggcggcggataccgtgcggttgaaaacttcgcaaagcgttggtttccgaaagcaaaagagcaataccgttggtccaatcaggactgcgtgacgcttgacagcataccgtatatcggcagatacagcccctcgatgccgaatgtatatgtcgccacgggttttaatctttggggaatgacaacatctgttgcggcggcggaaatattggcggacatgataacaggaaaaaagaatgtgaatgctcccgtttttgcgcccgacagaaatatgttatgtgcaaaactgtttgaaaacatgggaataacggttgcggatatgctgtttccgacaacaaaaagatgtcctcacctcggctgcgcactgcgaaagaacaaggcagagcacagttgggactgcccgtgccacgggtcgcggtttgacaaaaaagggaaacttattgaaaaccccgctatgagggacgccgatgtttgataaaagatttgagggttggtattacaagcaaagcaacggagacataacggttgcgtttattcccggcgaagccgacgacggcgcttttgttcaggttataaccgattcggggtcacacatattccgaaccgaaaaattaaaaatcaaaggagataccgtcaaaacgggaaattgttttttttctccgtcggggataaaagtcagattgcccgagatagacgccgacctgcgatacacaaagaccacacccctgcgttccgacattatgggaccgtttgcaaaacttccgatgcaatgcaggcacggagttgtaagtatgaggcacacggtcaacggaacattgacaatgtacggaaaaatttatattttcaaaaacggtatcggatatgcggaaaaagacagcggacgctcttttccgaaatcgtatatgtgggttcagtgcaatgaatttgacgcgccgtgttcgtttatgctcgcgatagcgcacattccgtttcttataacatcgttcaaaggttgtatctgtgcagttgtatacaaggaaaaagaataccgtttcgcgacatacaaaggcgttatgtcaaaaatcaaaaaagacagaatatatctgaaacagggggcgcttgaacttgaaatttatctgcgaaagcataacggcggacacccgctcaaagcaccgttaaaagggcagatgtcgcaaaccgtaagagaaacgacgaacgcaggtataaggcttgtgttaaaagagcacgggaagatactcgttgactgtaaaagcgacagagcggcatttgaattaagaaaaaattaaagacaaatatcctctgcacgacggttttcgccttgcagaggatatttttttgtctatatgaaattattctgtttcatcacagggttcgcaatctcccgcaacgatgtttttcagaataaactcgttgccctgtttaagatatgttctgtcgctgccgcaatacgggcatattttgccgtgttcgaccgtgccgtacactttgccgcaattctcgcagaaagtctcggcttttatctgctcaatgcgcagttccgcgtctttcatcacggtttctttcgagaccgcccatttccagcagtcaagcaaataatcgggaatgacgcttgaaacctcgccgagttctatcgtaacggcggaaacgcgtgaaacaccgttttcctccgcgatacggttaacgctttttataacatgaaaaacaactccgagttcgtgcatattattttccctgttgttggcgtttgacctgtttgcccacattgttgcggttgccaagaatcttgaagccgcgttttaccgcatacggaagcagcgcgccgactttcttttcggcaacgcacatcgtgcttgcctgcggcatatcgcgatgaagtcttattgcgtcaaacgcgcatttcgtggtacaaataccgcagccgatacatttattcgggtcaactattgacgcaccgcagccgagacagcgggaagtttctatcttcacctgttcttcggtaagcgttccgtgattgtcctcaaacgactttgaatcaagagacgtatcgaccggcgcaaactgtctggaagcgttgtcgtaattctcaaccttgatattgtccgtatcgagcatcgcgaactccctgcggtttctgccaatggtcatatgaccgtgctgaacgtatctgtgcaggctttccgccgcttcgtgtccctgtgcaatggcatctattgcgaatttcggaccggtgaagacgtcgccgccgacaaatatatcgggttcggcagtctgatacgtcagtttgtccgcagacggataatttcccctgccgagttcgactttgctgcctttgagaaggtcgccccaaacaacggcttgacctattgcaaagattacgttctctgcgggaatttcaattgtcatcgaatcgtcgtatacgggagcgaagcgtttgttttcatcaaatacggaaacgcactttctgaattcaacggcagtcgcaaccccgttttcgcagataacgcgaacgggtccccagccgtttttgatttctacgccgtcagcttgcgcttcttcaacttcctctttcgacgcgggcatttcgtctctgccttcaagacagagcatcgtcacgctttctgcgccgcttcttgcggaaactcttgcagcatctatcgcaacgttaccgccgccgacaacgaccgttctgccttcgactttgcgtccgccgcagtttgccgttttcaggaactcgaccgctgtcgtgacgttcggcgcgttttctccgtcaagaccgagcaatttgccgccctgacagcctatcgcgatataaaacgccttatagccctgctcgcgaagttcgtcaagcgttacgtcattgccgacatcgacgccgagttttatctcaacgcccatttcgcgcattatatctatttcagcgtcaatgacgttctttgcaagtttatatgacgggattccgtaagtcaacataccgcccgcgcgctcgtttttctcgaacacggtcggataatatcctttttgcgccagatagaacgcgcaggaaagacctgcgggaccgccgccgataacggcgatcttctccgtccatctgcctttgttggaagcgaccactatctcgggaacaaagcgatgttccgcgttcaagtcctgttcggcaatgaatttcttcacggcgtctatggaaaccgcttcgtcaacagttcctcttgtgcaggcgtcttcgcaacggcggttacatattccgccgcagaccgcggggaacggattttcacgttttatgagttcaagagcctcacggtatttgccctgcgccgcttttttcaaatagccctgaactgcaatatgtgcgggacaggcggctttgcagggagatgttccggtttcatgcgtatttatgcggtttttgtcgcgataatcctcagaccacatatgctcgccccaactgttgttgtcgggcagcggctgacggggatattcgacttccgaaccgtcggcacgacagagtttctgaccgagttttacagcgcctgcggggcagtattcgacacagcgaccgcaagcgacgcagttatctttgtcaacgtgcgcaacataggcggaacgcgacatattcggagtattgaaaagttgagaagtacggagcgcgttacagatatttacgttgcagttgcagattgcgaaaatcttgccctcgccgtcgatattcgttatctgatgaacaaatccgttgtcctcggcgcgtttaagtatctccatcgcttcttcgtatgtaatgtctctgcccttgcccgtctcacggcaataatcagccatgtcgccgacaccgatacaccaaagttcggggtcgtccgcacagccctcgtcaagcagttttctgccgtaacggcatgaacacatacttgcgccgatatgtccctcatatcgtttgagccaataagaaatatgttcgatatctatggactcattttccattgaaatggctttttcgacgggaatgacgtgcattccgacaccggcacctccgggaggaaccatagccgtaacgtgttcaagaggcaggaacgtcatgcgttcaaagaacatcgcaagttcgggatgtctgtccataagccccttgttcatgttcgtatactccgcagaaccgggaacaaagagaggtatccaatactccctgttttccttttcacgcttcgtatcgggcaaaggaccgtcctttgtatatctgtcgccgtaatcgtattccagcataccgagaacgccgagtttgtcaagaagcgcgtctaattttgcttttgatgtttcgtccgtcgcttttgccattgactgcatctgcggatatgtatacttcttacgcaacttcatttcaagcattaaatcaagagccgcttcggactcttcttttgtcagttcgtcctcaaaaatgcaggcaaagccccaatattcggggtcttcggtcgttattccctttatttttgcgggaatcctgtcggttatcttgcgaacaagttttataagcttcgggttcggatttttgtcgccataatgtttcggcgtatattttttactgatttccggcattgtcccgctccttttcagttcgttgttccgttatttttccacgcttcggtctgcaccgtcagccattcggcaacggcgtctattccctctcctgttttcgcacagacagggaaaacccttgcgttcgggttgcgcatttttatattctctttgcatttttcgatgtcaaaatcaaaataaggcgcaacgtcgatcttatttatcacaacagcatcgcaaaccgtaaaaataagcggatatttcaaaggtttatcgtcaccctcgggaacagacaatatcatgatgtttttgactgcgcccgtgtcaaactccgcaggacagacaaggttgcccacattttcaaggataacaaggtcaaggtcgtccactccgagttcggtgagtccctgtcttgtcatatcggcgtcaagatggcacattccgcccgtatgcaactgaatagacttaacacccgtttttgctattgtttttgcgtcaacatcgccgtcaatatccgcttccataacgccgacacggtacttttcttttatcatcggaataagttttgtcaaggtcgttgtcttgccgcttcccgggcttgacatcaaattgagcagaaacacgcctttatctcgaagagacgagcgcagacgctccgcgtccttgtcgttgtcttcgaatatgctctgttttatctcgattattctgacttcgtccatttttaactcctataattatatttatatatagatagtaacataatcggacacctttgtcaatattcgaaacgacatttttcgtcagaataattttacattttcgtatgaattccgcagccgcaacaagccatacatattcaaatatgaaccgacgtttgactttacatactataataaaactcagccgaatacagaaattatatcagttcaaaaaaacaagccgaaatgtatgaaaatttggtttttgtgttaaaaaagtattgactcaatgtatattatgtgatataataacagtaataaaaaacaggaggttcacaaaatgaacgaccagattcaacaggaacagactcaacagacatcgaccgcgcccgtaggacagttgaaaacaaataaaagccttgtcaaattcatattgctttcactgataactttcggtatctacggaatcgttattctgtcttccgtaagcaatgacatcaacatcattgcaagcagatatgacggaaaaagaacaatgcattactgcctgctttgcttccttgtcggaaacatcacgttcggtatcggatatattgtttggtatcacaaaatatccaacagaatcggagccgaacttaacagaagaggcataaattacagtttcggcgcaaaagattattggctttggaacgttctcggttcacttataatagtaggtccgttcatttatatcaacaaactgcttaaagcaacaaacctcctctgcgaaaactacaacatcaacggctgattttcacagacttaataaaaaatcaatccacctgcttaacggcaggtggatttttgcaatgactacactcttacagatcttgcccatttgacaaagtattgctcatagtcggcatactccgatgatttgcacgcaaactgaactatccagaaagcgtccgtacccttatacaaagagacaaaatatgtgaaattcgtttttttcgcttcaatatatgattcataacgcaatacggtcagtccgtcaaaagagttatcctctttcggtgaatactttgaattcgcatccaacacatatcccttataatcatcaagagtaacattgtcaagccccgcattttcaaacacttcaaagttctctttaagggcataaacggcgacatcaaaagaatcgtagcaaagtgtgtatccctcaatctctgctgttctgaaattgtctgtgagagtaatggtcagtccctcgcccgaaaattctttgtccgaaccgctctttgccgaaagaagagaacaaccgcaaagaacagaaacaagaacacaaatcaaaacaaatgccgaaataacctttttcattttcatatatccttttcttttaatattacaaacaggtagagcagcggtctccaaaaccgcgtgccgcacatagagacaaaaagaggaataacaatccctaagcgaaacaaaaaaatgctctgctgccgaactctaatcagaccgcatatacgcaaagtctaaaagcatatagcgcgaaaatcatcgcggacaaaacattacaaagataacaccataaaaaaactgtaaagcaaaagagcgatccgaagatcgctctttgaaaaagaaaggtgtcggcatcgccctattttcccgggccgcttccagccaagtatcttcagcacc

SEQ ID NO: 3311 - DNA, 3409 bp, Unknown
  16S sequences of unknown bacteria
accgtttttgtacggttctagtataccacaccaagcggcactctgcaaagcaaagggaaaaatacaaatcgtattttttatgcatgaaatcggtaccatatcgtatttgtgagttgatttttaatcaattctgaaagatactctctgtttatgtcattaaaattttatcggcttgacgttaatatctagattgattcttgccgcattcaaagaaattccaatgcagacgctacggtcctcccggcaaagccaaaagaaaaagagcctgcactttccgcgtgcaagctcttctctctatgccggtccggctgttctgcgctcggcttttcctttagccgatcagggtctgatagcgccgttccagcacctcaaattgtgcaccgtccacaggcacagtcacgagaaactccatctttcccttctcgtttttcgcgctgtgaacaggaatcgaactgcggatgccttctgcatacagcatccgcaggcacatcccgagttgatgatccgattttgccagcagttcatgagccattctgctcacctccttcataatggaaaacgaatttttcgcgtccaggtcacggacattgtctagttcctagactatcagatgccaatggtctttgcaaccatcgaaacgacgtgtgcaacaccattataacccaacaaaaaaggagccgccctctcagcctagccaagagaacagctccagaaatgcaatgcaggaaatcagatagaaatggtgttgcagacgtcgatcagaaccgggtcgagggtcttggtcatttcgagtgcctcatccaccgggtagtccaccagcttctcgcccttcatgccgacgatgcggttgtacttgccctgctccagcaggcacacggcctggtagcccatggcggatgcgttcacgcggtcacgcagcgtgggagagccgccgcgctggacatggcccagaatggtggcacgggagtcgatgccggtgcgggcctggatctcgtttgcgatctcctgtgcgtggcccacgccctcggcaacgatgatgatgaagtgacgcttgccggtcttctgagtctcagcgatcttatccagaatgtcgtgctgcatgtcgaattccttctccggcagtagaacagccatagcgccggaagcaattgcaacattcagagcaatataaccggcgttgcggcccatgacctcgaccacactgcagcggtcgtggctctgggtggtatcgcgcagcttgtcgatcatctccagcgcggtattcatggcggtatcgtagccaatggtgtaatcggtgcaggaaatatcgttgtcaatagtgccgggcagaccgatcatcggaatgccgcggtgggccagctcacgagcgccgcggtaagaaccgtcgccgccaatgaccaccagcgcatcaatgcccagttcgcggcacttctctgcacccttgtcctgaccttccttggtcttgaattccagacagcgggcggtatacagaatggtaccgcctgcagagatgatgttcgacacactgcgcaggttcatctcaaagcattcgccgttcagcaggccattgtagccacgctgaatgccgatcatgcggtaacccttatgcaggccggtacggactacggcgcgcacggcagcgttcatgccaggagcatcaccaccgctcgtcaatacgccaatcgttttgatctgcttttccatacgagagtttccctccaatttgtttcttcatttacccaatggtatcacagcgctctccgttttaacgctgtccaaagcacttcatttgccttgaatcattataacacaaacgccttattttggaaacagccatcccgccggatttacgttaagattcgtgcacggaaatgtcattttgttgcaatgttgtccgttccgaccagcctttccagctctttgaacagcagcggatggccggatgcgtacagatggcgcggcacacgcagatactgcttggtatcggtcagatacaggagcaccggcatgtccccatcaaaaatgccaagcagattgaccacctttgcatattccctgctgctgcgggaaggcacacggatatacagcttctttgctgccgttttcatcgggtccggcctgccgttatccagtcgggccggatcgtaattttcgatcgggacgatgctctctgccagcagcttggaagcttcatcctcccgtaccgacagtctgccatcgatcacgacgactgcattttcgtgcagtgaatcccggaaagcatccagcacctttgggaatacgatcacttccatggtgccggtcaggtcttctacgctggtaaaagccatcatgctgttggactttgtggtcatcatgcggctttttaccaccgcgcacacaatgcgcactttttttccatccttcacatgggcatcttcccctgtaagatccttgatggtgtgggatgcaatgcgtgccgattgttcccggtaagcatccagcggatgaccggacagatacaggccgctgacttccttttcctgctggagcagctccttatggctgtactccggcagctgctttatttcatagttatcctcggaagcaccgctctgtgcttccccgctcatcaccgagaacagatccagctgtccatccagattgcgccgagcgtcggtctcaatgctcttcagaatgccctctacggcctccacatggctgtggcggttgttgcccagatgatcgaatgcgccggccttgatgaggcactccactgcccggcggttcagttcattgccatgcatccgcttgcagaaatcgtaaaggctggtgtaaggcttattctgccgccccttcaccacattctcgatcaggttgcggcccacatttttgaccgcattcaggccaaagcggatctgaccgcttccatccgccgtaaagccgccgttggaaacattcacatccggcggcagcaccttgatgccaaggcgggcacactcgccggaatattcaatgaccttatccgtgttatccagcacactggtcagcaaagccgccatgaactcactgggataatggcacttgaggtaggccgtctggaatgccacataggcatagcaggccgcatggctcttattgaacgcatatgaagcgaaactggacatttcatcgtagatctcattggccactttctcagagatgccgtttgccacacagccggggcattcgttgccgggatcggtgcagccgtacacaaagtgctcccgctcggcctccatgacggcatgtttctttttgctcatggcacggcggacattgtctgcctgaccaaaagagaaacctgccagctcccggaagatctgcatgacctgctcctgatagacgatgcagccattggtcacatccagaatgtgggccagctgcgggg

SEQ ID NO: 3312 - DNA, 1834 bp, Unknown
  16S sequences of unknown bacteria
aaaaatgattttgactttatttgcgccgtgcgcggcgcaaactctgcgaggctttatttcgcattattttgcaaaattccaagcagggtttgcgtatttctcctgggctagggctttgattgctgccttggctgcggcatcgaacgcgcggggaacgccgcaggcaaaggcggcggcgatcttttccttcaaggccgccacggtcaggcccggggcaaagtcctgcagattggccacgcggctttggacggaagccacaccgttgcgccggagcttctcctgcggcggggtcagcaggcgggtcatgggggcaaggtcactggcgacaagcaacgtcccgtggtgcagcagccgcccggcgtggacccgggccgcgctgccggagatcttgcgcccctggacgcacaggtcgttgcggccattgaattccgccgcgacgccgaagcttgccagaaccgcaatgagcggcgtcaggaaggacgcgtagggcgaatccaaggcggggcgatccgccgtcaaaaacgtgaagttcagattccccagatcatgatacactgcgccgccgccggtatctcgccggacgacggggacgcccaactgccgcgccagatccagatcgacctcctgcgccgcgcactggttgcggccgatgatgacgcagggggcgttttgccagagaaacaggacatcctccgccccggcctggtgcagcaaatagtcctccgccgccaggttaatgcgcgggtccgtgctggctgtctcgtaatagatcatagagcttctccgccgcctcctgcagggtctcggcataggtcgggtggaaacacagggccccggccagtgcgttgacgggcagacctgcatcgatgatcgccgccaggaaataggcgatctccgccgcgccgggggaaaacagctgcgcgccggtcagtataccgctggccgggtcacacaccaggcggacggcaccgtccatccggtcgtgcaggaaggcatagccgttgtattgcagcggcacctcgacggccaggccgtccgatgcaccgacattgaccaggtcataggccccgcagacgacggcgagagacacgccccggggcttgaccggacggcccagcatcacatcaacggcccgccgggctgtcgcggaggcttcataggctgtggccatactgtcagagcagtcgccagcggcaaaaacgccggggcgggaggtgcggccttcgctgtcgatccggatgccgccgggcccggcttcgacgccgatcttcttcagcgctgcgcccgtcgattgcatcagcagtccgctgccggtggccataaaaatggccttctgcggcagcgcatccagccggaacgccgcgccgcagcaaagggagatgcccagcgcctcgcagcgctctgccagcaggtcgctgccgtaaaagcccggcaggatctccggctgctgctcatacaggcaaacccggcatccctgggcggcaaagatctgggcgtactccaccccagtcacgccgccgccacagatggcaatctcccggggcagcgcgtccaagtggaggatactcgccggggtgtaaagcgtctttccgggaacccggggcagcggacggggcggcttgcccagggccagaagatagtaatccgattccggcagcgcatccagctgggcccacgcgcggcggaccgtcaccccggcgcggtgcaggcggcgcgccatgccgctggcaagcagggatatcttttcccgaatctgcccggtgagcgcctgccaatccagatcgggctgggcctggagcaacgccttggcggggatgcagcccgcgtgcaggca

SEQ ID NO: 3313 - DNA, 28653 bp, Unknown
  16S sequences of unknown bacteria
tgctcttgaaaaccggcggaaacacgtgtgtttccgccggttttcgcctataaggagtgtttgcgaggcacatgtcctcgcaaacacaaatcggtaacccgcctccgcttttttcgtcttccgaatggcggatttcccttttttgacggcctgaaacagcggccttttcggtcgctgtttttattcggaactcatcttttgccagtcgtcctcggtcagcacctcaacgccattgtccatcaggaggcgggcggcgacgccggcgccggggattttatggccggaaaaggtgccgtcgtacacatggcggcagccgcaggagggactgttctccttaaggatggcccggcggatccccagccgacggcacagctccaatacctgacgcgcccccgcctcataggcggcggtcacgtccacaccctcccggttcagcacccgacccgcccggatttccgccgggcagcggggcgtgggcaggccgcccaggcattcgggacaaaccggaacggcccggccgctctccgccaggaggcgcaggccggggatattgaacccgctgccgtcataccgcaccctctcgccgcataggcaggcgctgacgacgaactccgggcgcagcttcgtctccatcagaaataccgcagcagggaaacgaccttgccgagcaccacggcctccttgacgataatcggctcgaactcgtcgttttccggctggaggcggatgtgatccttttccacgaaaatgcgcttgaccgtggcctcgtcccccaccagggcgacgacgatgtcgccgttttccgccaccggggttttcttgacaatcaccacgtcccgatcgaaaatccccgccttgatcatgctggtgcccgacacccgcagagcaaacagatcccccggattatacccgccgcccgaatagggcacgtaatcctccacctcttccacggccaggatgggcacgccggcggtcaccttgccgagcaggggcacgcgggccacgctctcccccggcaggcggatggcgcggttgaggccgcttttacgggaaatatatccctcatcctcgagcaccttcagatacgcgtggacggtggaggtggacttgatacccgcggcggcgcagatttcgcgcacggtggggggcaggccgtcctgggcccgttccttcagaaaggtcaggattttctgctgcttctcattgagtggtttcatggataggcgccatcctttcatctaccggttctatacggggggatcccgcggattctttactgccagtatagcacatgtgttcgacaattgcaaacaaatgtttgaattttccgcagtccggacagttcacaggatcttcacacgactctcaaaaaaagcttacagtttattcatagtcaattcacacaaagttacgcaaataaaactataataacaatgtactcagaagcaagacggagccgcaccgctcttgcctcatccaaaatgagtacgttctaccctcctcaaaacacccctctaacttagtaaaaaccccgccgccgcaggcggggtttttactgcccttttttaccgtctgccgagcaggcggttttttattaggaaaatagttgtatgaagacctaaaaatagctgttgctcttgtccgccagatccgatactatgaagacagcagattcatattaaaggaggtaccttacatggaaaaacttcgcgtaggcatcatcggctgcggcggcatcgccaacggcaagcacatgcccgccctgcggtcgcaggcggacaaggccgacatggtggcgttctgcgacatcgtcgtggagcgggccgaaaaggcggccaaggaatttggcgcgccgggggccaaggtgtacgagaactatcgggagctgcttgaggacggcagcatcgacgtggtgcatgtctgcacccccaaccgctcccactgtgaaatcacggtggccgcgctggaggcgggcaagcatgtgatgtgcgagaagcccatggccaagaccgccgccgacgcccagaaaatgctggacgccgcccgtaagaccggcaaaaagctgaccatcgggtatcagaaccgctgccgtccggacagcctgctgatgaaaaaagcggtggacgccggggcgctcggtgacatctatttcgccaaggcccacgccatccgccggcgcgccgtcccgacctggggtgtgttcctcaacgagtacgagcagggcggcggccccctcatcgacatcggcacccacgccctcgacctgaccctgtggatgatggacaactacaagcccaaggcggtgctgggctccaccttcaagaagctgggcaaccagaccgagacgggcaacgcgtggggcgactgggatcccaaggagtttacggtggaggattccgccttcggcttcgtgaccatggagaacggcgccaccatcattctggaatccagctgggcgctcaacaccctggacgtgcgggaggcgcagaccaccctgtgcggcaccctgggcggcgcggacatggccgacggcctgcgtttcaacaaggtggaatggggcaagcagtgcgtgcaaaagcccgacctgaacggcggcggagtcgccttcttcgacggcgcgtcctccggcgatccggccgaggtggaatgcgcgcagtggctgaacgccgtgctgaacgacaagaccccgttggtgctgccggagcaggcgctggtggtcacccagattctggaggccatctatacctccgccaagaccggcaaggccgtgtatttcgagtaaaaggttctcaatattcctccggggcctgctctgtacaacggcctctgcagaaaggaaggcgtcctagtttgaaagaaaggcgaatgcctttctttcaagcgggaattttgtcctttcgcgccagaagcccggcatgaatttgctttgcaaaccagacattcctgcgaaaggatgagtcattacaatgaaagatttcagcctacagctttattccctgcgggaggtgccgaccctgcgccagcggatggaaatcgcggcacaggccggctataccggggtggagtttgccggctacgacggcatagccggtcccgagatgcgccggctgctggcctccctggggctgcgaggcaccggttcccacatcgcctacgacgcgctgcgggacgatttggacggctgcgtgcggtactgcctggaggcggggatcacctccgccgcctgtccgggctgtgagatgaacgaccgggatcaggcgctggcccaggcggaattcctggaagcctgcgccgagcggttcggggcagaggggattcccttcgcctaccacaaccatgcccacgagttcgcggacgcgggaaacggcgaaaccctgtttgacgtgctgctgcataacaccagcaagctaggggccgagctggacgtgttctgggcggcctatgcgggggtggatccgctggcctttattcagacctatgccgggcgggtgccgctgctccattttaaggagttcggcgcggaaaacgccaacgtggagctggggcggggatgtctcgacttcgcggcgctggcccgggcagggctggcccaggggacgcgggagctcattgtggagcaggaacagtacaccatgccgccggaggagagcatccgggtggacgcggcctacatgcaggcgctgaccctggcatagagagacgaaaaacccggcccgtatcttgacgatgcgggccgggttttttactgtttattcagccggctgatactgaacagaaaaccggccagtgtaccgcccagcagcagcaggaacgccagcaggaaccagccgggcaccggcatcctttccacggtacgcagcgtgatgtagaaaatcgcgccgaggatctccagcttcaacacgcccagcatggtgcgcacccggatatgtattgcgcgccgctgcgcctgcggcaacgagtcgggcagcccccacaagcgcgggaatacggccaagaccgtcagcagcagataaatagccagaccgataagcggcatgacgaatatttcccaccggctggcccagcggtcgacgtccccgtgactgtcgtagtggacagggatcgcctccggcagggtattccagtggacgatgacgaacaccgccatcaagacgatcagcagggcccctatggcctccagcgcaatctgcagcgcggtgtaccgtgttttcatggtcccgccctctttcccgtcaggcagcggccaatcagcgcttgcccagcttattcacccgttccaggtccgtgttttccccgatgacgaccagcacatcgccatcgtggatgatatcgtcgctgccgggagccacacgcagaaccttgccggaacggatggccaccacattgattttgtagcggttgcggatattgctctgcttcagggtgcggcccacccattcatcgatggcctccagctccatgagactgtgcttagcagacaattccatatagtcgatgaggttgttgctggacaggctgcgggccaggcggatgcccatgtccttttccggcataatcaccttgtcggcgccgatacgctccaggatcttgccgtgggcctccccaccggcctgggcgacgattttgaccgcgccgtgatccttgagggccatggtggcgatgcagctgatttccacatccttgatgctgagcaccaccacgtcgaaattccgcaaccccagggagtccagggcgtcgtcgtccaaaatgtcggcctgcaccgcgtgggtgatgtcgtgggccagatccgctaccttatcggggtttttgtccacccccatcacttccacgcccatgttggtcagggcgcgggccacgctggcgccgaaccggctgagccctaataccgcaatctgtttcaaactaatcgctcattcctttccagagtccggggaatgtgccgatcccggcgaagccggaaaggcacacaacccgtttgaaagtcaaacggctttctttcaaaccactgtcttatacgtccgaggggtcagcccaccatcatccgatcctccgggtaccggacggcgctggccttgttcccgccgcccgacagggccatggacacggtcagcagccccacccggccgcagaacatggtgatgatcagcatgaattttgccacatcgtgcagccccgccgtaatgccggtggacaggcccaccgtaccgaaggcggacaccacctcgaacaggatatccaccatgttttcctgcccgccgctccagtattcgatggcgctgatgacgacggtatccatgatcaccaggctcagggcgagggtggccagggccagggcccgcttgaccagcccttccgccagacggcggtggtggtaattgtaatcctgccgctgccggacggtggcgataaccgagagcatcaccacgaaaaaggtggtggtcttaatgccgccgccggtggacgcgggggacgcgccgatgaacatcaggatgatactcaccagctgcatggcgggagtaagatccccctgtcccagggtgtcgaagccggcggtcctaagcgtcaccgactggaacgcggaggcgagaaccttccccccggggccgacgtccggcttggccagggtgccgggattgttccactcgaacagcgccgtgaggataaagccggtgaggaacagccccagggacatcagcagcaccacgcggctgtgcagcatcagcttgctgaaccggcggttgcgcagcacgtccataatcaccgcgaagcccatgccgcccagggtgatgagggccatgatcaccagattgattaccgggtcggtcatatagtgctcgatggagttctcaaagccgaaggcgtcaaagcccgcgttgcagaagccggagatggacaggaacaccgcgtgaaaaatccccttccccactccatattccgggatgagcctggcgcagagaatcagggccgcaatcccctccaccgcgaaggtaaccgccacggcgttgcgcaccaggcgcaccatgccctgcagggaatcggtattgaaggactcctgaatcagaagccgctccttcaaggagatccgcttgcccaccaccataaagaggatggaggcgatggtcataaagcccaggccgccgatttgtatcagcgagagaatgaccagcttgccgaacagggtgaacaccagcccggtgttcaccaccgtcaggccggtcacgcagaccgcggaggtggcggtgaacagcgcgtccataaaggtgatgtccgtcccctccttcaccgtggcgaaggggatgcacagcaggccggcgcctattaaaacaaccgataaaaatcctagcgtgaggatttgaaccggcctgagtgaacgtattcgtttagaaacggctttcaacatgggttttcggtgcctcccagcggtcatccctgtgtcatagagccacggggattgcgtccccgtacgaagcggtacggaaccattgcttgggacattatagcacttcccttttgaatttacaaccattatcttacgcgcttgggcgggagtttatgctggaaaccgcccgatgattttcgggggccggcagcctgcaaaaaacgccccgtatgccggcggctttcgcggcatacggggcgcatattacagggcggcggcagctgccggagagggaacgtccacccagacgccgggcgttttagcggccagcaggccggcgccccgcaccgccatgatcgccagggtttcccggtgcggcacccgcacctccccggtttgataaaagcggcagagctcctcgacgaacgcggcgaagaagtccgactccacggtgatcaggcggttgccggagcgcaggctcacattggtgacaaacggggagcctcctgcaaagcaggacagggtggcgcagcgcccgtcccggaactgcacggccagggacatccatttttcgccgtccagccacatcacgcgggccggctccgcccccatgagcatcatcagcggctcgagctggtggacggaataggtgtcgaaatcgttggggccccagcagctgacggccgtcacctcgtcgggccggatgtcccggtattccgcagcgaaccggagggccgaggtggaatagcagggggtgccgctctgcctggcgatggcaaacagccgttcggccgccgccaggtcgggcgcgaaggtcttgtccacataggtgcgcttgcccgaacgcagagggatctgacagagttcctcgtgcatctcgcagttatcgggcgacagcaccagcaggcagtcgcttttctccaccacttcctcgatggtcgcgcagcgggtgatgccgtacttggcgcaccagtcgtcggtggtcaggccgcccggccgaggactgtcgattttcccataggcgtacgccacttgaagctccccgccggacgcctgtttaatccactccgggtaattgttggcgtgccattcatccagaaaataatcgataaatccgatggtttgcataccggttccccctctcctgtcttatccacattatatatggaaaaaacgccggcggctatagccgttttcgctttttagttgtccgaatttgtctttttccccgttcagggcagccaggcaggcggatcccactccacagcgccctccggcacggccgccaccggcaggccggtaaagcgggcgatttgctcccggttgtcccgatgaatgatattctcctcgtcgaagcggttgagcaggatccctcgcaccgggaggcccaggcgctcggcataggccgccgtgaccaccgccgcatggatggcaccgaggccggacggggccaccagcagcaaatcgaagccgatggcggcggccacatcggccagcagcaggggaggctccccctcccggagcggacagaacaggccgccgcagccctcggccaccagataggcgaaccgctcccccacggcgcgctgccgctccaggatggccgccagctcgatgggcggaccctccagccgggccgccagatgaggggacaccgcctgctcgtacaaatacgccacataatccgccggatccccgggaaggcccgccgtccggcagacccagcgggcgtctccgggcaccagccgccctccttccctttcggcgccgctgagcgcgggcttgaaatagccggcgtttatcccgcgggcccgcagggccttgaccagcaagccggacacataggttttgcccacgtcggtgccggtggcggtgacgaaaatcccttgattcacagcaatcccacctcatagcccagccgcttcacccgctccaagtcctccgcgatggtgatgccggcggtggtcagcatgtccccggtgatggcggcgttggcccccgaacgaaaggccgccgtccccttgtccgcgagcagccccctgcccccggccaggcggatggcggcccggggcagcaggaagcggaacaccgccgccgtgcggcaaagctcctctcccgtcacccggggaaagccggcgaagggagtgccagggatggggttcagcacgttgagcggcaccgagcgcacccccagccggcgcagatccagcgccatatccacccgatccgccatggtctcccccagccccaggatgccgccgctgcacagctccaggccggcccggccggcgcggcgcagggtggcgattttgtcgtcgtagctgtgggtggtgcagacggcgggaaaatgccggcgggaggtctcgaggttgcagtgataccggatcaccccggcctcccgcaggcggcggagctgcggctccgtcagcagcccgtgggaggcgcagggggccgcgcgcccctcgtcccgtatccggcggtacgccccgcacagggcttccgtctccccgtcggtcagcgtccggccggacgtgaccaccgaaaagcgccccactcccttggccccgtccgccgccgcgcggcgcgccagatcgtcggtctccagcagcggataggcctccgtatccacgggataatgggccgattgggcgcagaatttgcagttttccgagcaccggccgcatttcccgttgacgatggaacacagctcgaaccggttcccgcagaaatgcgagcggatctcgtccgccgccgcgcacaaaggcgccaaaggcgcggattccgccagggagagcgcctcctccccggtaagctcttgtccggacagcaccctgtccttcagcttttgtatcataccagccgctcccttaccagaacagcccgcagccggcccgccagcgccgacgcggccaagcacagcacagcgtccccgggcatatccagcggaaaggcggacaaaacgaccaccagcagaggggtgggctgtcccaaatattgattgaggataagatacttgtacaggaaaccgacgccatatgtcacggccatgccggcgaaggcggcgggcaggaactgccgcattcgggccgcacgggttttccggcagagaaagccggtcagccaggcggcggcgatgaagcccagcagatagccgaagctgggccggaacagatacgaaatgccgccgcccgcggcaaaaatgggcacccctgccagcccgacggccacgtacaccgccaccgcgatggttccgttgaccggcccgagcagcatgccggccagcaggacgaacaaaaactgcagggtgaaataatccatgaaggggacgggaatctggataaaagccccgatggcgatcagagcggaaaacaacccgcacagggtcatgcggcgcacccgcgtcgaagctgtcattgccattccccctccatccgaatttctccgccccgcagggcggccacgccgccggttccttccaccagcaggcagccgtcctctcttaagtccacggcacggccggtcatccaccgctcacgctgcttatactgtactggccggcccagcacggccagccgctcccggtagggctccagataccggcgctcgggcagggaatcggcataggtcagcaggcggttggcgatgccggcggccaggtcgcagcgggacacctgggcgggcaaaagggacccggcccgctcccgcagctcctcagggaacgcgtcggcgggcgttttgacattgacgccgatgcccaccaccacgctttccatggtgccgctctccaaatcccccaccgcttcggtcaggatgcccgccacctttcggccgtccacaagaatgtcgttgacccatttcacacgggtggacaccccggcggcttcctccacggcctcgcagacggcggccgccgccgccaaggtgaccagtggcagctcctccgcctgtaccgccgggcgcagcagcacgctcatatacagccccgtcccgggcggggagaaaaaggcccgccccatccggccccggccggccgtctgcccgtcggccagcagcagggagggcgcggcctccccgtccgccgccagcttcttggcctgcgtgttggtggacggtacgcgggcgtccacccggatggcgcagtcccggtaagcgggccgcaggcggcagcggatcccctggggggtcagtacgtcgctgtccctctccagctggtagccccggttggtcaccgccgtaatgcggtgcccctcggcctgaagcgctttcatggctttccagacggcggcgcgggaaacgtgcagccgatcggccagcgcctgccccgacaccggcgcgtccctatgttcctccagaatttgcagcaacgcggttttcagcgccatatgcacctctccttgtccggaatcgaatgatgccattgtagcatacgccgtcccgtttgtaaaccaataatttatttttggtttacaatattccttgaaaaaagcgccgcccgttcgggcagcgcctgcggctcatcaccggcccaggttgcgccgcagctcccggtaccgcctggtggccagttcgctgggctgtcccttgcggcagaaattcaggccggccagcttgggcaccacgcgttccaccacgatccggccgtcgtccagcttggtttccagcgccgccagcgcttccagaaaccgctcgtctttccgggcccgctcgtaaaaggagagcacatagaggtattggaacagattatagttccggaaggggtactcgacttgcatgaacagggtgccgatgccgtaatggcagggaccgatgggccgttttatccgccagtgctccagcaggaactccaccgccctgtccagcgccggctcccggttgagcctgtccgtaaagcggaaggcgtccagcgccaccagggtggggtaggggttggaatacgccgtttccgggccgcggccgaagctgaacttcaggcaacgccagccgccgtcggcacactgggtgtccagcaggtgccgccaggttctttgcagccgggcgtcgccggcataacccagatggcagagcagatcggccgcatggatggtctggcagggatagatgccaccctggggatacatcttaaagcgcccgtcctcctgccagacgctgaaaaacagcgcggcgacctgatgcataagcggatcaccgggctccattcccagctccagcaggtacagcggactttccagcgcggaaaaaggggcgcccttgagcagcctcttatccggcgtggcccacaaatcgccgccgttatcccatcggtgggacagaatcgcctccgcgtctgtcctatacgccttttccacagccatggcatttccctctttccagcagcgttttctcagagtgtaccacaaaccggggaaaaagtcgatcagacaaccggcgcggctaggccatccagcgacggcgcagttcgtcggcgccgggctccaccacgtcggccgtcaggccggggatatatcggcaggcctctagaagaatgtcgccgtaatgcccgtacaccccggacacatggtgaatgtagggcccttccaccagccggtgctcccacagcggccagttttccaccttcatccagacataactgcccaggttccgcggcccctcggtggtgaccgcctccccgatgagcaggcggtaatccccgtgatcgccgtcgaaccgcgcgatggtcagctcaccgcttttcagctcccattgggccacaccgtagcgatcggcgttgtatcggttcagccccgccaccgcgctcgcctggtcccccgccaaggagcgggggaagttgccgcagtgccagagcagttcggcgttgtcgtcctccggatggcggacggtcaaatccgcgaaaaactgcggctccgtgttaaaggtcagggcctgggtcatgacggcggtgatcgccccgtggatgtcggtctcgcacaccaccgggagcccctcgtccgacagcagcgcgttggacaggcagggcatgacgcccgtcagatgctgcagagaatcccagcattgaatcgccacggcgcggcagccgcgggcctccgccagtgaccgcatggccagcttgagtcccgccgccctatggatgtcctcctcactcccggcggcggtgatggagcgaatatacccgcaggtctcccggaaggccggctcccgcgcggccatgacgcgctccatttcggtaaccaggtcgtccaaagtcaccgggcagcactggatgccgaacctctcgatgagctcgttctcgttgcagatgacgctgcaaaagggggccggccgggtagaaatttgcaggattttcagccgggtcaccgccttcaccacgctggccacccgcaggaatttatcaatccccgtatgaaactcccgactgtctgcccaggagttggtcagataagtgaaggggacgttatgccggcgcagcaccttgccagtggcgaacaagccgcactgggaatcccggctgcgcaggccttccgcgtccggcgcgtcatcccgcggcccccacagcagcaccggtagccggaattcccgtgccacctgggccacgcagttctccgaaccgaaattgcagtgggggaagaacagggcgtcgacgtccgccgcccggaatttttccaccaccgccggcacgtccgcgtcccggaacagcagctcctcctcgttgattcccgccaaatccaccagctccaccggatggcccgccagcgtctccttcaccagccggccgtaccgcatagcctcctcccggctgaacacatcccgccgggtcggacagtatcccagccgtatcgtcgtcttttgcatctcacaacccccattttttcagcatggccttctcgaacgccagcatataggcggcttctgcgtccagcgccgcctccgtcgtatcctccagcaggctgcgccagctgcagacgctgcggcccacttcgccgcccacggccacaaacggctccgccacaatgcggccggtatacccgacggccttcagcgccccgaaaatttcatcccagtccaggtggccccgccccgggcagctgcggttattctcccccacatggaaggcgacgagcttgtctccggccagccttatggcgtccccgatggacggctcctcgatattcatgtggtaggtatccagcaggatccccacgttctgactgcccaccatgtccacataccgcgccgcctcccgggccgtgtttaccaccacgccctcaaaccggttcaccgcctcgatgccgtaggtaatccccagcgcctccgccttggccgccagctttttcatgcacgcgacgctgtgccgcgtccgttcctccttgtcgatcgccccgtcaggaatgccccatccggcataggacaccccggacaggattcgcccgcccatcaaggccacccggtccatgatggcggagaggtactccattcctcgctcccgcaccgccgaatccggcgaggagatatcatacgcctggtccagccccaggctgtaggtcagctccaccccctgctcgccggccagattcttgagctccagcaggcgggcctcctccatgtccagcagcgcctgcgcctgaaattccagcacgtcgtagccgattgccgccgcctttcgtatgtacttcgcatggtccgccgcccagctctgttcccagaaattcagaaaaatccccagctgattcatgccgattctcctttctttccgcggcacatcattatttaaccgcttaaatagcgtagcatattcaatcccatttaatatcattctgataaaaattgacggagtatttccataaaattcaggtatttgcagggcaaatttctttgtttttgttctcacaaggagctgcccgccagaatatttcaccgttttattttttggacagtaaaaagcggcagagcccgcacagagggctctgccgcatgaaagctgcgttagtcttccgtttcgattacctgaaccggacagttgtcggcggcttccttcgcgccgtcctcgacatccggcgacggcgcggccgccacctccgccagcccatcgtccgccatgcggaacacctccgggcaggtggcggcgcaaagcccgcagccgatgcagccgtctcgatcaatttttactttcatagtcacacctcctccggaaataggacgataagcagcattttgaagggctccgttgccaacaccgcgtgcggctttttggccggcataacgatggcttctccggcgtgcaccaggtgctcccggccgtcgatggtgatgaccccctggccgtccagccccagaaccatggcgtccccgccggattcatgggtgctgatcgcctccccttgatcgaatgcaaacagcgtcaggctgtggtggcgggtctgcgccagcgttttgctgacaatctgcccgggctggtacgatacctcgtcggttacggccaggcatttctcgtgctcgatgttcttaatccatgccatcgcaaggctatcccctttcgcgctatatgccttatcctatccaggaaccggccgatatattccaccccggtatcaggctgaccatcctgcgaccagtcttaacgtaattctaagtaataaaaataaaagaagtcgatcgttttacagcaatcggcttctcttgacaaaatatactgtggtgacaaacaagatatccgctcgcggtcgagccacacaataaaaatggccggcaactcattacgaattgccggccacgggtctggtgcgggtggcgaaataggaactatccgggaaaccgcattgacaaagggttttcgcagtcattaaacagtacattacctatatcaaccaccattgtatcaggttcgattcacaatttcaatgcgaaaacaaataggaattcggagggtaccctcatgtgtaaaatcatatccgtcatatcctgcaaaggcggggttggcaagactacatcggccgtcaatatcagcgcctatctgcaaatgcagggtaaaagagtgtgcgtagtcgatttggatgcgcagcataacctctcccgtcattttggcatctgggcgataccttcggcagaaacgcctaccataactgaattgtttcgtgccgccattgacgactgctcggatgaaaccatgcagcagatgatacgggacagtatctgccagacaacaacggtggacatgatcccctcaactgttcaactgtcttcactggaagcagtcctttctaccgccaccagccgggagcgcgtgctggaatacatcctatcctttataaggaaagactatgactatatttttctggactgtcatcccggtctggatctgttttcggtcaatgcgctgacggcttcggattcggttttgattcctgtagaagcgcatatcctgagcagcgatgggctggagcaggtagaaaagatgatccgcactgtccaacgaaaattaaaccctcgcctgcgcatcgaaggtatcatcatcaccaagtttcaggggcacacgagctgctgccgccaagtctatgagattgtcaagcgggacttcggcagccagatccacatctttgaagagccggtcaaatacgctattaaagtcgcggaagcgccagcgttcggcatctcgctgcatgaatacgccccgaacatcgagccggcacagacatatgcccgcattgcattagaggtgatgcgtagtgcctaaattcaacctggcggaacagttggcctctacacgataccatatggacgatgcggaggatttgggtgagcttctgaagacttccgacagtcaggccgtgcaaagacttgtcatactgccgctggcgaagctggtggagtacaaggacgataattttgaaagaaccaccggccggccgcagcctttccggacatactctcaagaggatctggaatcgctcgccaaaagcatcgccgagcacggcgtcattgacccgattaccgtccgaccgtttgagggcggcaaataccaaatcattgccggccggcaccggacgcgggctaccgcactttgtggactggctggtattccggggatcatccgggatattgacgatgtggaagccgccaaaatcatgctggataccaacctggagcagcgccacaatctgctgtacagtgaaaaagcctatgcctaccggatgcgcatggaactggaaggctgtcagggaaaacgtaccgatctggcggaagacggagcaaaggtggacaggctggcggaagtcggcaggaaaaacaaggacaatcgacgtactgttgccgacctcattcggctgacatacctgctgccgggtttgttgaagcttgtggatgaaggtacaataggattcaaagtgggcgttcagctgagttatttgcctgcatttgcgcaaaatcatctgttggataccatcatcccgaccattccgtataaaaagaaaattaagcctatgcaggcgtcggtattgcgggagatgcacaagtctgatacattgacaacggattccatggaggaagttttccggaagcagaaaaatgctcctgcctcgttctcaatcagcggcaaaaaactgagcgcctatgcggatctgctgaacgatagggacgaaatcgagaggctttttctggaattcctggagaactacaaaagcaagaggagcgcctaactttgtgcatcggatgcacaaagttggatctctcatacagacagagaaatgtggtgaactatatgacgacacgactggcaatcgcttttgctgcggctcttgcactgctgtgttctgcctgcggacagaataccgatgcgccttccgaagcgtcatccgctccggctggtccagtcctggtaattagcgaatccacagagtcatcacagcaatcatcaacgatagcgggaattaccccgacaaccgaaatgaaaggaagtggtacagcgcccggtccgggtggtaccggctctaccgcaccgaacaaatcccatgaagcgggaaccaccaagccaacttctccagtcgttccggataagccggcgcaaacgcctcagacggatggttccaagagtacgacaacctctggcacggcttttgtcagcaccaccgacaagccgcaaacgaccagcacctcacgccccaccaccagcgatgcggcgaccacgacgacggccgcggggaaatccccctgggcctatccgtacgatattccggcgatgatgcaggaatgccgggaagagatcgctcgtgtggagaaaagcactcatgtcggttgggggtgggatgacagcctgacgaaagaacagtcgagctgggatcagccagaaagcactgtcctgtacacaacatatcccgatggattcgctttcggcgattatgtattcgacggagatctcaaaaactatgttttcggtgaactaatccccttctatctccgcaatcagaaccagtacgctataaagcgctgtaaaatctggtttgaaccacttccggatcgtcccggcgactacaacatttattttctatatcgaccggattcggcctgaccgaatccaattctaaagctcagccgaaaggctgggctttttttcgcccatttttcattttttgaaaggagatttgaaacaatgacgggcaaaaaattgatagctgtcatgtctgcgctcctgctcctgatatcttcattcagtgcagcggccgccagttaccagcacggcgacaaggtgcgcgtcaccctctcggaatgctgggctttccacggcggaaggcggccgggcgaaacctcaacctccaatggcggaaatcggggtaatcattataacaatcgtctgtactggtacgaaggctattccattgacattcttcacacggacaacctgtatccgccgcagtacaacggccgcacattcatgtactgcatacataagtggcaggactacgggaacggagagcggcagttttataccgacagcggcggccatttatttgacagcctgtattggaacagtctgggaagagaaaaacaaaggctgctccagctgctgtcaatctacggctttccggcccggacgcccgaggaactgggagccccttcggttgatgacacctatgcagcctgtcaggctatcgcatgggagattgttaccggccgcaggacgctgaacggcttcactcctaactataaatcttcgggaaacgaagacacacctactgttgcccgagccaaagacaacgccacctatttccgcgactgttatatgtactatccctatgatggaaatggccattccattggtgaggcgacaccggcgctggcggcctataacaaggtgtgggcggacatggcgaagcacgataccctggcgagtttttcgggtcaaaccctgaagctgaaatgggacaatacggcaaaagcctataccggatcgatcaccgacaccaacgggatgctggcaaacagctttctctcatcctccctgccttccggcgtatcctgtgatatatccggcaataacgcaaagtttacctccatgcaggagatcagtcaatccgtccttgtggaatttcagaaggaactgtccgagctttgcaaaagtgccccttttgcggttctggaaacagtggacggtaaaccaggtcaggaaatgatgtccggcattatgaacgatcctcgttggttttccctccatatccgcacttccagcggccgaatcgacattgaaaagcagtcagccgacggcattgtggctgggatgaaattccgcatagtagggaatggaattgaccaggccgtaacgaccgggagcaacggcaaggtaagcctgtcccttcccgcaggcactttccgtgtgtttgaagtggacgtgccggatcggtacgaaaccccgccagagcagacgatcaccgtcactgaaggcaacactacagcagtgctttttcgcaacaactacaaatatggctccctgaagctcatcaagacttcggaagacggcaaggtgggcggcatctccttccgcattgtcggcaacggcgtcgatcgggtcatcgccacccagactgacgggacgttcctgtgggacagtatccttctgcccggcgtctatgaaatcaccgagcagacagatgacaaatatgaaccgcaggccacccagcgtgtcacggtggtggcgggccgcacatctacggtaacattcaacaacgttctcaagcgcgggacactggaggttgccaaaacatccgaggacgggctgaagaaaggcatgaccttccggctgtccggcacatcgctctccggcctgccggtggagcagtacgcagtgacgggcttggacggcattgcccggtttgaagacgtcctcatcagcggcgacatcccgtatctgctggaagaggtgggaacgccgaatcggtatgtggtgccggccaaccagaccgccgtcatcgaatggaataaagtaacgcacaaatcctttgaaaacgtcctgaagaaatggcaggccgtcgtcaccaagtcggacgatgaaaccggcacggcgcagggaggcgcctccttggccggggcggtttacggcgtgttcaagggggagcagcttatcgaccgttatgaaacaaacgcggcggggcaattcaccacccagtattacccatgcggtgacgattggacaatccgcgagctttcgcccagcgaaggttatctgctgaacgaaaccatttaccacgtcggcgctcaagcggagctatacgaattggagtacaaccagaccgccctcgatgtgatagaaaccgtcaaaaagggccgggtagctttaatcaagcacaacgacgacggctccaccgggatcgaacacccggaagtgggcgcagaatttcagctgtttctcaaatccgccggttcctacgagaaagccgaggactccgagcgcgatcttctcgtctgcgatgaacacgggttcgcgcggtccaaggacttgccctacggcttatataccgttgtccagacaaaaggcaaggaaggcacggcgctgatgcccgcctttgacgtgttcattcagaaagacggacagatctatcgctatctcatcaataacgctacctttgaggcgctggtagagatcgtcaagaaggacatcgaaaccggaaaggtcatccccgcggcggggatcggtttcaaggtgcgggacaccgataccggcgactatgtggtacagcatatcaactatcccactcctatggacattgacaccttctataccgattccacgggccgcctgatgctgccggaaccgctcccctttgggcactatgaaatccttgaacagtgtacggcctatggctatgtcttgagcagcgagccggtgcctttcgcggtggacggcacccaaacgaccattacggtggagaagcacaacatcgcccagaaagggcagatcctcgtcaaaaaatccggcgaggtattctcatccgtaacggaaactaacggattgtaccagcctgtgtatgctgtgaccggcctgccgggggctgtctacgcggtgtatgccgacatggacatcaccaccccggacggcacgatccgcgccaaagagggcgaacgggtcggcacgattgagactggccccggcggactcggcgtaagcgcccccttctatctgggccgctacaagctggtggaggaacaggcccccggcaatatggtgcttaacccagagccgcaatatgtgacgctggaatacgccgaccagacgttggagattacgcaggcggaaaccgaatttaccaacgagcggcaaaaggttgaaattatgctgaagaaggtgctgaaacaggacgagacctttggccttggcatgaacggcgaaattttgtcggtgcggttcggcctatatgccgctgaagatttgacggccgcggacggcagcactattccggcggacggtctgctggagatcgtttcctgtgatgaaaccggtaaatcagcctttaccaccgacataccggcgggcgcctgcctgtatgtgaaggagtacagcaccaacgagcattatcaaatcagcgacgagaaatatcctgtggtattcgaatatgccgaccaggatgtggcgattgttcacatccttgtcaacgacggcgtgcccattgaaaacgacctcatccgcggcagcgtcctgggcaagaagatcgatgaggacggcttcagcatcggcggcgtcctgtttgggctgttccggccagaagaaaccaccttcaccgaggaaaccgccctgctgacagcggaatccaacgaaatcggcgtatttggatttttcaatgtgccttacggccactggatcgtgcgggaactgaaaccggccccggcctttgtactcaatgaaaccctgtatcccgtcaccatttccgagcaggaggaaacgattgagatcacagcagagaaccggtatatcaccggtgctgtccaaaccaccaaggtggacgcggcgtatccaggcaacaagctgtccggcgcggtgtttgaggtctatgtggatgtggacggcaaccgggaattcgacgcggcaatcgaccggccggcggggaaattggctgaaaccgagccgggcatttaccggctggacgggctgcggtacaacggctatttcctgcacgaagcggccagtccagagggcttcctcccggatgaaggctactactattttgaaatccgggaagacgggaaaaccgtcattgtggaaaccgaggcaggagtcggctttctcaatcagcccgttttaggcaacatccgtattctcaaaaaggacgcggacaccggcgaacccttgtcgggcgtagtgatcggcctgtttgatatggacggcaacgaggtggcccgcggggtcacaaagtccggagagctgctgtttgagggtatccgctatggctgctatgagttgcgggaactggaagccaaagatggctactacctgctgaaagagcccgtcccggtggaaatatcggagcacggtcagacgctcacggtagagctgacaaaccacaaaattcctgaaattccccagaccggcgacagcggcacagccgccggcgtctgccttgctctgttcggcgtggccggcattgccctcgctttgacaggacggcgcagacgcagacactcttaaaatcaaaaaagaaagaggtatttccttatgaaaaaatactatatgtcctttgtggatttttccgagatcatcaacgtcacagcggacgaggagcagcttaccaaagcctgcggccgtatggaggaactggaactgctcactgaaaaaggcaatcccagccccgcacagatcgggattattgcccaggctgaagccggccccttttacgataagttgaagaagcggatctcgcggcgtccaggcggtatcgccggtgtcaaaaacaccatgcaaaagctgtatgaccgcaaggaatacacggcgctgtttttgtatctggcaatcctgtacggcttcctggagtggcaggtaccggaaaagattcttctgctcccggccgtaccggacgccctgaaaatctttgaaggagattttctgacagccttcgacgagcggctggcggcggaagccgcaggtgaatcgaccgacgcacagaccgaaactgaaaatctgtaaaacggataggcggggtcggctgtccggccccgcttccggggaaagcatctattaaacttcaggaggaaccttatgcgtaagaaaagacataaggtttttctcctgctcctatttacgcttctgctcacctgtcttttcacaacaaccgtatttgcggcggggaaaaacctgtttgaagtcgcggacgacatcatccgggacgtttacggccatatcgtcggtatctccacagtactggcctgcctgatgacggccttcgctatcatcagcgccaaggtgtccaacaaccagcacaaatccgaccaggcgtgggactggctcaaacggatctggctgtcatgggcgattctaaatctgatgggcgccattttggcatatatcacacctttgttcagcggatacgccacgctaccataggatagccgggacaggaggatgatatatgctggaaggaattttacagggcctgtgcgaatggatctacgggctgtttctggatctgatcgcttactgcgccaacgccctgctgggagttatgacaaccgacctcaccttttgggaaaccagcgtgccggttgtcaccaccctctaccaaatctttgtcgctgtcggctggggcctgctgatcggcaactgcgccttccaggccatgaaagccatgtttgccgggttcggctttgaaaccgagtccccggcggtgctggtactccgtacggccctgttcggcaccctgctcatcttttcccgggacatctgcgacatcggcctctctatcggaaaaaaggtgatcgacctggtggggattcccaccagcgtcgccctcaccttcccggacggaagctattttaccggcgtaggcgcgagttggctgttggttatcatcatcggctttattctcggctttcagctcatcaagctgtttttcgaggtcgcagaacggtatgtggtggtggcggtgctgacgctgctgtgcccggtgggcctcgctatgggcggcagcaaagctaccaaggacatctgtgtgggcttcatccgcacctatgcgtccatgatcgccatgatggtgctcaacgtcctgtttctcaagctcatcctgtccgccctggccaccatgccctccggtatctacgtcttgccgtggtgcctcctggtggtaggcattgcccgggtggcccgaaaggcggacaacctgatttctaaaatcggcctgaatccggccattaccggcgatccgctgggacacggccggggcatgatggcgatgatgatggcggcccgcactattatgaacagcgcctccaagacaggaaaaggaaaagccggcggcggaaaaatgggaggcaacccgcggatgccagccggcggcgcgggaaattcccataacgccgtgggcgggacgactgtcggcggcgcaaccgccagcaccaacgtccacagcgataccggcgtcgacgcccgttcccaggccgggcaaagcagccagagcagccattttggggcggcgggcaacacggtcaacgcgccgtcctcctcttcttctcggttcggctccagcagctataccggcgtgagcagttcgggttccgtatcttcatcttccggcggcgttcatttcggcagcaccgggacaacgcgtgtgaataccaaccggtttggcgcgcaccccggcgtatccggctcgcggccgggcggaaataagccgggaacaaggccatccccgcagaaaggcggcaaggccagtccgggaaagcccactgggactattccgtccagaaaaaggacacccggttccgctggcaaatcggctgctgcagcggggattcggcagaacgaaaatcctttcaaggcgcaaaggccgccgacgggatcggtgttcatatctcctgcccagcggcagccttcgacttctgccggccatatgccgcgtgccgatggggcagccatgccgaacaatctgccggatacctctccaagcgaaaaaggcggtgaagggcatggcgaataaaagcggcatggatcggcttgccgacctggcgcaccatgtcaaggcgctgaaagacatcatcaaagcggcgctacgcggcggctggcacgccgccgctttgcaggcgttgaagcattactggcctcagattctggctattgcccttgtcctgctgttcctgcctctgctgatttttctgtgcctaccggccatgctgttcggtttcggtagttcgggcggcggagccacggcatccatgtccttccaggctacgactgtaaaagggtattacggccggtacgccgaatactgtaccgcccgtatcgatgagataaagaaaacggtgatagacggcagcaccggcggcggggacgacaccgttcatgaaccgccggatcaggagtatgcctatgagatcgtccttaccggcgaaccgatggaggagaactggtttatcgccctgcactccgtcaccaccggcaacgacctgaacgctatgtcggagcagagcgtcaaggaatttgtagaaaagagtattgtctacacagtagaggataagccagcaggaaaggaaacaacaacgaccgggactgccgccacaaccactacaacagcttttcatgatgatacggtgaacaatccgccgacgccggaaagcaatgcggcatccgaaagcagtacgacttctgcaacggaacctccggcggcaacgaaaattctgaaaatccggtatttgtcgccgccggaattcctggactattaccgttattccgatgccgaccgaaactgggcgcagctcatggtgcagaccttagagcagggaacgtcctctgccgggtgagcgccaaattcatggacagaaaggaaatgctccgtatggacacggtatatattcccagcaactacaccgatgccggtaagctgctgggggcttttgcgctccgtcaggtagcggaatgcgccgccatctgcctgccgctggcggcgatggttttcctgctgtgccccctggggctgacaggaaaaatcattgtctgcgccgtgctggtcgtgccggccggcggatttgccctgttcggcatacaggattacagcttactcacctttgtccgtctttaccgccgctggcggaaaaacaggcggatattgatttacagggggacacaatggatacacgcaaaccaaaagaaaaacaaaaaaggctcgatttgaaatccctgctgctggggacttccaaagaaaccaccgtacccagaagccggtttccaaacggaacacagagccttgttccggtggtggacattaggcagggcgtccttatcaccgaggacggccgttacatcaaggtgttggagatccttcccaccaacttttatctgaaatcccgggtcgaacagcagaatatcctctactatctgtccagctatctgaagattgcgccgtcttccctgcaaatcctggtgacgacccagcgggccgacatcgacgcctactgcgcacagatggaacagtattacaacgcggaaaccagcgaagcctgcaaagaaatgatcgtggaagacgtgcagttggtcgattatctggcggccacggaaatcgtcactcgccggttttacctgatcttcgcctataccggcactgcgtcggagctggatgacatcgccagggagcttgccgagcaggccgaaaccgcctgtcaatatctcgactactgcggcctggaagtcctgcgtcacgaccgatacgacgagttcctgctcaagaccctgtacacggcgatccataaaccgcagaccagcccggtggatcttgccgcactgctttcccagatcggcccggtctgcggtgcgtccgacataccggcagaagagctggaggatggggatatggatggcgtgacgacggtgcaggacgtgttggcgcccaacgaatgcgatttgacccacaagggctatatcctcatcgacggtgtatttcatgcctatttatatatcgccggctatgggtatcccaccgagatgggcccggcatggctttccccgctggtggagctgggcgacggcatttctctcagcttttttctggacagaaagcgcaaagaacaggtgctgccgaagatcgccaaaaccaccatgttcaaccggacgcggctgcgggacgtggaggacacccgcgccgactttgaagaactggacgacgccatatcgtccgggctgtacatcaaggataagctcaatcgggaaggcgaggatttctggtatatgcacaccctcatcgaagtgaccgcgctggacagggaaacgctgaaccggaggattcagcaggtgcagaacctgtgcgcctccatgaatatgaccgtccgacgggccgactggtgccacgagcagggcttccgctccatgctgccggttgcccggctggacgccgacctcgccaaaaaagcccggcggaacgtcctcaccagcggcgcggccgctgcctttcctttctcctcctatgaactctgcgacgacacgggagtgctgctggggatcaacctgcacaacaattcggcggtcatcgtggacaactacgacacggagcagtacagcaacggctcgtttgccatattcggtatgtccggcgcgggcaagaccttcacgaccctattgtttgcgctgcgcctgcggatgcgcggggtgctggtctttatcatcgccccggaaaaggggtttgaataccgcgccgcctgcgaggccatcggcggacaatacctgcggatcgctcccggttccgacgactgcatcaatctcatggaaatccggcggacaaccctggacatcgacagcaacataacagacaacgtacagcgcagcgattcggtgctgctggacaaggtgcaggacgttcatacttatctgcgcctgcggtacccggaaatgacgccggaggaatcctaccagcttaacattgccctgctggaatgctatgagagttttgggatcaccaaagacaacgcttccctgctgaagccggacggctctttcaaggatatgccggatttcgcccatctgtatcccttcctgctgaaagttcccgtgctgaagaacgtggcgctggccgtcaaggagctggtcgacttcggcatgggcgggcagaccaacgtggatttgacctcttcttttatcgtttttgatacgtcgggcaacaagcagcaggacatcagttcctctatcttcatcgccacctcctttatccgggacgaggccagccgctcccgcacccgtaaaaaagcagtgtttggcgacgagctgtggctgattgcggggaacgaaggcaacgagcaagcggcggattttgtcatcgggctggcaaagaccatccggggctatggcggcatcttcgtcagcgccacccagaacaccatcgactactttgctctgcgggacggcaaattcggcgacgcaatcctgaacaacagccgcttcaagctgctgctccaaatggaagaaccggaggcccgcaagctccaggaaaagcttggactgtcggaggaagaagtcatgcagattgtccggtgcggccgggggcagggtctcctttgcgccgggaaaagccggatctgtgtggagatccgcgcctcccagatggaatatg

SEQ ID NO: 3314 - DNA, 2192 bp, Unknown
  16S sequences of unknown bacteria
atcggggaagaaagacgccgccaagagcgggggcagccccccgcccttggatctcaccccctgtgtaccgcatcgggactacagccgcacactgtaccggctaccaggcaagcttgcgcctgcatccgtgccctgatagccggtgagcagaccgcttgccgcttcgctgtagcttacggactgcggaggtgatttgtaggccgccgtggtcggtagcttgtggcatttgttggggcgtgtgcaggaagagggggcgtcttgtttttgttttgtcttccttttacaatacaaattgcagcagaagcatgtagcagatggtgccgccggcgacggagaggagcatttggcgtttccagagatgcagcccggcggtgacggcgatgccgagcgcttccggcaggccgtagctgtactgagtcaaggagacgttccgcaggcagtagacgacaagcatggcgaagatcgcccccggcaggaccttgccgaggtagacaatgtatttgggcgtcggcttgctggcccggaagacgagaaatggcaaaaagcgggtcagcatcgttccgaggacacacaagccgatggtgattacctgttgggtcgcagtcattgcagtgcgcctccttcccgggcctccagcggcttacgcagcagcaaaagcgacgctaaaatgcagaccatagtcgggatcaaaaagccgtcggccccgaacagctgcaggcagagcacgctggccgccagcccgatgagcgcgctggcatgctgcttgtccttgccccactggtcgaggaagatgacgacgaacatcgccgtcatcacaaaggagagcccttccgtccggatcgtgatcaggctgcccagcaggccgcccagggttgcactgccgacccagtaaagctggttgagcagcgttacaaaaaaatagaaccagccccggtcgatctccggcgggatctcggcggagcagttgatgctgaaggtctcgtcgcacatgccgaagatcaggtacggctttttccagcctgtcccttgaaccagtcgagcatggcgatgccgtagaacaggtgccgcgcctggagcatcagcgtcatgataaacgtctgcattggcgcaaaaggcgccagcagcatactcgcggcgacaaattccaaactgccgccgaagatcagcaggctcatcagcatcgggtaccaaaatccaaagccggagacccgcatataaatgccgtaggtcatgccgagaaaggcgaatccggcaaggattggaatcgtatagggaaacgcgcaccgcagtgccggtaagatgcgccgctgcatatattgtcacgccttgttacatgatatcgtgacctagaatagcacaccgcgccccatcttgcaacaccgcgcccatggacgggagcgctgaaattttgccttgacagcggggaattttttcctacaatagtaagaaatacagtaagaaatatataaagactgtggcaatacgcaggaggtaagtaagatgtatcttgattggacgtatattgttctggtcctgcccgccgtgctgttttccctctgggccagcgcccgggtcaaccggattttttcccagtattctgccggccgaacccgccgggggatgaccggcgctgcggccgcccgggcggtcctggacgccaacggcctgcaccaggtgcagatcacccgtgtctccggcaatctgacggaccactatgacccgaaggccaatgtcatccgcctgtcggacagcgtttatgacgcgacttcttgcgccgccatcggcgtcgcggcccacgaggctgggcacgccatccagcacgcccagggctatgtccctattaagatccgcagcgccatcgtcccagtgacaaacatcggctctcgcctggcgatgccgctgatcctgatcggccttgtcttttctgcctacggcgatctgttcatcagcatcgcctatgcaggcgttgcctgctttggcttgtgtaccgtcttccagctggtgacactgcccacagagtttaacgccagccaccgggccctgtgcgccctgcaggagaacggccttttgtatgaagatgagctcagcggcgcgaaaaaagtcctctgggccgccgcgatgacctacgttgctgccctggccgtctcgctgatgcagctgttgcggctgcttctgctcgtcaacggccgcag

SEQ ID NO: 3315 - DNA, 10482 bp, Unknown
  16S sequences of unknown bacteria
agaattaaataagtttctttcgttacaatatcgtcgccaagttgtggtgccaagtggcggttgcagtttagttgcacgtttggtgttgacccaattaatagattcgtctttgagattattgcggtctttccgccgccatggattgggcgaagtaggtttgcgtttatgtgaattttgccgaaaaatgacgttttctctgtttcgttggaatttgcttattatcatagaaataagcttggttgccgtttggttgcactttcggcgaaaatcgggcttttcggcggtgcgtttatcaataacttacgtctccaaaatcgcccgcaaagctcggtaaatactggaattgtgccttcaaaaactgaaaaagtgcatttttcggcaaccaagtcggcgagttaatgtaaacttacgaaaaacaaaaaaccgcaagttattgaacttacggcttttaaaatggtgggagtagcagaactcgaatctgcgaccccttgcgtgtcatgcaagtgctctaaccaactgagctatacccccgctgttttgttttaaggcttctatccaatattatatctgctcttttgcaagcatttttttcaatattttccaactacaatctttaaatgccgtatttgtttaaaagaactttccgctttaccccgccctttggcccgcaaatatacagatggtctttatccaaccaatcaattcttagccgaatcctaatcttcttccaacagcgcatcttttacaagcccgctaagatatggaattagctgcttctttctgctgactattttgggaagttcgtacaaatcccgcttggcgtcccttacataaccaatcttctcgcgtatcttttcgccgccgcttatcataagcagagaatcctgcgtcataacatttgtgacaaacagtgcggaaaatagcagcccgttctcgcgcctgtatttttccaatgctccgcggatttcttcgagtctctcaaagaatcttgagaagtccagctcctctatttgcgaaactgaaaattccacgttctcctctttgtatctcttgcagtccgacgttattatttccacggcgtcgtttacagacagcgcactgtcggcgctaaatatgtaatcggcaagttcggaggaggtcatacctattatttcgcttaggtattttatctcctcggcgtcctcttttgtcgctgtcgggctttttaagtttagcgtgtcgcagactataccgctgcataaaagccccgctatctgacggctcggttttatgccgttttccctgtacagcccgcttactattgtgcatgttgagccgactggcttgtttaaaaacaatatcggcgacggcgttgcgcttacccctattctgtggtggtcgattatctcaactatatcgcactcgtccgccccggtgactgcttgcgaaagttcgttgtggtccaccagcacgagtttttgcacccgcgcggatatcaattccgcgggggacaatattccgcgcggcctgttttgcgaatcgcacacatatatcgtcttgccggagtactctctcgcgcgcgcggatatttttgaaatcaaaaagtcttccggcactactgccacatcctttcggattagcggcaatgcgcgcgttgccattctcacaagcagtgctgttgtggcgctatcgtatttgcacatcagcacgcttacgcccttgctttgcgccatatcgactaccgattggtctatcccgtaaccgcctgttattattattgcgcgcacccccatttgcaccgcttttatttgtatgtcgaacctatccccgacaactattagattctgttcggggggcgtcccctcgcgctctatgaacgacccgaatgtcgatacttccatcgcgcctatcctaacgtacatctcttcatcgacgtcgcctttgaatttgcagagggccgttgcgttcagagtctttataatatcgtcgagcgttgccctgactctgcggacttctttcgcggattttgggtgggggataaaaaattcgccgaggtcgaatacgcatagttcgccgagaagttttccgccggagtcgatcattggcacggagcggatgtcgttcttgtcgatggcgtccattattgaaaagcatgaggcgtcgtcgtgcatctttataaaatccgcgttcattgcgtctttcgcgcgcgcccggacgtcgcctacaaactgggggagagctgcggaaaatttttcgagtattctgtctattctcgcgttcgagtttccgcagcgcgcggctttgtaattcttttcgccaatcgactctttaaagtcggcgtatgcgagggccgagcatattgagtcggcgtcgggatttttatgccctattatataaattgagtccattttaacgttttgtttgagcggctaaattatccgaacccgccgcgccgcctttgcgcattgagaattcgcacccgcagtattgttggttgtagaacccgcgttcgcgcaggatttccgcgcgcctttgggtcagcccgcctttgcgccagttgcgcgcccaaaattttggacctgcaatttcttccgcaaattttccagcctcgaaaatttgctctatacatttccacctcgacgaggacagcgttgtcgtgaaaactgaatatccgtgttccgcggcgtattgcgcagttttaagcagcctgagcttgaagcatacaaggcatctgcctccgcgctcgggctcggcgctgagggcggcgcatttttcaagccatatatcgtggtcgtagtcggcgtcgataaaatcagcgcctacgctttcggcgaatctcatattttcggattttctaagctcgtattcttccctaggaaagatattggggttatagtaaaacacggaaaagtcctccgcgctctttgagagtgtttctattattgcggccgagcacggcgcgcagcacgaatgcaatagaattttgcctttcaccggcgggtgcaagttgggaatttctctattcctcaaagacgacatgctgacagtgtcgtaagcctacctctctttgtcaatttttatcggggaagcgtgcgcataaaaaaaacgcccgaagaaaaatcagttttcgtggcgtctttttatagaggaatctttatctaaaacaaaaaagttttattatctgaatgtcattattgacgaatgaatgcgcgatgtaaagataatattttgaattataaaattaataagttcataactattatgcacgaagatttttaaatttgctgtcttcagcgcgcctttacgctttatttgtggaggcttttgcggtgcattgccgcaaggatttttagtttgtagaattgcatttaacggtggcaccacaagcaatagccgtacggaatttttttacgattctctccaaattggctttaatctgcatgcttacacaaacgaatgcaaaaagccgccgcatatcggaaaatttttaagcggctaaggccgcccaagcttttattttatcttgaaaacattcccatatttgtgaaattatgttttttatgttgaaaatcggcagaatccccgcggcattatttttcgcggcaaacttttttgcgttggcggcaggcgcaaatccgcaaaatgcgcactccccgacggcgccgtttgtcgattcggcgcaaatattgaaggcgggttcaaaaatcagggaagagtctgcgcgcgacgccctatcttccgggctcccatcgcttgcgcagctgataatcgaggacggcgaaaaagacggcggcggacaaatcggcacagacgagattctcgtttacgttgattcgctaatcgcgcaggggaaatttgaaaaggctctcaggcgcatattgccaatcgcggagtcagcccctacgccagaaaataaaattagggtggcgctcgcgtatatagggcttggggaggccggcaatgccgaggaagcgatatcggcagtttcggaagaaagcgttccggaatattttaaagggtggtattaccttgcgttggggtatattgcataccaaaattccgatatgcctaaggctattgcggattttgagaaagcaaagtccgcatcggtgggggagcatatgctcgccgacgcaaagatcgcgttgaacatagcaaggctcgccggaaatctcagccgcgaagacctcgaaaaaatcgaggaggagcttgccgacaacgtaaaaatatacatgggcactaccgccggattccagtttgccaaacagtacgccgccgtcctctttaagcttggaaaatttgacgaggcggtggagacgattgagcagcaacttcaaatagagcttgcggacgatattgaccgcgaagaattgaggcttataggcgctctcataacgcgcaattcatcgcgccaacttgcgatactgcgcgacgttctcaaaaagacatcttccccgggagtcgccgaatacgcgatagcccttatcgaaaaaaatccggaaatcaaaaccgaggatttcgacgcgcttatagacgacgtgcttgaaaacggatccccgaaaatccgcgataaaattctcttagagaaggcgaagattctcgttaagcgcggcgacgacaacggggctgcaaagtttgccggcaggcttgcggcggaatatcccggttccgaatacaggcgcgacgcgcttagaatactcgcttgggcggcgtattccgaggcggccggcaaagcgccagaatacaggcttgctgcgacctatttgtccgagcttgcggaggttgagaaggactcgaagcaggcggggctcataaggatgcttgcggctgattgttataggctcagttccgactttcagagcgcggctgcaatatacaggtctcttataggaagctatcggtcgaaatccggtctcatattgttcaaggcggttgacgcaatgcttgaggcatccgacgaagaaagcgcagtacgcacgctcgacgacgcatgggagtctccgtcaatttccgacgacgaattgtggaatgcagaatggctgttaacccaaaagctgagggtctcgggccgctccgacgacgcgcttaatcgcatagaaaaacttttaaagctgaaaaagtccgacaatctaaggggcaggcttctctggctgaaggcaattattttgagggagaaggcggattatgcggacgctgaaaaaatttgttctgaaatattgtcaataaaaggactggcggcagatgtggcttcgagcgccatgcttgtcaaggcgtcgtgcctggaactatccggaggagcgaacggatcaaagaaggcggttgaggtttacgagaagctgaggaaggattatccgtccacggacgccgcgcaaatatcttatataaacgaggcgagagtcgaagcttccgccgggcggtattcggaggcgagaaagttatgccttaccttatgcgagaaatatccgaagggaaaattcgcgtatgccgccttgttcgacgccgcaagatacgccgcaaaaatagggcttgaagctagctataaagacgcccttgcgcttctcgacaggctgtgctctacatatcccgacgacgctcgaaatttttacgcgcggctcgaacaggccgatatcttaaaattgctgaattcgttcggcgacgcgcgcacgctttacaatgaaatattgaacaagtaccagtcgcaccccgagatacaccttgcatggctcgggctcggagacgcgacactcgcgcagaacacgaggtcgctcgacgcagccgcgatatttgaaaggctgtattcgcttcccggaatgccgccggaagcgcgcgcggaagccgcgttcaaatggagcttcgccctcgaaagggccggaaagcggagcgaggcaaacgatgtcaggtggattacgtcctcggagcttttaaaaggcaaccgtagccgcggttcgggagagggatattggataggaaggtcgctttacaatctcgcaaaatcgatggagtcggaaaaccggaggcgcgatgcaagaagcgtgtacgaaatcatcgtaaaaaattcgcttccgccgctgcagctcgcgaaacagaagctcggaatggacaaggagaaataatttatggaaaaaatagcggacatttttaaactcggcgggccgatggtgatacctcttgcgctgcttgcctttgcggggataataatatttatcgagaggctattgtacctgcataaggggcaaattcgggcggttgagtttgtagcggggataaagactgcgttgaaaaagcgcaggattctcgaagccgtgacaatttgcgacgaaagctacgggccgattccgcgcgttataaagacggcgctgctcaattttgaggaaacgcccgaaactatgtcgcaggctgtaaacatagccgcagcaaacgaatttgccctaatcgacaggagggtttcgagccttgcgctgattgccaagctcgccccgctcaccggccttgcgggtacggttttggctattttgcagattttccagaaaatggcggaatcgggctcgtacgcgaatgcgtcggagttttcctatcagatatacaacgctctgctttcaagcgcggtcgggctttttattgcaatacttgcgtggcttgcgtacgcgctgataaacagtagggtaagggcactcgcccaggatatagactggtcagcgaacgacataatgctatttatcatacgcggaatgcccgaaaatgaaaatctccatatggacggggagcgcaagaaatgaaccttgtaaacacaacgtcgagggtgcgcaagcaggaggtgtcgctcgacgccgttgcgctgttcgacatattgctgatagcgctgatgatgacgctattggggtcgagctttattgcggcgacaggtcttgggatatcgtttggcggcgatgagtcctcgctgccgcgcatggcgtctcccgacgaggttattgccgactcggatgtggacgtgctgtcggcgcgcggagactcaatgctgatatttgccggcgcaatttatagcatggacacatttaaaaggactttcacatccggtgcaaagcccaaacaccgcgggactcttttaataaaagccgataagaatctggctgttcaaacccttatagagatatgcgaagccgccaaagccgccggattcaaaaacgcaataatagcagccgaaccgaatgaatcgaagtagtccatatcggcgaatgggtgaccgcatatacgctgttgtttcggtaataacggcgtcggcatgtgtaggagcgtttatatattttcttcccgatgctaagccggagcttcttccaggaagcaacttgaatacttttgtaaaaatccgcgataaggtagagggggaaaacgacgaaataggcgttgacgaattgtcggactactctccgctatttttgccgacgcgatggaattacgggcgcgacgcatattcgcccgactataaaagtatgtcggagcccaaagcaatcaaggctacatacgcagtcccgctggaaaataaaagcattgttttggagaaagacaatattgagtccgcgaaaactgggttgtaccggtccataatgcgaagcgtattttccgggcttgggcgcaaggattcaaaatccgatatagtagcggagaggagcgcattgataaaagtcgtggacatgtcgagcgggaaaacggtaaagagggtttacgcaaatccgaatacagacggaataatgatatcgcctgcggaatttttggtagatgtttttaatggtggattggcaagccgcccgctgttgcttaaaagttccggttcggagtcgaacgacgcggcgatagtgaagttcattgcgcagaagtcgatatttagggagcttggcaatgggcagtataaagtgatgtttactttttaggggctgagaagttttggcgaaaaggtaattttttttcatgaaaaataaaaaatagcttgcaaagtttgaaggggagtgcatttatatagggctttaaataagtaagtgcgcctttagctcaattggatagagcatctgactacggatcagaaggttgggggttcgactccctcaaggcgcgccacttatagacgcggtttttgccgcgttttttttgcaaacagcgctggggcttttgtggtttccacgcgtaaaaggggtaaacgccaaaataggagattttgggtcaacaccaaagtcagtggattttaatgaaagacgccgcattggacaaggttctcaatctacaattttttaagtttttatagccgtaggcagggtattgtattagcttaatcttgcggcggaagccctcaattatttcattatttttcgaaaacccccacattcctattattggtgcaaactattcgcttatttaccccacgagatttttaagcctaacggcgtccaatatttcattggataagtttcagtcgtcgaatgtattttttttcagctctcctacttgctacgagagattttttgcgcactgaaattgtctgagcgaaagtaggcagaaaatttacatttacagtaaggtcagggtggtttatatagttttattgatgagtatttgccattgtccgagaaaaatgaaatattttacaattagtaattctccaattggccgtattttgatgatgagcgacggagaaaatctcaatgctttggaagctattggaaggcgcgatattgcgtcggacgggcttgcggaaaagaaagatctccctgttttcaaatcgacatacctatggcttaaaaaatatttctctgggggaaatcctccgatatcgagcgtgccaataaagccgttagaaggtacgccgtttcaaaaaattgtctggaaaattctgctcgaaattccatacggctcgactaccacatatggtgaaatagcaaaagaggcggcggggcggcttggaaagtcgaaaatgtcggcgcaggccgtcggacaggctgttgggcaaaatcctatatcaattataattccatgccatagggtcattggcgcaaacggcaatttgaccggttataacggaggcatagatgtaaaaattaaacttcttgaaattgagggaatcgacacttctcgaatgtctcatcccgccaaaagcaagaggcaaaagtagtttttagagtctaaaattcgcatactggaagttctgatgagtatatacctttatttaggtaaaataaaaatatatgagtccattgcattcgaattaaaatttgcgggtaatggagctttgcgttttcggtattaaattattttatgctttatatttcatttctctaaaaagacacagttcttgcttgttgcgagcgtatggcaatgcaagcattaaactatttctatatgtttgccgtgcaaattgtttatgggcaaacaatgcatgtgaaacgactttattttaactgtcgggatttccgcctacgataacgcatccattatctttttcgctgagtctgattatagttccgctaggcaattttagcggcaaaaattctcctccttttaaatcgattttttcagcatgtatgtttgaaaatacttcccgcctaatttccatgcgttcgctgttttcaaaatatccataaatgtttatggtaaccttgtctgggaaaggaaagtcggcttgtatagaattgtattcgcagtttacttcccacaaagatattgcgtttgggtcgtttgaacttttatggaaatatttttgcggaacatatacaccgtttatcttttttaattttactataaccaaatattggagattttgctgaaatggcaatgaaagttccagaacaatatctttatcggtatgtgacaacaccttaacgttaccttttcctttgagagcatcctgtattgctttatcgtatgtcttatataaaaatggactctcattttgaagatacttgggaattgccaaaagataatctgtgatttttgctacactgctttttgtattatcgtttaaatagtcaaataccgaatacttaaatttgttgtcgtaaaagatgttgtattttccttttataattatggccttatattcatcagggtcggattgaggggcatacttccaaaatgtaatgtcgttgtaaaaatctaattttaccgtcaaattatatttttcagcgacatattttttcttggcggcttcaatggatgtattatagagctttgcgaaataaagcggcttgttgctttcatctacactttgattgtaagatatcgagatcttgtttgagcgatagtaatcggaatataaatatagcaaatcgggtcttatatctgcaaaatcctgcaaactccccccgaatgaatttagcgcagataaaataaatattaagatgtattttctcataatgcatttattttgctatataaaatataaccttttttcaaaacgccagtgcataactggcagtagatgtttttagatattgttgattgtttgtaaagattaaagtt

SEQ ID NO: 3316 - DNA, 3087 bp, Unknown
  16S sequences of unknown bacteria
gccacgtgggcaagctcgccaaggtggcggccggcaacatgaacacgcattcgcgcgtgtccgacgcccgacgcgagacgcttgccgcacatgcggcgcttgcgggggcatcgcgcggggtagtcgccgcgatcatgaacagcggcacgaccgacgagatcttcgacctgctcgatgcggaagggctcgtcgggcaagtgatggcgacgcttgtcgagcggctcgaggcccagctggaacatcgtaccctcggacgtctgggcatcggtgccatcgtcttttccaagacgcgcggcgagctgggatccacgtcgcatgcgcatgagataatccaattccacaggcaagccgggcagggcgcgcctgtgcacgagaactaggagggcacatgatccacttcatcggtgccggaccaggagcggccgacctcattaccgtgcgcggcgcaaagctcctcggcgaggcggactgcatcatctacgcgggctcgctcgtcaaccccgcgctgctggactacgccaaggagggctgcgagatccacgactccgcctccatgacgctcgaggaggtcatcgcgaagatgcgccagatggagcgcgagggcaagacgaccgtgcgcctgcacacgggcgacccgtcgctgttcggcgcgattcgcgagcagatggacctgctcaatgcagacggcatctcctacgacgtgacgccgggcgtctcgtcgttttcgggggctgccgcggcgctcgaggcagaatacacgctgcccaacgtgtcgcagtcggtcatcatcacgcgcatggagggccgcacgccggtccccgaaggcgagaagatggcgaagatggcccagcacggctgcacgatggtgctctttctgtcctcgagcctgctcgaacaagcgcaagaagagctgctcaagggcgcgtacacgcccgaaacgccggcggccatcgtctacaaggcgacctggccggacgagaaggtctaccgctgcacggtggggacgctcgcccagaccgcgcgcgacaacaacgtgaccaagaccgcgctcatcaccatcggcggctttcttggagacgcctacgaccgctcccgcctctacgacccgagctttacgcacatgttccgcacggcaagcacccccgatggcgagggacgtggctagatgaaggtcgcgttcatcgcattcacgcggcgcgggtacgagacgatgcagaacctcgccgtgaacatggcgctcaactccccgcgcatcggagacgagttcacgctcacgaccacgaagcgcctggcagacgaggtggggctcgacagcttcgacgacctcggcgtctggacgggcgagcgtttcgccgattccgacgcgctcgtcttcataggggctacgggcatcgccgtgcgcgccatcgcaccccatgtgcgcgacaagttctccgacccggctgtcgtgagcgttgacgaggcggggcagtttgccgtgccgctgctctcggggcatgtgggcggggcgaacgaccttgcccgcgaggtcgccgcggcgatcggcgcccgtgccgtcgtctcgactgccaccgacgtgaatgggcttttcgccgtggacgagtgggcgaggaagcagggactcgccctcgtcgagcgccagattgccaaagaggtgtccgcctgcctgctcgacggcggcacggtcggctttgcaagcgacatcgcagtggaaggcgcgctgccttccggtgtggaggagggcccacacgaactcggcatcaaggtcggcctcgacacagcggactgcccgttcgcgcgcacgctgcatctcgtgccgcgtgtcgtgacggttggcgttggctgcaagaggggcaccgacgcggcggcgctcggggcgttcgtccgcggagcacttgccaacgcgcacatcagcccggcagcggtcgcgcgcgtggcctcgatcgacgtcaagcacgacgaggaggcggtcctcgcgctcgcgcgggcgctggactgcgagccagagttctattcggccgaacagctcgccgccgtggaggggacctttgcctcctcggacttcgtcaaggcggctgtcggggtcgacaacgtatgcgagcgcgctgccgttgcgggcggcgcgcgcctgatcggcggcaaggaggcgcatgagggcatgacggtagcactggggcaagacgaggcgtcggtacgcttcgatgggggcgctgacggcgcggcacagacggcagacgatcgggtcctgctcgtcgtcgggatcggcccgggcggcggaagcgacctgacgcggcgcgcctacgaggcgctcgagtcgtgcgacgtgatcgtgggctacacggtctacaccgagctgctcgaaaaggagtttcccgacaaggagatgctcacgacgccgatgcgccgcgaggtcgagcgctgcaagatcgcgctcgagcgcgcgcaagccggcgagcgcgtcgccatggtgtgctcgggcgacccgggcgtctacggcatggcgggactttgctacgagctcgcgggggagtacccgtcggtggacatcgaggtgatcccgggcatcagcgcggcgttcggaggggccgcggtgctcggcgcaccgctcatgcacgacttcgccgtcatctcgctgtccgatctgatgacgccgtgggaaaagatcgcaaagcgcctcgagctcgcggccgaggccgacttcgtcatctgcctgtacaacccctcctccaagaagcgtgcagactacctgcagcgggcgtgcgacatcctgcttcgccacaagccggcctcgacggtatgcggcacggtgcgcaacatcggccgcgagggggaagaatcgcacgtgctcaccttgggcgaactgcgtaacacggcagtcgacatgttcacgaccgtctacatcggaaacgagcagaccatgcagctcggcggatccatggtcacgccgcgcggctacctgcagcgcgaagggcgggcgtgatgcccgcgcagccgcacatactcgtcttcgggggcaccgtcgaggggcgcgagctcgtcgaatggctcgcggcgcgcgcgtcgtgtctggtcacgtcgtgcacggcg

SEQ ID NO: 3317 - DNA, 23262 bp, Unknown
  16S sequences of unknown bacteria
gatgtgtataagagacagggttacgcttgcttgcacagaatgcaaacaacgcaattatgacaccatgaagaacagaaagaatacaccggaccgtatcgagatgaacaaatattgcagattctgcaaaaagcatacggcgcacaaagagacccgctaagaaggcaaacgttttgtaaggatgtgagacaaccctatggccaaggacaaaaaagccaagcagcccgatcccaaaaaaaacaaggcgaaggacacgaaaaaagcggccaagcctaaacgcggcggccggatcgtgcgctttttccgcgatatgggctctgaactgaaaaaggcaacatggcctaccaagcaggagctggcgaagtataccggcatcgtgcttttattcatctgtgcgtttgctgttgtcgttggactgatagacctcggtcttacaaaactgttggcgcttatcgtcggctaaggaggtctttgatttgagtgatcatctgcaaggggaaggcaccacaaccaccgtacagcagggacgtcatgaaacgacagaccggccgatgtggtatgtggttcatacttatagtggatatgaaaacaaggtaaaggccaacctggaaaaatctgtggaaaaccgcggcatgcaggatgtgatcctggaggtaaaggtgccgatggaggagtccatagaggtgaaaaacggtaagaagaaaaccgtttcgcgcaaggtgtatcccggctatgtgatggtcaagatgcttttgaacgacgaaagctggtatatcgtgcgcaatacccgcggcgtaacgggctttgtgggcccgggcagccggccaattccgctgagcgatgcagaggtgcgcatgacgggcattgagaacgtttccattgatatcgatgtggaagtgggccagaatgttacgattacaagcggaccgctggaaaactttgtcgggacgatacaggagatcaataaagagcggcaaaagctcaaggtatctgtttccatgtttggacgcgataccatcgtggaactggattttgtgcaggtacacaagatctaaacacacccaacacagtgcatagacgcatttcgcgtttgttgcgtgggaggggcatccccccgttttgaccacaatagaatcaggaggtgcaaccatggctaagaaggttgccggttttatcaaactgcaaattcccgcagggaaagctacccctgcaccgccggtgggccccgctctgggccagcatggcgtaaacatcatgggcttctgtaaggagttcaatgaacggacaaataaggatgcgggcttgattatccccgttgtcattaccgtatatgcggaccgttcgttctcgtttatcacgaagaccccgcccgcagctgtcttgattaaaaaggcatgcaacatcgaacacgcaagcggacggccgaaccgcgacaaagtcgcaacccttacccgtgcgcaggtagaagagatcgcaaaaaccaagatgccggatttgaacgctgcatcgctggaagccgcgatgagcatggttgcggggacggcccgcagcatgggcgtcaccgtagaagactaagcgcaaggaagtgggagcaggcaactgcgctatgaccacaaggaggagaaaccatgaaacacggtaagaaatataccgacagcgccaagctgttggaaaaagggaaactgtatgacctgaccgaggcggtagagctggtaaagcagactgccaaggcaaaatttgacgaaaccatcgagttgtccgttcgcttgggtgtagacccccgccatgcggatcaacaggtgcgcggcgcagttgtattgccgcatggcaccggtaaaaaagtgcgcgttttggtattctgcaaggcggacaaggaagcggacgccaaggcagcgggtgcggacttcatcggcggcgaagatttgatcgcaaagatccaagaaggctggctggatttcgatgtggcggtagctaccccggatatgatgggcctggtaggccgtgtcgctaggatcttggggccccgcggcctgatgcccaacccgaaatccggtacggttacgccggatgtgaccaaggccatcaacgatatcaaggccggtaaggtagagtatcgcgtagaccgcagctctatcatcaatgtaccggtaggcaaggcttcctttgaggcaaaccagctggatgaaaacatcagcacgctgatggatgccatcgtaaaagccaaaccggcttccgccaagggcacctatttgaagtccgtggcgatttccagcacgatgggccctggcattcgcctgaatgcacagcgtttcctctaagccgttgacacgcctgggacaaggtgatatactaacacagtaaaatttatgatacttggattgccgaagacagctggtgcgcgtttgcgcttaaatttgcccgccgaggatgacccaaaagttacggtatgcccggaatggggcatagtgtgtgatgatttttgagcctccgaagcgctgtttcggaggcttttcttatggacaggtggaggtgaaaagagtgaaagaagcgattctgcaacaaaagcaggggatcgtggaggatatcaagaccaagtttgaaacctgcaaaagcgcggtcttgatcgattaccgcggcctgacggtagaagaggtaaccaacctgcgcaataagttccgtgaagcgggggtagagtatcgtgtattgaaaaacacgatgatccgccgtgcggtagacgcgctgggcatggaaggcctggaaccggtactggaaggaccgaccgctgtggcgtttggcatggaagatgcagtggccccggcgaagatcatcagcgactttatcaaggaaaccgagaagaccgagatcaaagcgggcgtcttggaaggaaaggtcgtagatgtggcggctgtaaaagcgctggcgtctctgccgagccgcgaagtgctgctggccaaggtactgggcagcatgaatgcgcccatcacgggatttgttacggcgttgtctggcaacatccgcaatctgctgtatgtattgaatgccattggcgaaaaaaagagcgcataagccattgcgcgtaacaaaaaaaataaacaaatgaattggaggatattacaatgaacaaagatcagatcatggaagccattgaaaatatgaccgtactcgagctgagcgagctcgtaaaagcgatggaagagaaattcggcgtatccgccgctgctccggctgtggctgtggctgctgctggcgctgctccggcagaaggcgctgccgctgctgagaagaccgagtttgacgttgtgctgaaagaggccggcgatcagaagatcaaggtcatcaaggtggtacgcgaggcgactggcctgggcctgaaggaagccaaagacctggtagacaatgctccgaaaaccatcaaagagggcctgtctaaggaagaggctgagaagctggaagctgccatcaaagaagtgggcggcgtcgtcgaagtaaaataacattggcaaatgaaaagcaccggattttccggtgctttttttatgacacaaggccgatcaacgattgcaaatggacagcgaggcggtcggggcagtcccaaaagggggcatgcccgcagtggggcagaatgatggggtcgcgatgggatagctgctgggcggtttgccgcgcttcctcgtaggaaatgatcccgtcatcctctgcccaagttgccaaaacgggcatggacagcgagggcggctgcaaaaggcccggcgtataaccgttggaaaaagcggagagattgaaacgggccagcgcccaatataaatccgcaacgctgcgctgctggagagatacatgggcaagttgacgggcttgtgcggggcttggtttttggtgtacaaagatggcgcgttcccatagggccgccatgccctctgaatcttgtgagcggatcagggagagcgcgggagcaacctgcgtcggctcttgcgccatttccttcgcgctgcggtaagagcctctccgcggcgtaaacaaggggcagccggcaacaccgacgctttctaccaagcatatagcgcgcaccaggtcagggtgcttgagggccagagacatgcatacagggccgccggccgaccaccctaccaagatgacaggcccaagccctaaatgccgtagtaacgcatacaggtcctctgaaaggtcatcaatgctatgaagcggcgtatggtagctgctttttcctgctccgcgcaggtcaggaatataacaggcgatcccctttggcaggtaaggaagaaagggtgcgaaatgtgcgccggcgcacagattgccatgcacaaggatcaacggcgcgccttggccgatgacttgatagtatagggattccccctgcggcaaaagggcatagggcatgctgttcctccttttctaaaagcaaaataggcaggtagcctgcctatttcttttttcttgcgcggatggttttgccaaaggcctcttggatcgcgttggcaaacgcatccagccccttggtgatggcgatctgctgttcgggggtaagggataaaaacgcatccacctcggcctgctccatttcccccatcagggcgtctgcataaatctgtccttcaggagtaaggcgtacaaatttgttgcgcttatcctttgggttgttttcccgaacgatgagcccggcctcctccatctttttcaaagcagaggagacggtctgcttgggcagcagcaccttgctgacaagcatgctctgcgtgcaatactcaggattgcgatggatctcatccagcaaaaacatggtgctgtcctgaatgccgtggcactgggcccataggttataggtttggttgatgcgaaaccagctgatgtaatacagatccaaaaactcctggatctcgtcaattttatgcgtcgatggtttgggcgtttttggcgtcgtcgagttcggcgtttgcataggcggtttgctccaatctcaaatgctctttatgaattctgtataggtacagcaggcttaaaaccagcagcccctgggccgccggcaaggcgatccagatgccgtcgatggcaaagatcagcggcagagtaatgagcagtaccggcgtaaagaaacaagggtcggcataaatcatgaacagagcaagccgatcttctcctactgcgtaaaagtaggaagagaaaagcttggcaacggcaatgagcgggaacgcgaatacggaccataacagcgcattgaccatcagtgcgctggcctctggcgatgtgccaaacgcggcaggcacagccccgcgcacaaggaagagaatgacggacagcgtgcaactgatgatcagcgccacgcgcagccctttgtttttcacggctttcatctgttgatattcgcgggcacccttcaaatagctaatgagcggctgtagcccttccccgatgccggataggaacagcattacggattctacgatataggaggccacagcataggccgccaccgccgcttccccgccataggcaaggcattgccagttgttgaaaatcaaaatgatggaaggggaaagcgacaggccaaacggggaaatgccggttcgcagaattttgccgcacagctttttctccagcttgaaatgctggggcttaaagtgcaggcggcggtccttttcccggaccagcacaatcacgctgagcacggctacgatgccctgggccgtaatggtggccagggcagcccctgccattcccatctgaagcggcataataaagtaccaatccaacaaaatattggtaagcaggccggtgaccatgatgaccatggccgcaatggttttgcgggaattacgcaaaagcggcgtcagcccggtaccgaaaatttgcagtgtacttccggcgatgatgatcattacatattccgaggcagcggtatgcacagcaccctccgcccctagtacacgcaagatgggctcatgtaaaaataggaaaaatactgtcagcagcgcgctggccatgataagaagcacgatggtattgcccttggctttgcaggcagaaggataatcgccctctccgcggcgggtggacatgatgacagacccgccggtgccgatgccggtacccatggcgagcagtacagcggtgatgggccaagcaatgttgatagcggctaggcctacatctccaatggcgcggccaataaaaaaaccatcgacgatggtataaaagccgctgagcagcatggtaaacatggacgggactacatacttgagaaactgtttttcgatcggcttgcgatccacactaaaacctccaatgaatttcaattagtccgaaatcataccaatagaggatagcgtatttttttttgcttgtcaagggactatcaaagagagatagggaagagcgcgtttgcatacgctgggatgccgggtgggaaaggcaccgaatacaaaaaaaggccccgcatgtctgcggggcctttttcaaattggtttatgcttgaaacacgggcgtaccgtccttgattgtgcatagaacctgaagctgatttagctcctccggcggcacctggcaaggattgcgatccaagatgacaagatcggcacgcataccgggcgccaaagcgcctttgtcgtgttcttcaaagtattgataggcggcatggcaggtgatgccgcaaagcgcctgataggggtctaaacgctcctctgcgcccaggatgcggccctgcttggtctttctgttgacggcgcaccaaagcgtttccagcatgtttggcgcaatcacaggggtatcctgatggaaagtgtagggtatgccaagctgacaagcgcttttggcagggctgatggcctctgcacgggagagtcccagattttccacgtgcgtttctccccaatggtacacatgcgctaggaaaaacgaggggatcatgcccaggtgcttgagggcgggcagctgatcgcggcgcagcgtctgggcatggatcatcacgggccgcaaatcgcggcctacgcccgggtgtcggtgcagagcttgggcataggcatctatgtattgctgggctgcggcgtctccgttgcagtgcgccaatagctgccgcccctccatcacggcgcgttcacaaaaggcaagcacctgttcatcctgatagatgggatagccgcaataaccgtcctcggccttttcatagggctggctgagccaggcggtacggccttgaggggagccgtccaaaaagatcttatagccgccgagcttaagccggttatggtactgaccggcatattgcggatgcgcttgcaaaagagaggcatgctctttcatatccggataggccacgatatctaaaaacagcgcgtgctgctgggccagcgcatccaataaggcaaactcgttttgtttggtgagcccgtcctgtacagtggtgatgccgtaggaggcgtatacctgttgggccttgtgcatggcatgaaagagctgctccgccgacggcgcggcggcgccttgcgccagctgaataaaggcattttcttccaaataaccgctgggctcggtgctgccttccagccgtccgatccggcctcctgcagggtcgggcgtttggtttgtgatgcccatggctgccagcgctgcgctgttgacgcaccccatatgcccggacgcatgagagatgaggatgggcacggtgtcggataccgcatccagcacatgcttatccgggtgctgcttaccgggcaggctgttgttatcgtacccaaaaccgatgagccatgtgccaggctttgtttggggaagggcacggcgcagggcttgtaccaaagcttcgttggaggtgcagctgcccagcggcactagatccagcgtggttgccagctgggtgatatggctgtgggggtcgataaagccgggcagcatgcaacagcccttcaggtctacggtagtatcagcctgaaaaagaatctcgtcatcgctgccgacggccaggatgcggccgttttccaccaaaacggcctgggcgcagcgccggcttttcatggtgagaacagctccgttgtaatacgctgttttcattggttcacactccttgcggttccggtttggtttatactcagtatatcccccaaaatggaaaatacaacgtagaaggcaaagaaaaagcggaaagctgcagctttccgcttgatagcgcgcatcagttgacctttaccttttcccaaagctggttgtaaagatcggttttatcgccaaggtcaagatagacttcgcatttttctacgacctctgccggcgggttataggccggatccgacttcatctcttcatccatcagcgccagcgcttctttgttgggcgtggaatagccgatgtattccgagtttttggctgccacttcaggatcgcagaggaagttgatgaaccggtaggcggcgtccatgttttggcagtccttggtgacgacgatgctgtcgaaccacatattgctgccttccttggggacgacatacgccagatccggattttcctccatgcagagcatggcgtcgccggagtataccacggacaaagcggcggagccgccaaccatggcctgcttgatggcgtccgtcatatatgctttcaccagcggcttttggctggtcagcgcctgggcggccgcttcgatctccgcgtcgtttttggtattgacggaatagcccagcttgcgcagcgccacggccatggaatcgcgggagctatcatacatgatgatgttgcccttatacttttcatcccagaggatattccaggaatccaccgtttcgtctaccatggtggtgttgtacatgatgcccagcgttccccaggtgtagggtacggaatacttgttgtccgggtcataggccaggtttttgaagctgtcgtcaatgttggcataattggggatctgagaaagatccaattctgccagacggtcctcttggataagcttctcaatcatgtaatctgacggaatcagcacatcgtactgcacgccgccgtccattttggccagcatggattcgttggaatcaaacgtatcgtacaccacatggatatcggggttttcctcctcaaactgtgccaaaacatcttcatcgatgtaatcgccccagttatagacacggagcgtgacctggtcgctgctttgcccgccgcagcccgcgacggtaaacagcatgagaaacgaaagagccagggtgcagaccttccatagttttttcatgcctttttctcctttctgttttgcctgctggaacgcacattgatgatgaccagcaatatcataacgctgacaaacatgatggtgctcagcgcattgatcttgggggacaggccgcgccttgccatggaatagatggtcatggataggttgctgacgtcctgcgaggtaaagtagctgacgacaaagtcgtcgatggatagggtaaaggcgaaaataaagcctgttacaatgccgggcagaatctgcggcagcacgattttacggagcgcatagcccggctttgcgccgagatccagcgcagcctcataatgggcagggtttagctgccgcagcttgggcagcacgctgaaaatgacgtagggcaaattaaaggtgatatgcgccaaaagcatcgtgccgtagcccaggcggatgccggcaaagagaaagagcatcatcagcgaaatacccgttacgatatctgggctcagcatggggatatacgcaatggtctccatggccttttggcgctttttcttcatgccatcaatgccgatggccgccagcgtaccgatgatggtggcgcacagcgccgcgatgatggcgatggaaagcgtgacccatagcgcatccatgatgacgctgtcctgaaacagctcggtgtaccattttagcgaaaagccgccccagcgccccatggtgcggttggcgttgaaggaaaagacgatgagcgttaaaatcggcacatacagaaagagcagcacaatgccgaggtaggtatatttgagctttttgtgcttcatcgtttgcatcatagcagcaaccctccttctgcggaggagccgtcatgccgccggaacagccacatgctgatgagcaccagcaccatcatcaccaaggacagcgccgcgccgaaatgccagttgcgcgtaaagagaaactggttttcgatcagctctccatacatcatgacctggccgccgcccaaaagacgggaaacggcaaaggtggtggtggcggggataaataccatcgtaatgcccgaaacgatgcccggcatgctcagcggcagctttaccttgcggaacacctggaaggaattggcccccagatcctccgccgcctcaataagctgcggctgcattttggagagaatggtgtatatcggcagaatcataaacggcaggaaattgtataccaagccgatgatgacggcggtggtgttgtacaatagcgaaacgttgcccagccccaccaggcccaaaagcttggcaattaggccgttggtatccagcagattgatccaggcataggtgcgcagcagaaaattcatccacatgggaatgatgatgagcattaaaatcaggctgctgcgcttgaaatgccgcgaagccaggatgctggccaccgggtagccgatcaaaaggcagattagggtggctaccagcgcgatccataggctgcgaaccaaaacggtcaggtaagtaggggaaaacacctgcgccaggttttccaaagaaaagcagaccgaagcgccgttggaggtggtgcaggcatagtacagtacgataaagatgggcacgatgataaacagcgccatccatacctgatacggcaaagcataacggctgcgtttcattcgttgtcctcctcctgatcggcaaggtactgctcctcttgctcagcggccagcggctcgtcggagcgcttcatgacatgaatggcgtccgggtccaaataaatgccgacagtttcgcctacgcctacggcgtcggtggtatgcaccgtccactccatgccgtctgcatcctccagggtaatctcgtaatgcacgcccataaagatgatattttttaccgtgcaggtcagcatgcccttatccaccggcacgatgtcgatatcctctgggcgaacgaccacctccacctcctcattgggggcaaagccggcgtccaggcaggggaaatcatacccgcggaagcggcaaaggtaatccttcagcatcacgccgggcgtgatgttggattcgccgatgaagtccgcgacaaaggaattggccggctcgttgtagatatctaccggcgtgccgatctgctgaatttcgccgcggctcatgaccacgatggtatcgctcatggtcagcgcttcctcttggtcatgggtcacatagataaacgtgatgccgctttgctgctgcatacgcttgagctcggactgcatttccttgcgcatctttaggtccagcgcggccagcggctcatccaaaagcagcacctcggggtcgttgaccagcgcacgggcgatggccacgcgctgctgctggccgccggagagagattctggccaacgcttttcaaagccggccaggcccacgagctccagcatttccggcacgcgcttttgaatctcttttttatcgcgctttttgatattcagcccaaaggctacgttgtcgtatacgttcatatgcggaaatagggaatacttttggaatacggtgttgacccgccgctgataagggggcacgtcgttgatgcgcttgccctcaaagagcagatcgccgctgtctgcctgttcaaagccggcaatgatgcgcagcatggtggtcttaccgcagccggaagggcccaacagcgttaaaaattcgcgccggcgcacataaaggtctatctttcccagcgctacctcgccatcaaacgttttccgaatattttttagttcaatcagtcgttccgccatggcggccgtcccccctttgttggattaaaaattcggcgggtctgtaacccatacgatctttgcttcgctttttccccgattggcaaggctgtgcggccgggtaggggaaaagtaaaaagaatcaccctttttcagcttgtgcttggcgccgcctaccgttaaaagcacgctgccggaaagcacgtagccaaattcctcgccctcgtgcgggtcgtcctcataggaatggccgccgggctgcaatgtcagaaggatgggctccatcctgtttttctgggcattgggcaccagccagcaggtggtgcttttggcatcctcatcaattttggtaaacatatcgtccggcttaaagacaacctgctctggctccaaatcgctgaaaaaatgcgcaagatccgtgcccagacaggaaagcacatccaccagcgtggcaatggagggcgaggtcagatcgcgctccagctgcgaaataaagcctttggaaagctcagcgcggtccgccagctcttcctgggtaagcccgtacatcatacggagctccttgatcttttggcccagctgcatgcttggtccctcctttgggcttggaacgggtctaaaattaaagttttataaactttttgtttagtgttgcttaactttgagccgtcatacattaaatcataaacgcccccttccgtcaagacataaaaatgccttacttcagacaaactttgtctgtggtgtagaattgcatgaaaatggtaaaaaaggtatcatgaagaaaacggataaggataggaagattcagatgaaaaaaacagcggcgggccttgccgccatactgctgggctgcctgatggtagcgggctgcacacaggcgccggcacagccgtcggctacgcccatgccaacgcaggataccacgcacaaggaatatcaaaactatatgacgatgaccacccttaaatatccggccagctgggaataccaggacccggatgacgaccaggattcgcagatgaccgcctattttgatattgacggcggcacagctgtactccagtttttatttttgacggaggaggaaaagcagtccaacgtctacctgcagcagctggatatcgacgacatcgcgcaggaggagaccaaggcgggcccgtatgaggggctgcttttaagcggtaccaacggcgcggacaagatctcggtgttccaaggctaccgaagctggtacgataccgggctgtactgcatgctgcgggtgtatatcaactccaccaccgaggacagcgacgatctctatgagatcatgatggatattttggaatccacctcggtgtatgaagaggaaacaccggaaattcaacagtgggcggaacaggattttaccgaggaatacggcattaagctctctgttccgtccaattggtatatcaacccggaatactattccgagctgcccaccttggtgctgaaatttgaagtggcaaagggaaacaacatcattagggtggaatacggcaccgaagacaaagaagggtaccagcagctgctggagtccgcaaagagctttgccacaatgcagtgcatcaatggcacatatacccaaaaaggcaacgccacagagctcagcggcgtctacgaagggcgcttggcgtatgccaagattgaaaggaaaaagacggtggacggaaagatcaaatacctgatgatttcctaccagctgcgccctgagctgcaaaaggcgtaccaaggggctatcgatcagatggcgcagtccatcgtcttgcaataagctgccgttccgggggtatactaagggaagactgatagatccggggcaaacacttcggaagcaatacaaagagctttgcagtaaaggagagaaagaacatgagagatccgcgtcaaacgcaactggccaaaaatctgatccgcaacgccgtgaatctgcaaaagggagaaaaggtctggatcaacatgacagcttacgaccctgccatggtcacagcgctggtagaggaaacctatgccgtgggcggctatccgttcgtggtgctgagcgatcccaagattgaacgcaaactgatgcagggcatgacggaggaacaggccaagatcatggcggagctggataaggccaagatggaaaaaatggatgcatatatcgccatccgcaacgccgaaaacatctttgaatcggtggatgtgccgcaggacatttctgccatgtataaccgtgtatacagccagccggttcacatggaaacgcgcctgccaaaaaccaagtgggtggtgctgcgctatccgtcccccagcatggcacagcaggcgcagatgagcactgaggcgtttgaggacttctatttctccgtgtgtaatttggactacaacaaaatgtccaaagctatggacccgctcaaggcgctgatggagaaaacggacaaagtgcatctcaaagggccgggcaccgatttaaccttttccatcaagggcatcggcgcaatgaagtgcgatggcgaaaagaacatcccggatggcgagatctataccgcgcccgtgcgggacagcgtcaacggcatcatcacctacaacacgccgtcgatggtgcagggcttcaagtatgaaaacgtcagctttacctttgaaaacggaaagatcgtaaacgccacggccaacgatacagaccgcatcaaccattacctggataccgacgagggcgcgcggtatatcggggaatttgccatcggggtgaaccccaatatcaacaacgccatctgcgatattttgtttgatgagaagattgccggcagcatccactttacccccggcaattcctacgacgatgtgggcaacggcaacgtatccgccatccactgggatttggtgctgatccaaacgccggaatatggcggtggagaaatctggtttgacgatgtgctgattcgcaaggacggccgctttgtgctgcccgagctggactgcctgaatccggaaaacctgcgctgaaagggaggaacaaaccgatgagagatcctagaatcgacaaattggcggaaatgcttgtcacctattccatgggcgtgcaaaagggcgatcatgtggcgatgaatcttttgaatcccgttccggcgtttgctgaggccgccattgagcaggtgtacaaagcgggcgctctgccgtttgtgcagatcaccaattccgaggtcagccgtgccgtcaaccgcggcatggacgaagccatggcaaagctgcaaagcgagttcctgtgccagcgcatggacaaaatggactgcgcgttgtattgctatgtggaccataacgcctatgaatccagcgacgtgcccagccagacacaggccatgatgagccggctgatttcaaagccgctggacgatgtgatgcgcaagcacaaaaatcgctgggcgctgttgcagtggcccaccgaggaagcggcgcaaaaggcggagatgagcaccgaagcgtttgaggactttttctttgacgtatgctgtgtggattacaaggccatgggcgaggcaatgaagccgctggtacagaggatggagcagacggataaggtgcgcctcaaaggccccggcacagacctgaccttttccatccgtggcatcccggctgtgccgtgcgacgggcacttcaacatcccggacggcgaaatttacaccgcgcccgtaaaagacagcatcaacggcgtcatcgccttcaatacgcccagcgtggaggacggctttaagtttgaaaacattgtgctgacctttgaaaacggcaaatgtgtagacgccacggccaacaacaccaagcgcatcaacgaaattttggataccgatgcaggcgcgcggtatgtcggcgagtttgccctgggtgtaaaccccaagatcaaacggccgatgtgcgatacgctgttcgatgaaaaaatcgcgggctcggtacattttgcgctgggcgcctgctacgatgaagcgcccaatggcaacgcctctgccattcattgggacctggtgctgatccaaacgccggaatacggcggtggggagctgtggtttgacgatgtgctgatccgtaaggacggggattttgtcctgccggagctttttgcgctgaatcctgaaaaataaggaaattctcatgggaacatgcttgcatgttaggcaaaactttgataacataatatgcgtatgaaaatgttttgttaggttttttgaaaacctagaaatctaaaatctccaaggaggcactcattatggcagtgaaagttggtatcaatgggtttggccgtattggtcgtatggtattccgtgcggcgatgaccaaaccggaaatcgaaatcgtaggcgtaaacgatccgttcatcgatccggattacatggtgtacatgctcaaatatgactctgtacacggcaagttcgacggcgaagtatccgccaaggacggcaagctggttgtaaacggcaaagagatcaccgtattcaactgcatggatcccaaagacatcgattggaaatcctgcggcgctgagtacatcgtagagtccaccggcgtgttcaccaccaccgaaaaggcttctgctcacttcaacggcggcgcgaagaaagttgttatctctgcgcccagctccgatgcgccgatgttcgttatgggtgtaaaccacaacacctacaacaaggacatgaaggttatctccaacgcttcctgtaccacgaactgcttggctcctctggccaaagtgctgaatgataaattcggtctggtagaaggcttgatgaccaccgtacatgccaccaccggcacccagaagaccgttgacggcccgtccaagaaagactggcgcggcggccgtgcgaacatgggcaacatcatcccgtcttccaccggcgctgccaaagcggttggcaaggttatcccggaactcaacggcaagctgaccggtatgtccatgcgtgttccgaccctggacgtttccgtggtagacctgacctgccgtctggccaaggatgttacctatgatgaagtctgcgcggcgatgaaagaagccagcgaaggcgaactgaagggcatcatgggctacaccgaagatgcggttgtttccaccgacttcaccggcgatccccgcacctctatcttcgatgccaaagctggtatcgctctgaccggcaacttcatgaagctgatctcctggtatgacaacgaatggggctacagcaacaagctgtgtgacctgctgttgcatgctgcgaaagtagatgctgaataatcgaatttcgatgagaaaaggccttgccatatggcagggccttttttgatgagtgttttttacaacaatagggatgcgcaggcaagatacaaaggtaaaacaaatatatcataatatgtttatgcatttcttgtatacaacccaagttcgagaaaagaaaaaggaggcaaaaagcctcctttttctatgcgtttttcagagaacggtttccatctcgaatttctcccagggaatattgacctcggcgccatggtttatgatgtcgtcgatatgcagcagcagggggaaatcatccgccgtagtcaacccgcgctcgatgagcttgcgcacggcccgggcggtacgcgtggaaatcacgacggattccagcgtaatgccgctgagctgtgccatggcatcgtcaaaggatacaccgcggcccagcagcgtgccgatcttgcgggtgcgcccgccaaagatggtgacatacaaatcgccaacgccatagacgatgttgtcttcatgcccaccgatgagcttgagcaaacggcgcatttcgcggatagattgggcaaacagggctgcttgggaattgtaatgcagcgtgccgcccacaccctcgatgcgctcggatagccctacggccagggaaacagccagcgcataggcatttttcatggccacggcacattctacgccggttacatctgtggataggcagatgtggtaatagtctgtttcaaagatggccttaagacggcgcagcacctcgatatccggcccgcaaaaagcaaccagcgtggggtcgtggtctgccagctcatagctggtgcaggggccgcccacggcgttgagacacagctttttatcgcccaagcgctgggcataaaggtgggggaaggagatcatggtaccgtcctccaggtcttgcatgccctttgtgatggaaagaactggaagagtttccggcactttcggcaaaatgttttccgcaaaccagtctacgccaaagctgctgacgccgccaaccaagacatccgcgccctgcatggcctcttccagctgctcgatttgataaaacttaaatccctcggggaacggacgctttagggtaaggtgtgtattggtctttctggcatggtcgatgatctcacggtccagatgggtgccgaccaggcggacttcatgcccattttcccgggcagggaatccgatggccgatcccatcatgccggcgccaacgatggtgatgatgctcattgtaatgctcctctccaggccgtggctttggcccttatacgtttgactttatatacagtgtagcgtgaacggcggcttttttcaattgcagcggcgtgcaaagatagaaaattgaattgtacagggcaacgctggtataatgcagagaaagagagcttgcagggagcgcctgcataaatcaaaagaaaaaagggaggacaacgcgatgccacaacggtttacctttcattttgagccgcataagggatggatgaacgatcccaacgggcttatctattatcagggacggtaccatgcttttttccagcacaatccccatgagccggtttggggcccgatgcattgggggcatgctgtcagtcaggacctgttgcactgggaagagctgcccatcgcgctgtttcccgatcagccctatgaagatgataagggatgcttttctggctctgctgtggagcgggatggcgtcttgtacctgttctatacggccgtatccaagcaactggggcaaacgcagtgcatagcggtcagccgagacggcaaagcctttgaaaagtacaaaggaaaccccgtcatcgcggcgccgccggcggagggcagctatgatttccgggacccaaaggtcgtagagctggatggaaaaacgtatatggtatgcggatccggcaaggatggggtcgggaaaatcctattgtatgaacagggaaaggatctgtttacctggcagtatgtcggcgtattgttcgaaagcagcgagtatggcaaggtgttggagtgtccggatctgtttaagctgggagatacctatgtgctgatgttttctcagatgaaggtggccaccgatgctgtcatcgtgctgacgggtaggtttgatggccagaggtttacgccagagtccgtatacaaaccggaggcagggccgcagttttatgcgccgcagacgtttttagcgccggatgggcggcgtattgccattggctggatgtataactggggtaggccgttggaccagggggcgcaaagcgccggggcactgagcctggcgcgggaggtaaagctggaaaagggaaggatctgctttgccccggttcgggaggcggcgccactgttgcaaaaagaggatccttatgtaaaaattgcccaggataccgtagagatcacctgccagaccgagatgccgctttgctaccgcggccgcatcgagcaggtagaaattttgcgggacaccaagagcatagaggtattcatcaatggcggcgaaaagaacttttccgtatggtttgccagataaaaatgccgggctgggcattgacaggcagcctgtaaattgggtacgctacaaagagcataagacgcccaaaccagggcgcagagtataggaggggtaacaaatgcaagtgccaaagcatacgctggcaaacggtgtggagatcccgatgatcgggtttggaacgtggaagctgaaagggcagcagtgtaccaatctggtgcgctatgccattgaaacggggtatcgcagcatcgatacggcggctgcctatgaaaacgaggagtttgttggccaggggatcaaagacagcggcttaaaacgggaagagctgtttgtgaccaccaagctgagaaaccgctatcatggctatgacacgacgctgtacggctttgaagaaagcatgaaaaagctgggcctggagtatgtggatctttacctgatccattggccgggcgaggatatgtatctgccaagctggaaggctttcatccggctgtacgaggaaaagcgcatccgtgccataggcgtcagcaacttttatccgcagcatatggatgtgctgtatcaggaaacgggcgtgatgccggtggtagatcagatcgaaacgcatccgtacctgcatcaaaacgtggtcatcgattactgccgcaaacacaatatctttgtagaggcctggagcccgctgatggtgggcggcgaggctatgcgcgatcccgtcatcgtggaaattgccgaccagcatggaaaatcgccggcgcagacgatcttgcgctggcatacgcaaaatggatttgcggtgattccgaaatccgccaacgaaggcaggatcaaggaaaacctcaacatctttgattttaccctgacggatgcggaaatggcggcgatgaacacgctgaccaaaaagaacatccgggtgggcgacgatccgctgacctaccgctttaagctcttggcccagcttaaagaagaaggcctggtataaagctgtaaaaagcccgcagatgcgggctttttctttgcttaaaagtcacgggggcggtgcaggcagcgcaggacgattttgcgtatcagatcaatggggagcacggccagcgccaataggaaggtaaagcccagctcggaatagggcaggggcgtggtgcggaacagcgcgcccccataatagataaacagcagctggagcatggtgactgccgccatgatgacgacaaaggccgggtttttccataggtgggataggagattgatgcggtgtgtgcgggcgttaaagctgttgagcacgccgcaaaagacaaacagcgagaaaaacgcagttaaaaagtacagcggattttcctggtactggaacaggccgcgaatggcttccgattttaggaagaagaggcacagcgccacggtaaacaacccggtgatgaggatctggttgaccatatatccgttgaggatgggctcatcgcggcgcttgggcggctctttcatgtaatccttgagcggcgcttcgcccgcaaaggccaggccgcccagcgtatccataatcatattgatccagagcatctgcacgacggtaaccggcgtatccacgcccaccaccggccccaggatggagacgccgacagcgcagaggttcatcgtcagctgaaagacgatgaatttgcggatgcttttgaagatggtgcggccatacagaacggccttggcaatggaggcaaagttatcgtccaggatcacgatatcgccggcctccttggctacctctgtgccagagcccatggaaaagccaacatcagcgcgctttaaggcgggtgcgtcgttgatgccgtcgcccgtcatgccggctaccaggccgcattcctgggccaggcgcaccagcctgcttttatcggacggcagggcgcgggccaccacgcgcagcgcatggagccgtcgcttcaattccgcgtcggaaagctgcgccatttcctcgctggtcatcacggcataggagggattgccttgcaaaagcccgcattggcgcgcgatggtctgggcggtcagcttgttatccccggtaatcatgaccacttggatgccggccttttgcacctgctgcacagccttgcgcgcttcgggccgcacctggtcgcggatagaaagaaggccgatgagcgttaagccctctgggacgacgcctttgggcacggcctgcggagagatcgccagcgccagcacgcgctctccgttttgcgtcatttgggcaagctggcgttccagaaccgttttatccgcaagcggcacaagggcgccgttttccgcatagctgtacgtgcagcggggcagtagcttttccggcgctcccttgatcaggtgcaacgtaccgtccgcctgtacgctggcggcagaaaatttagcggcgctgtcaaacggcgttttggccagcacacgggcctgcgtttgcacgggcagcacatactccaaaatggcgcggtcggtggcgttgcctcccagtggccggccctcggatacctcgctggctgtgttatacagcccttgcagagagaccagccggcacagcgccggcgcctgctttagcttgcggatcgaatcataggccttgccttgagcggtataaaaatgcgtaacctggagccgtccgcgggtcagcgtacccgttttatcggtaaagaggatgtttaggctgccggaggtttcgatgcccaccagctttcgcacaagcacatggtcacgcatcatgcgcagcatattggaagagagcacgacggtgatcatcatgggcagcccttcgggcacggccacgacgacgatgctgatggatagcgtcagcgcatgcatcagatgcccaagcatgacgggaaaatttgtcagcaccggccaaataccggaaagctgcatgccgccttccgtccaaacagaaaggaaaaaatctgcggcaaataccaggatcgctgccagataccccaaacggctgatgacgcgcgttaacccgttcaagcgtaccttaagcgggctttcccgcgtttcctcctgcatctgccgcgccatatcgccgtaaaaggtctggctgccgacgcgccctacccgcatcacgccttcgccggaggtgatgatgctgccgcgaaacagctggccccggttggaaagatcccatcgtgtggaggcggagcgctgcggctgctttttcacctctttgctttcgccgttgagggcagattggtccacatagacctggccggtaagcagtacgccgtctgcgggtacgcgctcgccggcctgcaagcgcaccacgtcgcccaccaccagttgggaaatgggaagggagagcagcaccccatcccgcataacgcgcgcctcgatgcgctctgcatcctcctgcattttgcggaaggcggattcgctgccgtattcggaaatggtggaaaccagggtggccagcgcaatggcgatggcaatgcccatggtttcaaaccaattttggttgcggaaaaggaagatgatgttgacggccagcgccagcagcaggatcttgatgacgggatcgccaaaattggccagcagctt

SEQ ID NO: 3318 - DNA, 20283 bp, Unknown
  16S sequences of unknown bacteria
taaggcatcatcatgccttataagggcgggcttttttattaccttatttttcaggtgtgctcggctaatatgcttttaagcgccgcggcagagcttgaatgtgagcgcgcaacagtcgtctttttgcccttgatatcattcagcgcgcattttatcattttgtgtgaaaccgttccggtaaaaagaatcagcaaatcggggctgcctattttcttcatacaggcgctcattttcgggtatacctttgctttgcaggaaaatgtatcgcatatatccatatactgccgtaccatacattcattcccgcccattattactacgctcatcttaatgtcatctcctgttttcggttagctcacgctaactccttgtttttaatttgctctttccccgaatacaggggaaagagcgattcttttattattttttcaaaaacgggaaaaagccttttttctcatacggctcatccttaacggaaacaagcgtatagcctgtgccgcctacggtattcaccagccttgcttcatcaagcggagcttcggttattataaccgtttcgccctttgagtgagaggaggacacctttttaacattaaacgcagcgcggattgcttcgttaatatgcgtctcgcacattccgcacatcattccgtcgatttgagaatgtattttaacattattccgccccctttaaggcttcatccatatcaattttacggtttttacgcgtcacagcccggctgaccgagagtgaaacgccgaaggtaagcaccagtcccgtaatgtaactgagcgggccgatggctaatttcagctcgtattccgaagccattgttacaagcaggtagtcaagcaaagctattccaagcggtattccgagtattgcgcccacaagcgtgacccacatattctgcccgacaagcagctttccgatttttttatccctgaagccaacgaccttaagagttgccatttcgcggtaacgctcggtgtagctcattatgcctaagttgtaaagcaccacaataccgagcaccgcggcggcaattataagtatcgctatcatcatatacattatgtccataaatgtatcgaacgaatcaataatagcctgcttcgactgtacggcggatatacactcttccgatttaatatcggctttcttagtatcggtatataccgaatctgttttgaaaggaatatccagcgtttttgcgtaatcggttgatataacaatattttccgaaaccgagcggataactcccgcaactttaaatttgtaggttttatccgagccgtaggggcttattttaatcgtgtctcctgcggctaaatcaaattcatcggctatgcgcatacaaatatacgcgccgtccttgccggggcggacatatccgttattttcggcggggaaacgcaccttgccgcgggttatattgtatatatcaagcgccaccgctttatcgtctgtctgaacgctgaaggttgcgctgctgtcgcccatgtaggcgtcgattattttttgggtctcctcctcggtcgcggtctcgcttacgtaaatgcgtgaggaatatttcatagagtcgtcgtaatagatgcttaaaaatgcgttcatggtgtcccgcatgcccattgtgacgaccactattaccatacagccaacaatgcccacaaggctcataagcgtgcttttttccgcgccgctcggccctaaaataacaacaaattttccttcgtcaaggctgaagcttaccttgtcaagcgccttttgttcatgatcgccgctcacatataagcggctgacatttttaaattcaactatcggcattttcaatcctattctctgcaataaatttatcgcttgctaacgagaaagttcaaatatgagttagccaaagctaacccttacgcattataatacgcagcttttacagtgtcaaccgttttttggaattttgttgcggcaggtatgcaataccgccgcacttgtcgccgtaaaaacgaagaaatgcggcgttaccgccgcaaaacaaatttttaggtttattgacagactgcgaggctctgcaaatcgcagagcctcgggcttttaggtagctattaatttttcaaagctctttcaagccacacaaagccgaaatcaagtgcgtcaaagaagctttccttaacggtttctttaactattctgtccttatcgggcagctgcgtatcgcttttaagcagctgaacggtgactttttcgggaagcttatcctccttggtttcagacagcaccgtgaattttataacataggcgtccgccatatcaccgtagaaaatttcttttccgctgcgtacaagcggctttcccttataatttaaaaaattgttttctgccattttttctccttatttcttatcctctcccggaatttcaccgtaaagattgaagcggaagagcatagtttcgtcgtctgggtttgtgcagcggatggtcgcttctgttacctcggtgtttttaagaatcgtgctgagtcccagcatctggcacagctttgatttaagatttaaaacatcgccgtccttcgtttccaaataaacatcgcccttgcattcgtcaactgcctttataaaatcgtcaaagtccacattgtgaagttgaatttttccgttatccatttttatatgcctcctcatattatatattgaaattataatccatataaataaatatgtcaagtaagtgttgactttttgacggatttcatttactatagtatttgtagaaatttcgggtttatggaggaattcgctttggaaaactcaaaaaaaagtatggatactattgtcgctctcgctaaaggacgcgggtttgtttaccccggcagtgaaatttacggcgggcttgcgaactcgtgggattacggtcccttgggcgttgagcttaaaaacaatattaaaagggcatggcttaaaaagtttgttcaggaatgtccctataacgtggggcttgacagtgcaatacttatgaaccctgaaacctgggtggcttcgggtcacttaggcggcttttccgacccgcttatggactgcaagagctgcaagacccgccacagagcggataagcttattgaagactatgtagccgagaatgggctcagtgataaccccgccgccatgagcgacgaggaaatgatgcagtatattaaggataagggcattgcctgccccaactgcggcagccgcgattttaccgatatacgcaaatttaaccttatgttcaagacctttcagggcgtaaccgaggacagcacatctaccctttacctccgccccgagaccgcgcagggcatttttgtaaacttcaaaaacattgcccgaaccacccgcaaaaaaataccgttcggcgtggcgcagataggtaaatccttcagaaacgaaattacccccggcaactttattttccgtattcgtgaatttgagcaaatggagcttgagttcttctgcaagcccggcaccgaccttgaatggtttgaatactggcgcgcctactgccgcaagtggcttttagacctgggaataaacgaggagcatttaagactgcgcgaccacgataaggatgagctttgcttctactctaaggcaacaaccgactttgagttccttttcccgttcggctggggcgaattatggggcattgccgaccgtaccgattacgatttaacccagcactccgagcattcgggtcagcctatggattattttgatccggagaccaacgaaaaatatattccctatgttatagagccgtcgctcggcgcagaccgcgtgctgctcgctttcctttgcgacgcatacgatgaggaaaccgatgaaaagggggatgtccgcaccgttatgcacttccatccggcgctcgccccctttaaagccgcggtgctcccactctcgaagaagctttcggaaaaagcgactgaaatatattcagagctttcaaaggactttatgatagactttgacgacgccggctcaataggcaagcgttaccgccgccaggatgaaataggcacgcctatttgcataacctacgatttcgactctattgaggataactgcgttaccgttcgcgaccgcgacacaatggagcaaaagcgcataccggtatccgagctgaaagcgcacattgcagaagccgttaaattctaaaacaggggaaaaaatatgtcttcaaccactatactcttaatggcagccgagctgctcggcggacttgcattctttctttacggaatgtcgatgatgtcgggcggacttgaaagcatatccggcggaaagcttgaaaatgatttgagaaaggttgcaagaaatccttttgcaagctttttcctcggcgcgggcataaccattgccatacagtcatcctccgcaatgacggttatgcttgtaggtcttgtaaactccggcatacttgctttcggcgataccttcggcataataatgggctcgaatgtcggcacaacgcttacctcatggcttttaagccttaccggcgtgcagggcgaaaatttcttccttacccttttaaagcccatgaccttctcgccgctgctggcattcgcgggcatacttatgcatatgctgtcaaataaagagcgccagaaaaacatcggtgttattttaataggctttgccgtgcttatgacaggcatggactttatgagcgattctatgagctctattcaggaaatggagggctttaagcatctgctcaccgcattttcaagcccggttgcggcgttgcttatttccactgtgtttacaggcattatccagtcatccgccgctaccgtgggtatagttcaggctatggcacttacaggctccataagctataaaatgacaattccgctggtgctcggcgcgaatataggcacctgcatgacggcgcttctatcctccttcggcacaagcaaaaatgccaagcgcgttgtggcgctccatatttacattaaggttatcgggtcgataatcttcactgccgcgctttacggtctgatggcgttcggcacggaatttttgaataaaccggcttccatgataggagtagccgttgtgcataccctttttaatattataaatacctttgtgcttattccctttaaaaagccgattatgcggctgtgtgagattaccgttaagagcagcaatgaaaaaactcataccgtttttttggacgagcgtttgtttacaaacagcgctcttgcggtatccgaatgccaccgccttacaaacgaaatggcggagcacgcaagagactcgcttacaaaggctatcgggcttatatccgaatacaaggcggaaacaacacagtatattcgcgaaaacgaagagcttattgataaatatgaggacaagctcggcacttacttggtaagactcagtaacaatgagctttccgaaaatctttcgcactcaatagcccgcatgctccacagcataggcgactttgagcgaataggcgaccacgcgcttaatatctgtaaggttgccgaggaaatgcacaataaaaatattcatttttcggacgaggcaaagaaagaaatttccgttataacaaacgccgttaccgaaatacttaatatgacggtagattcgtttataaacgacgatatagaccttgcctctcacgttgagccgcttgagcaggttatagatacgcttaataaaaagcttaaagcacgccatgttgcaaggctgcaaagcggcgaatgtaccattgagctgggctttatatttaccgacctgctaaccaactatgagcgtgtttccgaccactgctcaaacgttgcggtttacacaatgcagctgccgagcgataagcttgatgcgcacaaatacctcgcgaaaatcaaaaatgccgaaaccggcacatttgttgatgatttcaatatgtataccgagaagtattcggtttaacaacgctcaatccccctcaacttgagggggatatttttgtgccggcgcggtacacttgacatattcgcggatgtatgctaaagtaaaatcgttaacagcggcggttcggtggcatgaggccgcattggcaggcattataaaacggtagatcgctcgtctttaaaaatgataattaaagtataacggcgtgagggaggaatcggggttatgaaacggttttttacaattaaggcttttgaaagatgcaggatattcaaggtggctttgtgtataatcgattcggtaataggcgttattcttgcatttaaaattccggaatttatagatgccgttcgtatggattaccttaaggatttaatatttttctgctttttaatctgcgctttcattttcatactgcttctgatcattttgcttaattgcataataaaggacgcgcaggacgatatagcccccgcgccgtccgaagattcaagggcatgagcctttttgaaaatatgataaaaatcacccacgcattaaaatgatatgcacccccaataccggacacccggtattgggggtgcatatcataaagctgctagagatttctgattattattcctccgtaacctccggcagacccgcaaagctgttaaggacagacagcacccccgcaagtaaggaggcggaaataaccaccctccaatcaacagaggaaagcaccgccgaagtgcctatggtggcgacggcggtctgacacaccgttttaagcgaacggattcccgccgccttaaaccattgctttgtaaatatctttttcattttatcacctcacttctatctgaattgcatctatttcccgaccgagaatacccgcgtagccgttattgccgtcctttgagttatatccggtcacccacggcagccaattgctgcggcgcaggtgcgctctgtagcggattattctgccggtatcggtcttcatcataatgccgtcaatcggcctgttgtaaagccccgcatagtcctttcggtttgtgacctcgggcagccatttgccgcctttataatgcacggcgtaggttatattgccctttgaaagatttgcaaacacacagcatacatcgtgaccgaaaatacccgcgtagtcctcggtatttttaacattcggcagccatgcgtttttaacatcgtcccacacctgatagataacatcgatttttgaaggcttcgggacgggcttcggcttttcctctgtgaatatgctgttatacattacattcatatccacattgccgcttatgccgtctatgcgcccatttgaagtgcgctgccatatatcgtaggggcggttgaaatcgtttaccttatctccgtgttccgccacccacttgctgattccgtcataccatttatcggtcatcttctcgttccaaaaagccgagcggctggagtatatccccattttatatccgagggcgttaagctgcttattaaactcccgcaaaatgccgagcatatccgcgtttgaaatggtgcgccaatttaagccgtttgtgttctcaatgtcaatgtagacaggggcgtttattttcttgccgttaagcagccttttgatatgcgcaatttcctttgcaaccttcgccttattcacggcatacgaaaagaagtacaccgcaaacggaatgccgagccttacgcattccgaataattccgttcaaactgcttatcgtcctgcgatttaatatcgtcgccaagccccatacgcaggattgcgaaatctatctgcggcttcaccttctcccagtctatctctccctgataatgtgatacgtctattccttttgttgacattttgttacctccgtttttaaaagcatatatcaaagcaagccgtatatcctcctttcacggttgatttttgccttgattttattcattagaaagaaaaagtatgctatattgtaaacctgaagttgtaaaaagctttctgcagttgattatttaacatatatttggtataatgcttaacaggtgattaaatgacaaatatttatatggtgcgccattgcgaagcaatgggcaatgttaaaagactttttcagggatcgactgaccttgatataagcgaaatcggagaaaagcagcttgaatatttaaaacgccgctttgaggaaatcaagcttgacagggtatatacaagtccgctaatacgcgcatacaaaaccgcgcttgccataatcggcgaaagaaatttaaagccggaaatcaatgacggcctgcgtgaaatgagcggcggtattgttgagggaaagccgtttaaggaggcgtttaacgcagagcccgggcttgccgatgcatgggacaaccatccgcaggatttcgcgcccgagggcggcgagccgatgcggcatgcctacgaacgaatatggaataccgtgaaaaggatcgctgccgaaaatgacggtaaaaccgttgcctgcgcaactcacggcggcgttatgcgctgccttcactgtcgactgctgctcggagatattaaccgcctttcggaaatgggctggagcgataataccgccgtcacattgcttcgcttcgataaggataataaggttgaagttgtattttacaacgattcttcgcatttgcccgaagagctgattccgaagcgcagcagactttcctcatttatgggtgatgaaaaatgataataatgtctgcggatctcggaaaggcaagaaccggaatcgcggtatcagaccccggagaaagctttgcgtttccgaaaacggtaataaccgaatataacgaggaacggcttataaagcgcatctgcgagtgcgcgtcgctttacggcgcggagctgatcgtggtgggctatccgaaaaatatggacggcaccgcaggaagccgtgccgaagaatgcgccgcggcggcggagcagatagagaagctttgcggaatcagaaccgtgctgtgggatgaacgctgcaccacgatttccgcgcatactgcgcttaattacaccgatacccgcggcaaaaagcgcaaggcggtggtcgacgcggtggcggcggttataattcttgaggattatctgcgttacaaaagcaacaaaccgaatacttgagtgtgtgaatcaggtctccctgtcagggagacttttttatatctgcggcatttaaattttattcttcaatgaaacttcaatatttgcggtgtaagattcggttgtaaaataggaaaaggaggcagagataataaaaaagcatttgtgaggaattatttacggcacggaggtatcggagaacgcttcttcgctttcaaggcttgaagacggctcatcgacaatgtattttaacggcagggtggtaaataagcccacaacaaacggtaaaagcattaaggaaaggagcgtgagcgatattgtctgcatcggttgacgacagaaaaaaatatgccgaaaccgtgcgggtataccttattatataggttttatgtgcggtgtacggaatgatatatgagctgttcagccataaggtttattccctttatatgatttttgccttcgtgataccgctgctcggcggctttgtgccgtccattattatgtatgcgcttaaggtaaaacggtgcagagcagcggctgacgggctgtatcggtcgggaatcgccgcactcaccgtcggcagtataataaagggtgtactcgaaatatacggaacgacaaacgcgctttcgcggctttatctttatgtgggcgcagcgcttacaattctcggaattgttttgtttctttgggacaaacaatgctttcggcgtaaaataaaaaaggagaggcttttatgaaaaaattattatctgttctttgcatagcggcactgattttatcaatgaccgcctgaggggaaatccgattatgccgattctgccgtgacaggtaaggttactgcggtgaaaaacggaacagtcgtgctgcacccggactcttacaggcgactgcaaaataagctcgcttgcaaacggcggcacaacaaactctgacggtcataccattacccttgccgacggcacggtgctgaagtaatcgttttataagagtaatgcacctcttaatttacaatttcttaataaatctcttaaatatttcgattatattttaattaagggaggaagagctatggataagaaaaaaattcttgttgccgatgatgaagagagaattgtaaagctggtttctgattttctgaagattggcggctatgaagtgctgcccgcgtccgacggcgctcaagcgcttgagctttttaataaaaacccggatattgcgcttgcgataatcgatattatgatgcccgagcttgacggttgggcgctcacaaaggaaattcggaaaacaagcgaccttccgataattatgctctccgcccgcgcagaggaatttgatttgcttacgggctttgaatcgggtattgacgaatatgttaccaaaccgttttcgcccgccgttctcgttaaacgcgtcgaggcgcttattaagcgcagtgacggtaaggttttagccgaggacgaggtaaaaaaaggactgtatatagattcaaacgcgtttgtggcgtatgttgacggtaacgccttggagcttacacttaaggaatttgagctgctttcgtatctttttgaaaactccggcagagtgctgacgcgcgaccagcttttgaacgcgatatggggctatgattatttgggagattcccgcacggtggattcgcatattgcaagactgcgcacaaagctcggggattacggcgcggcgcaccttaaaaccatttacggaatggggtataagcttgaagcttaagaaacttaaaacaaagctttggtttaatattttcataagaatagccgcaatatttgcggcttttgttcttgtgctttcgctttctaatgttagttttttggtcggatttttctccgcaaaggaaaaaaagtcgcttaaagagcagctctcgcaggtggaaacgcttgatttcaacgacaccacggcggtaataacggcgctttctgaaataaacgaaaaatataatttcgatgttgaaatatatcattcgtcggggcgcatcctttataccacacacggcggtcaaatgatggactatttctcacttaaaaacgataagtttattatgactcacgaggaaatgaccccgctaaaaagcgagaccttaggcgacggcacggttttcgagaccgctgttcgccgttttgacaaaagcgagtatctgctttgccgcaagcagatatcaaacaatttatttgctgaggtcaggatacaaagggagcttatttcaaattccgcttcaatcgccaatcagtttatgatctttgtttccgtaatctgctttttactttctataatttgggtgttgatcttcgcgcggcagttctcccgcccgattgcagaaatgaacgatataaccgaggatatggcaaggcttaattttgaccgcaagcttaaggtggaacgctgcgacgaaatagggcagcttgcaaggtctgtaaatgcgctttcagaatcgcttaataccgcgcttacagagcttaccgaaacaaatgcaaagctgcgcgacgatattgaggaggagcgccgtcttgacgctatgcggcgcggctttgttgccaatgtttctcatgagcttaaaaccccgatagccattataagcggctatgccgaaggactgaagcttaatataaacgaggaatcaaaggaagaatactgcaatacgataatagatgaaagcagaagaatgaaccgtttggttttgagcattttggagctttcacggtatgaatcggggcagatgccgctgaaccgcagcgattttgatgtgtcgcagatgaccgacgatatgctccgccgaatatttgcaaacaaaaatattaatgccgaaaaccgcctgacgaagggtcttcttataaatgccgacccgatgcagaccgagcaggtcttaaaatcctatttggagaatgccgcttcgcacacgcccgacggcggcagcgtcactgtttctgcttcggaatccgatggtaatgtaagaatttcggtaacaaacaccggcagccacattcccgaggagcttatgccgcagatatggcagagctttttcagaggagatacatctcacaagcgtgaaagcagccgcttcgggctgggactttcaatagtttccgccattatgaaaatgcacaacagcagctgcggagtatacaataccgaaaacggcgtatgcttctggtttgaagcaaaagccgcgggcagggaagatgcagataccgatatgtaatttaaaacgcgggattcgttttgttgagaatcccgcgtttgttctattaatcgttgattataaaatccaaaaatttaccgtcctcggttatcagtctgccggttgacccgaccgatagccccgcatacattttcgggggaacggaaagttttgtttcctttccgtcaaactcgaaaacggcataataatcgctgtaatgctgcggtgtatcaattccggtatgcaatatctccgcgttcttgaaattaagccgcgcaatatgctcctcaatcggcggcggagtatattcttcgctttcaagctctaaaagctgtttttttctttttttgacctcgcttatgcatgcccacacaatggttccaattaaagccgcaataaatatagcgccgacaatcagcccctgactgtcggtcacttcaattaccgccaaaccgcaatttactcccataatgtatttctcctttcaaatttcatctgtatttttcagcctgcaggctgaacatttcggcgtatttgccgttttgccgtatcagtttctcgtgagtgccgctttcgataatttcaccgtttgcaagcatataaattttatcggcaaagcgggttgtggaaagcctgtgagaaataattattactgttttatcgcttgatagctcggtcacggttttattaagggtatattccgcaatcgggtcaagcgcgcccgagggttcatccaatattattatatcggaatcggcataaagcacccgcgccagcgcgattttctgcttttcgccgccagaggggttaaagccgctctcatcaaattcctttgtaagctgtgtttcatagccgctcggcagagttttaaacttatcccaaaacgcagatcttttaagcgcctcgtccgccctatttatatcaagcggtttattatcggctgatatgttgtgcgcaaggtcggttgctataagctcgtaatcctgaaacagaacgccgaagcaacccctgtaatcagaaatgcggtagctttttatattttccccgccgtagcttatttcgccgacgctcgggtcgtaaagccttaaaatcagctttataagcgtagatttacccgcgccgttaaagcccacaagcgcaaccttttcgccctttttaaatgagcagttaaccccctttagggtcggctcgctgttcccggggtatgtaaattccacattgcgcaaaactatatcgccgcccgcaggcagtgctgtgcgcccgttatcttccatagtgttttcggtctccgaaaagcggcgcagcttttcaatataaaggctgtggttttgaaattccgataaatttgaaacggcggtcaaaacctttccgttaagagtttgagttgaattataaacgccgagcagcgagcctaagccgaacttgccgagcaccaaagccctaaaaaacaggtaggaaagatatacgccgcttattataaggtcggctgttgattccgttgctacacgcagtgcgattatgggcttttggcgctttttaactattgcgcgcatttcttcggtagaatcggataaatccttttccagtttcgggcttatgttgccggtttttaagtcctttacataatcggcaaggtaaaaaattctgctcacatagtcgctgcgtctttgcacgggcacaatttcctcttgcattttcattgcgcgcttatttatcgcacgcccggaaaaatatgtaaacggaattaaaaagactaaaattaaaagcgaggacgcgtcaaccgaaacgatatatgctccggcgataatgcttaccgtaattcggcttaaaagcgtattaaacgctcctaccgctccggttatgtggtcgggcgctttttgcattgcccaaacaaagtcattgtaaaatcctgagtcgtcataccttgcaagctctatggaagccgctttttcataaagccgcatacgcattttcatttgtattttttccctttcgccgggcgctatgtaagcgtcgaaaaaggtgttaagcattagctttataaacacggctattgccaccggaattaaaaaatacagcacgtcggtaagcgttttcttctgctcaacgcagcttataatatatgccgttaaaaacgtgtgctcaaaaagcgttacaacatcgccgagcacggtttgcataagcgtaaacacggtgtaggtgggcgcaatttcaaactgccatttaagcgcaaaaagcgtatttgacagggtgctgtgttttttggaagttttcttattcatacgccgcctccgtcaaataattttgcgcctgctttttaaacatttcggcgtatacaccgccgttttcaagcagctttttatgggtgccctgctctgccaatctgcccttatcaaaaacaaatattttctcgcacaccgcagccgatgaaaggcggtgcgatactattaccgataaaacgtctttatttttgcaaagccccgccatagtttcaaacattttgtattccgcaatcgggtcaagcgcgcttgagggttcgtcaagcagtattacgtcgctgtttttcgccaccgcgcgggcaatggctatcttctgccgctgcccgcccgaaagctctgcgccgttttcgtcaaattctcttgtaagcacggtgtccatgccgtttttaagctttaaaatatcctcgtaaacatcgctctttttaagcgctgttatcacgcggtcgcggtcttcgtcagtcttcacctcatccaaaagcacattttccgccacggttgccgaaaacatggcaaaatcctgaaaggcaacgcccatatgctttcggtactcattaacgtcatatttttttatattaacgccgtttaaaagtatttcgcccttttcagggtcgtaaaaccgcataagcagctttaaaaaggtgcttttgccgctgccgtttatacccacaagcgcgtttctgtcgcctctgtttaaaacaagacttatattttcgagcgcgtaattttccgccccatcatacttaaaatatacatttttaaattctatgctttccacacgctccggcatttcaagtccgcccgcagtctcatctattttaggcttgtacgcgaaaaactgctttaaattttctataaactccgcgtcggtaaacagccccgaaacagaccgttcaaaattgttaagcatccacgaaacgcttactatcgcgtttaaaagcactattaaatcggaaacgcctaatttcccgtttatgccgagtattgcggcgcaaagccacattccctcgtagccgagcaaaaacattaaaatgctttttgcccccgaataaagcgtttttttaagcgcgtattgccgtgccacctcaaccgttcttttcgcggcaagcccgtacgcctctttaagcacgccgaaaaaatccgtggttctgatttcggcggcatactttcggaaatacagcacgcggtttacataatccttttgccgccgcgcgggggttgaatccctgtctatttcaaaggtaacgtgacctaactttttgccgaaaaacaggttgcctataagcggcagagctataaaaataagcgcaagcggagttatttttgccattgtaacaataactgttacagaggatatgagcgcggaaacggctgcggagcaattattaagcaccgacgctgcgcgcgcagcagcctcggaagccgccttggtgtaaatattgtaaaactcgggcgtttcatagcaggaaatatcggcactctgcgcctttttaaagagctttaaattaaggcgatagcctattttaatatattccctgtacatatagctttggtaaaaccaggcgttgtatatacttataagaacatctataacagccgccgcccaaataaaaatgagaatatcggtaaacttacgcgcacccgccgcgccgaaaagatactgtaagaaaaataccgaataaaacacccactgtgcaaagccgagcagtgttgtaaaaaaattgagcatgaccgccgtcggagaaatttgccaaacgagctttaaaaaatagagattgttttttattgccgaaacctttttcttcccgtcctttttcatatgctcccccaaaaactttcttcaaattgattttagcatataaaggaatcagccgcaacagggaatatttatacgattttaagcgttttttatcctttcttaaatttgtgtatcggtacgcagtatttcttcaaacggtgcgttcaatattttctttaaaattattatttcgtccgcatatatatgtctctgtcccacttcgatttttgccagggcacttcgggttatatcgcatccctcggtctgaagtcttgcggaaagcatttcctgggtcagtccgcagccctcgcgcaggcgtcttatgtttcgcccgatgatcttttcaatttcgctattcataagctgccgccgtcctgcacttatttgagaacaaattcccttgacataattataggtttgtgctacaatatttttgcacttatataggtgcaaaattaaagtatttaaaaaatttaagtgcgaagccgttattatagcaacaatgcaattacataaataaaaaaccgtacagtgattaccgtgcggttttgcaatattttttaattatccgtgaggtgaaataaatgccgtcgatcagaccaagctcggatctaaggaataattacaacgaaatatcggagttctgcaatcgctcaaacgaaccggtttttatcacaaaaaacggatccggtgatttggtggtgctttcaaacgaggcgtatgaaaggctgtgcgaccgtgccgggcttaacaccctgctgaatgccggaatcgctgaaatgaagtcgggaaacaaccgttttgcaggcgatatttcggaaatgctgaaaaaggaattcggctcggaagaaaaatgatacggcaactcggaaaaacaaaatttaagtagaaaaacaaagacggcagccacaggttctgatctgtgactgccgttttaaacggggtaaatgcaatattatttattgaaatatctcttgagaagaccctcgaaagccttgccgtgacgagcttcgtccttggccatctcgtgaacggtatcgtgaatagcgtcgagattaagctcctttgcaagctttgcaagctcgaatttgcccatggttgcgccgttttcggcgtcggcgcgcatttcgaggtttttctttgtgctgtcggttacgacctcgcccaaaagctctgcgaatttagcggcatgctctgcctcttcaaaggctgccttttcccagtatagacctatttcggggtagccctctctgtgagccacgcgcgccattgccaggtacattcccacctcggtgcattcgccgttgaagttctcacgcagaccgtcgattattctctgatcgacacccttggcaatgcctacaacatgctctgccgcccaggttttctcggctgcctgctctgcaaatttcgaagcgggggcatggcagatcgggcactcatcgggagcggactcgccctcataaacataaccgcaaacaagacatacaaattttttcatttttaaatcctccaaatttttttaatattaaacccggtgtgttttatcgggattaatttgcttttttgcacttttcacagacgccgtattcaatataaaccgaggtctccggttcaaagccgttcgctattgcgatatcggcaagcggatcaccatgcaccggcgagtcaaaaattttgccgcagcttcggcagtaaagatgcgcgtgcggggcggcattgccgtcgaaatgctcaaagccgtccccgaccgagagcgaaagtatttcgcccgatacgcttaatgccgcaagattgcggtacaccgtgccgaggcttatattaggtattgcctctttgaccttggaatatacccaagccgcggttggatgtgtgtcggttgagcggataacccttattatttcctcacgctgccgtgaaaagtttttcattgtatcacctaaatcagtaatgattactattttattataacatgcaaaaacaaaatgtcaagaacttttttcgagttacttgacatttttttcacaaagcattattatatgtattgtaataatcccgaaggggggaaccgaaatgagcagcaatatttccgattcggtaataaaacggcttccgcgctattaccgttttttaggtgagcttaaagcttcgggcatgacccgcatatcctcgcgtgagctttccgaaaggatggggcttaccgcaagccagatacggcaggatctgaattgcttcggtggcttcggtcagcagggctacggctataacatcgagcttttacagtccgaaatagcgcgaatactcggcattgacgcgcctaaaaacgcgattcttataggtgtcggcaatctcggaaaggcaataaccatgcatatcggctttgaaacaaagggcttcaggctcataggtctgtttgactgcaaggagtcgcttatcgggcagatgataaagaacctgcccgtccgcaatataaccacgcttgatgaattctgccgcgaaaatctgcctgaggcggcgtttctgtgcataccgaaaaaggcggctgttcagatttcagatcagcttgtaaggctcggcataaagggcttttggaatttcagccattatgatctggcactcaaatatcccgaaatcaaggtggaaaatgtacatttcggcgacagtcttatgacgctgtcataccgtcttcacaatgaataacaatagaaaaaaagcggtgatttgaatattttcccatatttccgtccacaatatttacagcttgaaataaggggcgaaaatatggtaaaaggtgtaagcaagacggtaattgtcgtaaataatacgggcagtaagctctttgaaaaaattgtgttttatgtcacaccggagtacggcacattaagcgcaaagcagctaaaaaaagcggcgagcagcttttcgtttcactatgacgacagctgccgaccgaagacggtcagaaacagaataaagcgcaaaaggcagatacaccttttaacagccgccgttgtagcggtaattataggcgcggtggttttagccataattttgtaaataaactattaaaaatgcgggaagacggtttgtcctcttgcatttattttttttttagcttataatagatattaactaaaatgaggtgctgaaatgaaggaaaattttaaaaccggcgcaaagctttttttaaagcttatagtcgttaacattatgtgcttttttgttgttatgtcgttcagcgtgctgtcaacggcggcatttaccaaaaatgtgggatataaggcttacggtacttcgagcgattcgagcgagccgcaggagctttatacacattattacgccgacggcgaggacacaaaaaaagcggaatacgagggcaggggctttaccgtaagtgaatcgaagattcgctcggaaatgacaaggggcggaacggcggcgttcctcacggtatcgcagatattctgtattttaatacttttctcattcatttacccgaatatctggcatatcggcacgaccgacagcaaccttgtgaaattcaagcataaggcggaggataagctgaagggtcttaaaatcgggcttatagcggttgttccggaatatttgtttttgctctttgtgattattgcaaaggcaggcgctgcgcctaaattcccggtggtgttgcttaaatttttaaacgcggcgttttattcgcttacacaggtaatttgcggcagcgccgtccacgtttccgagctttcggttataaggcttatatttttgcttttactgccgcttataataccggcggtaagctgtgtttcgtacattttgggctataagaatttctctgtgggagaaaagcttatctacaagaaaaaataagataggggaaaattaaatggcaggctttttcggcttattcaattatgaaaaggaaggaccgggaatttcaaaaaacgcgcc

SEQ ID NO: 3319 - DNA, 4857 bp, Unknown
  16S sequences of unknown bacteria
aatgaaatttccgctcccgttttattttgcctcgccgtaaacggctgccgctctctttttcagccgggacaaacgttttacgctttttcgatcgccgtatatacttccttcaacgactgcgtatcgtagtcctcgatccgccccgcgtcggcaagtttggcgatctccgcatccagcggcattttcgaaatcgcgggaatcccatactcctttgcgatagcggcggctttgctctgaccgaagatctctatttttctgccgcagtccggacaggtcaaataactcatattttccaccagaccgagaacggggaccttcatcattcgcgccatggttacggccttttccaccaccattttgacaagatcctgcggcgtggtgacaatgacgacgcccgccaaaggaatgctttgaaacaccgttaaaggcacatcgcccgttccaggaggcatatcgatgaataagaggtccaaatccttccagacgacgtccgtccagaattgtaaaaccgtccccgaaatgacgggaccgcgccagacgacgggagtcgtttcgctgtctaaaagaagattcatggacatcatctgtatccccgacggcgcgagtacggtgtctatgccttcctcgctgcccgtggcgcgttcggaaacgccgaacattttgggaatggagggaccggtgatgtcggcgtccataatgcccaccgatttgccctgtttatgcgcataggaagccagcagggaagtggtgagcgattttcccaccccgcctttgccgctgacgaccgcgattacttttttaatggacgagcgtgcgtgcggcgctttcaaaaagctctccgttttcctcgaagcgcagtcggaggaacagctcgaacagtcatgcgtacaattttccgacataattttctccttttttaaaatattatcattatacacctttgtcaaggatttgtcaacccaaacgcctttcctcaaaccttaaaaatcccctcggattttcaaaacaaggcgctttacgcgcctgcgttgagtttataatagagccctttctgcgccatcagttcctgatgattgccgctttccgcgatgcccttattggcgatatacagaatcctgtccgccttgcgaatggtggacaggcggtgcgctacgacaaaggaagtcttttctttcaacaggatatccagcgcgccttgaatcaactcctccgtttccgaatcgacggaagaggtcgcttcgtccaagatcaccacagcgggatttttcaacaccatgcgggcaaaggaaatcatttgtttttcgcccgcggaaagaccttctccgccctcctccgtcttggcgtaaaaaccgtccggatagcgttccgccacgcggtcggcatagatgcgctttgccgcttcgatacattcctcgtccgtcgcgtcgggcctgccgtaacggatattttcgatgatcgttcccttgaagataaagggatcctgcatcagtacgccgatttgactccgcaaagagtgcagactgacctcccgcacgtcctttccgtctattttcaccgcgcccccgacagggtcgtaaaaacgggtaatgagattgatgacggttgtttttcccgcgcccgtgggtcccaccaaagcgatcgtttctcccggtgaaacgtgcagagaaaagttttccaaaatattgacgccttcttcataggaaaatgtgacgttttcaaattccacttcccctttgacggagccaagctcctgcgcgccctcttcttcccgaatgggattgggttcgtcgatggtttcgaatacccgttcgagattggcggaaacctgcgaaagattttgtaagacagaagaaagctgcataaacggcgtggcgcaaaggctcatataattgagaaacgccacgaccgtacccgtctgaatactccattttcccgtcgtcatcgcccagatggataccccgtaaatgagcagcgtgcccatattccaaaacagatcgaccacgggagagttgagttcgttgacggcgacgatcttcctccattgattgaggctggtcgtttgcagttcgtgatagacgcccgcgttataattccctctgttaaaactcttgatgaccttttctccgttgatggattcgacgatataggcggtgcgattggaatccttcgccttctgcgtgcggaagagtttgcggataacgccctttaaaagaaacacgcacaccgccaggggaatgaccatcgcatagacgacgagcgccaggagcggacttaaaaacaacatgaacaccgtcaccacgacgatattcaaaatatcgatgatgaacagcatcagctgcgaagcgaaaaagtcccccagttcgtctatataatcggtgacgcgaacggagatttttcccgcggggcggttgtcgaagtattcaaagggaagcttttgcagtttttcgaagatctccgtgcggatgtccgctacgatgccgtcccccattttccacatgattctttcgtaaaagtaaggcagaatcgcgcgcagcgccgaaacgaatacaaagcccgccaatacgctcacgagcagagaataattcctgtcgggaatgactttgtccacgatcgccttgatgaaaagaggcggtacgagagccgtcaaagtgctcagcgcaagcaggatcaccgtgatcttgaacgcctgctttttgggggcgatatatttaagaaagcgtttgagcagcttgacgtctaccttttccttctccactttctcgtctatataataggtatttcgtttcatttcagtccgcctccttgccgtaagaggaatcgtcaaggctgccgtcggcgctctgcctgcgatacaccgccgcaaagcgtccgttttccgccgccaactcctcaacgcttccccgctcgataatctctccgtcttggaggtagacgatctcgtcgcagtctgcgacggaagaaacgcggtgcgcggcgatgagaagcgtcctttcgggcgtcttttcttttaccgcagccagcaattttttctccgtgaccatatccagggcgctggaagcgtcgtcgagaatgagcacgggcgcgttcttcatcaacgctctcgccacggaaagccgctgtttctgcccgcccgaaagccctaagccgcgctctcccacgatcgtgtcgtagccgtcgggcagcttttctataaatcgggcggcctgtgccgtttccgccgcctctttcacgtcctccacaggggcttcggggtcatagaaggcgatattggaatccaccgtatgggagaagagaaaaacgtcctgaaaaacgtaagcgtattcgtcgcgcagcgcgctcagggaatagtcgcgtatgtccttgccgtcaatggtaatcttacccgccgtcacgtcgtagacgcgggaaaggcattttaaaagcgcggactttccgctgcccgtgccgcccatgatccccacccgcttgccgtagggaatatcgagagaaatatttttcagcacctgtttgtcgcccagcgtcaacgaaacgttttcaaagcggatatgcgggcgcacggatacgcggagcgcttcgggatattcttttattccgctctccgtttcgagaaaatgtcggagtctgcccaaagaaaccagctgtcgctgcatattgctgatattttggctgatctgggtgatatgattcatgatcttcatgacgtacgcgcccgcggccgtcagcgcgccgatcaggagcgagccgtcgagcacgagaaagacgcagacgatgatcgtcgccgcgtaagcgagctgcatataggaattgaaaaacaggttatacttcgccgccgtatcgtcgaggcggaacatgaggtcgcgcacggcgtaattgtcgcgttcaaattttttctcttcgtatttttcgttggcgaaagcgcggaccaaccgaacgccgcggatattctcctgtacggtaaggttgatgtcgctgtacgcgcggcgcatatccgtgaatatcccccgcatcacttttacgtagcgaacgagcgtgacgattaagggcgacgctatcgccaaaggaatgagcagcaaccaggggctgatcgagcttaaaaacaggctcgtcacgatcatcaccgtgacgctgtcgaagaaggagatgaaactgcgcgaatacatttctttcgactgtacgatatctcggttcatcaccgtcatcaattcacccgtattaaattgagaaagggcgctgccgtcgagatccaaaagttttttatacgtttcgtcgcgccaacggctctccatacaaaaaccgacgttttgaaaactgacgtttttgacgtaaataaaaatcagacgaacgagaagaatgacggcaaatacccccgcgcaggaaaaaaacagctccaacgtgccgaaatcgccgtattttcccgtaaagagaaaggcgaaaaggccgctcggcgctttgaaatgagcgggatcgtaacacaccgcataatcgagcatggccgccgtcagaagcggcaggcacagatcgctgacgatagcgataaggctgcttacgtaggagagcaaagtgagcggccaatattttctccaatatctggcgccaaaagataggttggtcataaaaaatccttattcgaatcggatttgcgggaaaactttgcaatcgacaaaacgaatgaaactatgttatcaagagtataaagcttttcgccaggtttgtcaatttcctgacgcgggaatctttaaaaaagtgacaaaaaaatccattcgaaaacggttgcattcaaagcgaaaatagtgtataataaataagctgtgctaggtggggagttagcggcaccctgtatctgcaatccgctatagc

SEQ ID NO: 3320 - DNA, 5034 bp, Unknown
  16S sequences of unknown bacteria
tcggccgccgcctgacgcgcggcctcctgttgggcgaaagcgaacgcctcgtcgtaggcgtcttcgagctcgtctgccgtgaacaggcgcgtcccctcttcggcgtgcacgaggtagccatcgacgcccgccggcgtgttgcgcggctcgacctgcaccgcccgcgtggcagaaatgcccgcgacaactgctccgactgcgttagcgacctctgcgtattgcggtattacgtattcagcgcccaatgcctgggctaccgccggcaaaaagatgtgcgtcggcgctccgatgccgacgaggcgcccgggcgtcgtgaagttcaaatcgaacagggcatctttcttgccgcgccgcgcgcgctcccattcctcgcgcagcaccgtttcgaaccccttgaagggaccgtcgacaaatgccttgggatagcggttgcgcagcaagatccgcacgatgttggaatacagcttgaactcgaccaggtcgtagacggcgtcgcagaactgctcgggtgtgagctgtgggaaccccgtgcccatcgactcggaaaaatagcggatggtcagctcggccgcctcggtaccgtagcggctgaaatcccccttgacctgcatgatgtcggtaggcgtgagccctgcgcgcatgacgatgccctcggcctcgaggcgcgtgctgtcgatagtgtagatgtcgatgcgctcgcgctcgcccagcagacagggaccttcctgcaacgtcttgatcagccgccgctcctcgcgcgagtaccgcatgaggtcgcgtggctcgcgcaccaggtacaaaagctcgttgaacggcagcgacgagcgcagcccgcagtccacgagcgcccgcagcttgtccgtgacctccggccagcgctccgctgccgcgctgctcggatatggcgagctggctgtccttcaggcgcacggcgctgtcgccgcccagcccgaaggtctcgatgaacacgccctttgcctgcgtctgccagctcccgatgcggatgccgctcgtcatgacgggcgcgccgccttcgacgagcgagatgtccgtcgtcgtgcctcccatgtcgatgacgaggccgtctgccaggtctgcaagctcatggctgccatggaccgacgcggcaggccccgataggatcgtctcgacgggacggtctgccgcaagctcgcttcccatgaggctgccgtcgctgcggacgatcatcatgggcgcgtcgatgcccgccttctcgagagccctcgcagtcgcgctcaagaagctctcgaccacggggagcaggcgtccgttgagcagcgccgttgccccgcgggccatcatattgaggccggacgacagctcgcagcccatcacgaacggcacctcatagcgtgctctgagcgcctccttgcccgcacgctcgaccacggcgccgttgcgggcggcatttgcctcgcacaggcagatggcctgcgcgtctccgaaccagtcagcatgctcctcgacgagcgcatcccaatcgggcatgtccacgaccgagccgtcgaacgagcccttggtgtcgaggcagagcacgtcgccttcgcgcaggccgtacttcttctcggcgccgatgcggcgcaggaccttctcggtcgtgcccatcaacacgagcttcgcgcgcccgcccttgccttcgacgcaggcgttggtggcaagggtcgtcgaaagcgcgacgaactcggcttggccgcgcagctcggcgggaagccccgaaagcacgttgtagatgccctgggtgaggtcctctttcgtcgtacgcgacttgcccttggcaagcaccgcacgcgtctcgaagtcgaatgcgacggcatcggtataggtgccgcccgtgtctatgccgatgccgattctcatatttgcgatgcttctctctcgagtcgtgtggatagtgcccgggcagctctgcgctgcgaaatgtgaaaagcccctcccgtcgccaaagcgggaacaggaggggctctttcaacgtgttgtcatatacggcttcagagcacgtgggctcggcgccgtgagctgcggctcgtttctacttctcggacagcagctccaccgcgcggacggcggcctggccggcgtcctcggtgtaggcgtcggcgccaacctcgtcggcgtaggcctgggtgaccggcgcgccgccgatcatgatcttgacctggtcgcgcaggccggcctcctcgatcgccttgatggtcgtgttgatctcggggacggtcgtggtgagcagggcggagcagcacacgatgtcgatgtcgtcgtgctcctgcaggaagctcacgaaggtctcggccgggacgtcggtgccgaggtcggtgacctcgaagcccttgccctcgatcatcatgcgcacgaggttcttgccgatgtcgtgctgatcgcccttgacggtgccgatgacggccttgccgatgggctcggcgccctcctcggtcaggtagggcttgagcaccttggtgccggcgcccatggcgcgggcggcgatgagcatctcggggacgaagacctcgccggcggagaacttgtcgccgatgatggacatggccgcgacgaggcccttgttcaggatgtcctcggggctgcagccgtcgtcgacggccttctgcacgagggccttcacgtccttgcgcttgccgtgctggaccgcctcggagatctcgtcgaagatcgagccgccctcctcgggcgcctcgtcggccttctcggcaggcttagcctcggtgtcgacgacgatcttttcctgctcggcggagaagtccttgaagttcttgcggtcgaaggtcttgaagtactcggtgctgtactcggaaattgccttgccaatctcgccgtaaacctcggggtaggacgagaggttcaggccctgggtctggcacgggatgaacgacagcgggccgttttcgtcgcaggtcttcttgacctgggcacgaatcttctcggggctccagtcgggaacgtcgacgatggtggagtcgacgccgcccatgaaggtgatcttgtcaccgtactggtcgatcatcttggggatgtcgttggtggacatgacaccctgccagacgttgatgcccatttcgatcatgtacggaaccagcgtctcggcatacgagtcggagtggtgcacgacatacttcacgccgtggtcatggtagtagccgtaaatctgcttgtaggagtccaggaagaactcggcgaacatgtcgggcgccaggaaggtcgaggtgttggtgccccagtcgtcgtggtggaacatcgcgtctggcttgatgtacgtgcagatgccctcggcgatgttgagttcccactcggtgatgtacttgatgaggtctttcatctcctgcggatgctcgtagaagtccgcgaggatgcgggtgatctcgcccaggtagtgggtcagctcgaagacgccgggcagctccatcgcggtgacgaactgcttcttgcgatcgatcttctcggcctgctcgatgaactcttcccactcgctttcggggtagatgctcttgggtgcgtgcaccgtctctttccagtgcgtgatgtcgggcatgacgataaggtcttcgcggtgattgggaaaggcacccggctggccgattggccacgacaccgtgcagccccagtcgttgatcttatcgatctcgcccggctttgcctggttgcggtatttcagaatcgggttgcgcacaaaggcgaacgcgtcgtactggttggcgaagcgctcggggttgccgcgcttgattacctcttcgaggttctctcgttcagtgagcatatctccctctttccgtaacgaatgaacagtgccttctcagctgatatttacagattagtcaggcgtttcatagcccgcatcatctcctgtgcccagacttgcctcgccccccttgtgcaacctctccaatatgcgaagttagctgacactttactaattcgccgccctctagcccacggtgcagcacgagagctgttagaattgtccccatcaaaagcgcctgtagatggaacctggaggataacggtggagctttccctcgcgtttgtagcctcgagccttcatacctcgtacccagtcacgcttcgcggcgccgatggatactttcgccaaatcgacaatccccggcacattagcacatcacctacgttcaaaaccgtgcgaatgctccagaagacgcgcacagacgagcgcctcgaaaaaatcctcgtcgtcgcacaggcgggcaccgacctggcgcccgatgctctcaaggaactaaaggggctcatctggatcggcaacaccgagccaccgcgcggcatcgacagcctgtggatttcttcccaagtcgacccgatcaacgtgttctatcgcgtgctcgacctgttcgagcactataacgagtgggaaaacgacctgcgcgacatgctcttgaagcgccgccccagcaaggaggtcgtcgcgaagatcggcgaggtcacgcaacggccgttttggtatgcggacgcaacgctgcacgtgctttacatgagcgacgcgccaaagctctccaaggtgagcgagaagtggcgctaccaggagaagacggggcgttaccccaacgacgtcatcagcacgctcgtggcaagcggcgagctcgacctcatcaacaaccacccgcacgcatggattttcgaggttgccggcagccagacctacacgctgccgttcgtgtccaagacgatcagcttgaacggaggcgtctacgggcacatcttcattatccaagacgagccggggcatgccgcatgcgacctcgcctttgccgagacggtgggcaatctgatcgcgacctacgtccagcacagccgcaacagcggatacagcggcaagcgctactccgagcagctgctgcgttcgtgccttgccggcgacgaggtgagtcaggaggaacgcgccgagctgctcgccatgctggggtggagcgacagcagcaactttgccgtggcggtgacctgtatcgttttctcggacacgcatgctagaggaatccgaatcccttagaa

SEQ ID NO: 3321 - DNA, 10503 bp, Unknown
  16S sequences of unknown bacteria
gcacgcgtgccgccgtcgtgacagcgccgtcagcgagcgactcgcgggtgtagtcgcttataaggggcagccaggaaagcggcatggcgaccgaaagctcgaccgctccgccgaaggacagcgcctgctccgcagcgggagtgagcacgtttccgctgaagaaaataaccttgcagagaatgaccgtcagtataaagagagcggccatggccacggtgtttatcttgccgaggttggaaattcccaccatgatccaaaggattatgagggcgccgatgacgacacaccacaaaatgcggccggtgccgaatatgccgtcggcggcaagagctccgtcataaatcatgatggccgtccagcccacaagctgaaggacgttgagcgtcgaaaagagcagtccgcccttacttccgaagcttgccttgacggtctccatggccgaaaggcgcatttttccgccgataactccggcaaggaaaagcataacgcagccgataacatgtcctataacaacagcagcaatgccctttcccatgccgaggcttgaaaagctcattcccgtgagaatttcggcgagcgataccgccgcaccgaaccatataagtccgttttcaaaaagcgatgtttttttctgttccatttcagttgttctcccttgaatattcgccctttatgtcaaaaccgtgacaaagggggccgcttcccttacccaaatcgagcattgcctcaagagcgccggaaatatattccttggcgcgtccgacggccgtttcggtgtcaaatccctttgcgagattcgaggcgatagccgacgagagggtgcacccggttccatgggtgttggggttgttgatacgtctgccgttgaaccatttatacccgccgtttttataaagcaggtcgtttgcgtcgttcatgtgatgcccgcccttgcaaaggacggcacagtcatattgttcgcttatggctttggcagccgtaatcatatcctcgggagaggtgattttcagtccggtcagttcttcggcctcggggatgttgggtgtgagaatgtcggcaaggggaaaaagcagctgctttaaactgccgattgcgtcctcgcttataagacgtgcgcccgaggttgccaccattacggggtcgaccacgatgtttttcgccttatattcccgaagcttttccgctatgaccgcaacaagctccttgctcgaaaccatgccgattttgaccgcgtcggggaaaatgtcggtaaagacgctgtcaagctggtgagcgagaaactcgggagtcgcgttcatgatgtccgaaacgccggttgtattttgggcggtaagagccgtaacggccgacatggcgtaaacgccgtttgccgtcatggtcttaatatctgcctgaataccggcgcctccgctggaatcgcttccggcgattgtcaatgctgttctcataaaaatacttcctttcatacagcacggattttatatagcgacagaaagtggtgcccccgatctgccgctcatattaaatttatctaaaaaagtctgaaatccgacagcctgtaaagggccttgtccgcagtcttttttatttgttcaaaggcgggcgcgtttacctcgtcgtagactcccaccgttataaagccggcctttttggccgtttccaccgcatggggagcatcctcgaaaaccagagtttcctccggctttgtccccaaaaattcggcgcatttttcatatatgagaggagagcttttgccctccccgacctctgtgcaggtaaatattctttcgaaaaattccataagtccgagtttttcgagggccgttctcgcatacttttccacaccggaggtggcaataaccgaccttacgccgttttcgctcaaatattcgagaagctttgccgcgccttccttttcggccgcctcgttttcgtaataattccgaagcagcccggtaaagccgtcgcacacttgctttgccgaaagctcgggaagatagtgctgccttaaaaactccgagccttcttcaaggctcattttataaagctgctcgtttaagctttcgtcggcggtttttcccatggtctcaaggtaacgtgtggcaaggtttttccatgttcccatggaatcgataagcgttccgtcgacgtcaaaaatcgctccctttatcatgtcattcctccgaaactgcttttgccacggcctctttaagacggcttgccgcaagctttatgtcgtccttggcgtaaatggcgcttatgaccgccgcgccgcagattccgcttttcgaaagcaaggcgacgttttgctcggttatcccgccgatggcgaccaccggaatgtccacggcatcgcaaatttccttaagggtttcaaaggaaacacgctttgcgtcgtccttcgagccggtggcaaaaaccgcccccaccccgagataatcggctccgtgagcctgagcctttaatgcctgttccacggtggacgccgacactccgatgattttatcgggaccaagcgtctttctgacgtcgagcgcctccatgtcgctttgtccgacatgaaccccgtcggcatcgatcttctttgcgatttccacattgtcgtttattataaacggcacgtcatattctctgcaaagagcctttatctcctttgcttcagaaagaaaatcctcgctgtcaagctccttttcccgaagctgtaaaaacgtcactccgccgtcaaggctttcattaacaacgtcgtaaagccgccgtccgtcaagccaaaagcggtcggtgactgcataaagcagcagcttttttctatcgaatttcatattttgcgcctctttccagctcatcgccgctcatgttataaacggcgtcgattatacggtttcggtaggttgagttgccctcgccctccttaaggttttcaaacccgatttctcccgcaagacccatggcacagacagccgcagccgcagcctcgagtgcattttcggggttcgccgcgagaaatgccgtcaaaaggcccgaaagctggcagccggttccggttattcttcccatttcggggcggccgtttgtgatgacaaagcagcggtctttatcggccacaagatcgattgcgcccgtcacggcaacaacacagccgtgagccgccgcaaaagcctttacaaacttcaccgactcgtcaagatttgactcgtccaccgcgtcggccatgtctgcgtccactcccttggtggttccgccgcctcctgcaagagtctttatttcggaaacgtttcccctgaccgccgtgaatttaagctcgttcaaaagcccgacggccgtgtctgtgcgaagctttgaggctcccgcccccacagggtcgagcacaagaacgtgggacagctcctcggctcttttgccggccgagaacattcccgaaatggtacgcttgttaagcgtgccgatattgatgttaagcccgccgcaaagtcccgtaatttcggcggcgtcctccggctcgtccgacattatggggctggctccgcaagcaagaatgatgtttgccacgtcgttaaccgtaacataatttgtgatattgtgaattatcggtgcattttctctgaccttttcaagatattttccaagcataaaatcactcttttcaaaaaaataagggcacgcccgaaaggacatgcccgcaaaaatcccgtaaaagatatgtccctacgttggcattatccaaatcaggttcagggtcaaggaacacaccttttctcagcctgctttgcacaagctcccctttgttaatatctattataacacattttccgcaaaaggcaagagaaaaaataaaaaagcttttttcgtgaaaaagcgccgcatgactctgcctctctcgccttaggcgccagacagaaaccaagaagttctgcgcggcaaaaagcctcccttgacttaagcgcttgatgtaaattgagaagttttgtgcagcaaaagcctcccttgtgtaaagggaggtggcgcggcgcagccgtgacggagggattgtcatatgttgcccttcggattaaagtaacatataaaacttacaagcaaacccctcaaacaactgtgtgagataaattcggcggttgtctgcaaacctacaatccctcagtcagcttcgctgacagctccctttacacaagggagccgggggctgcgcgtaacctttcttttagttgttatgcaagagagccgaaaataccaaaccgcggctgtttacatagaggagccggggccacgcggaaaagtcaatttcaattttgacataagggagtcggggcgaaaaagccttcttcacaatgagcggaatcattttgaaaacgagcctttgattacagaaaatccgattttaaattgtgccaaacaaagcgaaaagagccttctcactttaagcaaaaaggctcctttaggtacaacgtttgttaaaaaattatcttacaacttcaatgttgaagctttcgcagccttcgactgcgcttgcgggaacttcagctgcggtaaccgtcattgaaaaacgcgcgttggggttttcactcgccgggacgttgcttttaaagacaacatttgcggtcgttccttcaacggtcaccgaagaaatctccccgtcatcaatgatgtccccgtgaattccgaaatcatattcgaaaagcagaacattgttgttgaaaaatttgtcgccgataaggtcaaaatacataccgatggatttgttttcgccaaagcccttttgctccatcaatgctctgacctccgaaagttcggccttgctgcggattatttttcggaaattttcctcttcaaaaggaataccaccgatgtaatattcgcagaactgataattatcgggcgttttaaaactgccgtattcgcttgcaaggcgaacctcggcaatttcggcatcctcgggaatcaaatctttggcaacggcatagtaaataacgtttttctgctgaaccgcttggtcggtaaagcggcatccgagaaggatatttttgccgtttataacaacctgcgaaccgacaacctctttggccgatttaaacggaagcgcaaaaccgagtacaacgttattttcgaaaaactcctcattgtatttttcgtccgtaactccgaattttacaagctcctcacggctctcggcgataaatgtaccgaccttttcatttttatactctgcgcggccggcagtaaactcatcggtctcaagcagcctgactttgtcatcggacgccttgcccagcgccttttgaagaataacaagagaatcggtcacggtaacgctgccgtctccgtcggcgtcggccgagaacggaacgttttgatataccgccctttccccctttaatccgatattctttcccgcggcatactgaagggtgagcagcgcgtcggtcaaagaaaccccgccgtccccgtcggcatcgcaaagaccgggatcaaggtgagcctgaaggacgtcctcgtcatccggaagcgtaccgtatgtttcggctgcaacgggcgaaactgccaaaagcgccgccagagcaaatgacaaaatttgttttttgtatttcataattatcacctcaattgtattttaacgcaatatacaattgttgtcaactaaaatttgtcatattttttataatttttttgtttaggttgctgcctgcattatggccaacacgtcggtgccgttaacaacgccgtcgttgttgtaatcggccagataattctgaagataggaaggcgtcaccttgccgacggtgctctgatttacaaacagcgcgtcggtcacggtaattctgccgtcataatccacgtcgcccttggttatgctgagatcggcggaatattcaaatatatcggcgtttacgttatcgttgagcgttccgaaatccttgataacattccccaaattgtccacaaggctgtatcctctgacggtcagggatttgtcatcattatttctttcccgaacatagcccgtccactttccgtccgacagggccaaatcgagattttcgggagagcaatggggaaacgctatggttccgctgaaggcggcgcttctgcccgtaaaattaaatacgcttgtttcctttttggttctgacggcgtcgccgcttatgcccgtggaaacgctcatttgggtcatatcgtccgatgatacgtttaactttccgaaaacgtagggcgtgtcatttttaacggtgatcatgtaaaaatagtttgccgaaccgcccaagccgaaggcctgctttcttgtgctttgataggcgttctgccaatttccgcttatttgcgaaacggagttcaaagcgtcgtaaagaacccaaacatatccgttgtttgcgtaatcggagccccatgaatttgcgattttgaatgcgccgcgctcggacggagaaatggtgccgtcgccgttgacatctatgcagacattgtcgttatagccgacgaccgtaagagcatggccgctgtttgcctttccgactctgacaattattttcccatactcagatgactccataatgttataatcggtatcggtcgccacggtcaaaatatatccgttcacgagctttttcttgacgttgtcgagacatgccgatgacgggcttgttatgggagtgtcggcggtgttgatatttgttgtgtaccaattgtcaagcctcttttcggctgcctttgcggcaagagagaaatcggtgttccaacttgtggccccgccgtttgcttcataggacaagtagggcatgtccgcaagggtacatccgcccgccttttcgagtattgtgtaagccgtactcatggccattccggtttcgccgttttcgacggcgaggaatgaaaatgtccattcgggggaataaatactcccgtcggaattcgccgatgtgtgatttaatttgttgatttcataggtgaactgataataggttgttgcgaaagctgtgcaggtgccgcggttcccctgagacgttatgggcggaaaataggacgattggctgagatccaccgaagagggcagcgacgacgtggcgtttataccgtcggctctgcctatgtttatcgtctcgttttccaaatgctcaagaatgacgctttcatcatccggcacaaggccgtaataatgctccccgtcggtctgctcggcatttaccgcgcccgttgcggcggtcatacccgccatgattgctgctgatagaatgattgataataatttggttttcataaatcatacctccttgtttcgcagtatacattatttgtcaataattgtcaagtgttttttcaatattttgtaaaaatatttttcttatgcggtattttgtgctttattattgtcattttattgtgtgttttggcaaaatttttctgtgataatatcataaatcaaacacacaataatcttgcaaacgcaaataccgtaaaggagtgctaaagatggcaaagagcaataagactctcgttcccgaggctcgcgaggctctcaatcgctttaagatggaatctgccggcgaagtcggcgtaaatcttaagcagggctataacggcgacctgacctccaagcaggccggttctatcggcggacagatggtcaaaaagatgatccagtcttacgaaaacggccttaaataagaccgaaaagacagaaaatccgtttcccgaaaatcgggagacggatttttgctttggtttttattccttttgagaacaaaggacagccttgacagtattataattctgtcgggaagtgatgttatgtcagattggaacagcgctcaatatttaaaattcgagagccagcgcacaaaaccctccgccgaccttataagccgaatttccgaccttgagccgaaaaccgtcgccgatctgggctgcggcccgggcaacagcacggcgctgcttgcaaaaagctttaaagacgcccgaataatcggccttgattcatccgacgacatgcttgcaaaggcaaagagcagttatcccgaacttgaattttcaaaatgcctcatgcccgacgggctcggtaaattcaagcaaagctttgaccttattttttccaacgcctgcatacattggataaaagagcaaaggactctgctcgacgcggtttatgaaaagctttcggcgggcggcgtttttgccgttcagctccccctcactgagcgggcggatttttacaggctgctcggcagtcttacggccgacggaaaatggaaaaagctttcgcaagtcaggaattttcatgccctttcccccgaggaatattacgatgagctgtcggctcgttttgagagtttcgacatttgggaaacggtatattaccacacggtggagtcggcagccggagtgctcgaatggtacaagggcagcggccttcgcccctatctcgacctgctttcaaaaaccgagcgtgaagattttctttgcgaccttttgtcgctcacagatgaaaatttcaaggtgagacaaaacggaaaaatcattttaaaaatgccccgtcttttcttcaccgcaacaaaataatcaaaaaaggaaccgccgcacggttcctttttctttatgcttttcaggcaagctttgcgccgtattcggctatgaccgattcgacgccatcggtgtcgtccatataatacataagcgtcttgacgtttcctttatacccgtcgtacttattaaatccgtagttgcaggtataggaaacaaatccgtcggtgtttttgacgtatatacggatcccgtagctccagcccgcccgcttttccggcagagcagccctaagctttaccgacgcaattttcccgtatatttcttcaatgtcctccggctcaatcgtttggctgacaatgccggtggttccgttaagcagttcgattctttcgatgctttcggtctttattcctccaaccgcctgctcaaaggtcagcgggcggaaaacataagcaatgccgccgaaaatcacggccgcagccgcaacacagcaaatcagtattttggttgattttttcatgttaccacctcacataacttgcatgaattatacttcccttgaaatagtagaaatttgatatagtggccgaccacccgtcagcaactcttaaatagtttccgtcgctgcattcttgatagccaacacacaacaaggagtggttgccatatttactgtcattatttgtccctataagtaccggataacttttatcaacgttgttttttataaaattccaagtaacgccgtttaaaagcccgtcctcctgataaccgcttcccgcaataagatcataccttgctcgtgaaaatgcagtcaatccgggaatgatttgattaaaatatgttcctatttcatattcacttctcatcgccgcataaagcatacaaaaaaccgacaccgacggatttctcgctctttcgctgccattccacaatccataatgccctcccggttttatggttccccaataatacaccaagtttgtggctgcagtcggtgtgcagtgattttcattaacaaacttaatcatagtataaggaacaaaattaaaattgttcttgtcatcatcccaataaaccccgtcaaggtgcttattggtatacaccacctgtgccaaaggacttacctctcctgcctgttcccttgctatttcctctttttcttctttatactccttttttatttctgtttctgtttgctccaaaatttcgtcggttaccaccgacttgtattctcccgtttcctctcttgtcaggaaagaaaatccgttgttataaatgatttcgtccgatttatcaacttttttatcatggttttgctcatacatactgtcaagcataaaatcgcaatcgtatccaaaggcctgaacgtgtggattttctccgaatgcatccacaaaaatatatcctatcaattcttcgtcggttataaccctaaacaaatatgaatttgtgttcccgaaaggatccgaaaaaggaaccgtttcatatatgcgggttgtatcgttccacctacaccctatttgaccgatttgattttgtacacatcggtttgctattgcctcagcctcattttccgatatatatgacacctgttctactgcacttgccgtcacttggtttctatcggaagcatagtttgagaaagtcatcaccatagctattgacataactccgctcattattttattcagcatacttttctcctctcaaattcattgaccataatttttttcaaaatgtcctttgagcgtatattctattgtttccgatgaatctatataccaaagaaaatctccgacaccttttttatatccatcgtatttacaaaaatccttgttgcatccataggatatatacccatcgtaatctttaacataaacatctattatccaagtacatccatcaagttttttttgaacagccgcttttaacttgacagatgaaattttttcatagattgcttttatttccgactcggataatatgtccacttgt

SEQ ID NO: 3322 - DNA, 32759 bp, Unknown
  16S sequences of unknown bacteria
tttcttcggcaggctgattttttacatcattgcccttgtttacatcattcaagggcttcattgtcgggaacaagataacatcgcgaatgctgtctgaaccagtcagcagcattacacagcggtcaatgcccattcccataccgccggtaggaggcataccatattccatcgctgtcaggaaatcttcatccagcatttccgtctcgtcgtctccccgctcccgctgctccagctgtttttcaaaacgataacgctggtcgataggatcattgagttccgaataagcgttagccacctcgctgtggcaaataaacagctcaaaccgctcagtcaaccgggtatcctgggggctgcgcttggtcagaggagaaacctctaccggatacatggtaataaaggtcggctgaatcagtttttcctccaccttctgatcaaagcaggcatacagtgcgttgccccaggttttttctgctgcttccggcagttctactccgatcgccttggcagcttctaccgcttgagcgtcatcggaaatgacgccaaaatccacaccggcatattcctttaccgcatctaccatggtcaagcggcgccaaccaggcgttaagtccaccgtttctcccaaccattccacctgatagctgccgtgcagttccatggcggcggaagagagaattccttccgcaatatccatcatcgtgtggaaatcagcataagcctgatacagctctacggttgtaaattccgggttatgcttggtatccattccctcattgcggaagatacgcccaatctcatagacccgatccatcccgccgatgatcagccttttcaagggcagctcggttgcaatacgcatatacatatccaaatccagcgtattgtggtgggtaataaagggccgggcagcagcgccgcctgcgatggtattcagcacaggcgtttccacttcaatatagccccgctcatccaaataattgcgcatatggcgaataaacttcgagcgcataacaaaagctttttttacatccggattgacaatcaaatccacataccgctggcggtaacgtaattccgtatccctcaagccatgccatttttccggcaagggcagcagggatttggacagcagctttacttcatctgctttcacagaaatctgccctttctgcgtgcggaacacctcacccttaattccaataatatcgccaatatcatattttttaaaccattcgtactcttcgtcacccaaatggtcttttctcacataggactggatacgcccgctttgatcctgaatatcaataaaaccggcttttcccataccgcgtttggagaggatccgacctgcaacggatacctgttttccctcatattggtcgaatttttcattaatgtcttttgcgtaagcatctacctcataggtagtctcttcaaaaggatttcgtccagcctgctgcagtgcggctaatttctcccgccggatttgcaggatctcggacaattccgcctccggctgctgcgcctgcggcgttgtgttctgctcgtccattttctgacctccaaatgcgtttacatcgcataatttgtaatacttgatattttaacatagtttccgccaacctgtaaagaaggaatcccaaaaaagcttttttcagcggccgtttgctttttcacacaaaatgctgaaagctatttttaaatcttcagcgtaaaaggatgatccaacctcacaactttggccttttttaattttgacaataaaaaagggaacgcactggcgttcccttttgtctgacgaccgtttttatttggaaattttcagaatcttcaggcgcatcatgcctgcgggaacttcaatatcaatttcctcgttaatccgcccgccgattaaaccttttcccatcggcgactcatccgaaatacggttttccatcggatctgcttctgcggaaccgacaatctgatattcttcttcctcacccatatccatatccaaaatccgaaccttagaaccgacaccgacaatatcagtagacaattcatcagtatctacaacctcgactactttcagcattgcttccagttgggtaatcttggcttcgataattgcctgctcattttttgcttcgtcgtattcactgttttcggacaaatctccaaaagacaacgccacttttattttttcggcaatttcttttcgccgaactgtcttcaaattttcaagctcctgctcaatttttttcagaccgtcctccgttagacgttttttttcagccacatgcatcttcctttctatccgtgccgttacagacagtagttgtattataattcagccgccatattctgtcaaggcgcaaactgaaaaccttctgtgaacaaaacattatctgtccagacagctttctgccgcttgttggagcaattccttccgagataaaagaatcccattttgccatccctgatagggcatttcggtgggcgaaagcctgttttcttgcaaaaccgacgctaaaaaatcctgcgccaaaattccctccggcaatctccactctcccaacgcttccgatgccggttccagacaaattccctttcccggcatccgcttagcagtgagaaccaatccctgaaatcctttccatgggcgcaaccatcctgccgggtctaacaaaatcccccttccgtgctgcggtattactttatcatgcaacagtacaacaccatactcctctaacaattgctgcgctaacgcctgccggagatcttcattcggacatgccacatgaaataccggactgtaaaagagccattctttcagccactccaaccggactccttttagatctgccaaaaggatctgccggccgctcatcggacacgacagctgagacaggagccttccaactgctgaacgaaaaaatgattcgtccaaagcatctgccgaaaaaaaggggaactcctccggcggattcaatcccttcggaagaatcaccagcaactgctcttgttcagcagcctgctccagctgatcccatcggatctttcgatcacatgcatgtaaaagcagataagatccccatgggctttgaatttcttctttttcaagtgcatactgccggaaacgaaaagctaatttttcgcgaaagcgcattcttttccattcttcaacttgaaccattgcaatcattcttgtccctcctggtacaagctgttatactgtatgcctgatttcccggtaatatgcatccaaacataaaaaggtgcgctgatctttcaaaaatcggcgcacctttttccaattcacgcttacgctgctgtactttctccttcggcagactgctgcgatacttctccgctctccggctgggaaacctcgccgctcggctcaatcccctcaccgcgcaaagaacttactacaacctccagcgcttttttcagctgcggatctgtggtttcatccaaattctccaaatttgcttccatatccgctgtcaattctacttcatagtctggtttgactccctcgccgtcatagcttacgccactagggggcaggtaacgagctacggtaacattaactgcagaaccgtcattgagtttcttcaccgtctgcatggtaccctttccgtaggttgtcactcctaccgattttgcttttccataatctcgcagcgcctgtgtaaacagctctgcggcgctggccgtccggttattggtcaacaccaccattggcaggtctatctcattttcatcgctctttgccaatacttcaacagtgccgtctttgtattcggcagatatgatatccccttccggcaacaatttatccaacatttttgtcactgagctcagggttcctccgccattgtttcgcatgtcgaataccaacgcctgcgccccctgcccaatcagtgtatccacttgattggaaaactgggtcgcagtactctcattaaactctgtgacttggacataaccaatattgccatcaatgatacgagaaaaaacagttgggatgtccacctttcgccgggttacttcaatcgtcgtatcttctgcttcccgacggtaggtaatatttaccttgcttccctcttcgccgcgaatcgcatccgcagcctgctgataggtttccgcattgacgtccagatcgtccactttaacgatcagatcccctgcctgcaaccctaccatggaagccggagaatcagcataaacttcattgaccagtatatatccactggggtcctgttgagcagaaacaccaatcccaacgacacgaccttccagatccaccatatacgattcgtattcttcgggggtaaaatacctcgcgtatttatctcccgtaccaatcacatacccgtccgccaaggcctcatttagcgcgtcttcatcgatttcatcgatataattggcgcgtacaatacgatccaactcggaaagtttgctatacatggtctctctttcctttaaattgtaaaccttcccgttaaaaacatccatgtaatagatcatggtcatggaaaacgtaaccgccgctgccatgatcatcaacgtaatcgttgcccctaaggatatttttttattcatctgttttctccaatctttgctcgagatgtcacatcataccggctatcgcaggtattccagcgggtttgtgtgtttgccgttaacccggatttcaaaatgaatatgcgggccggtagaccaaccggtagaccctacttttgcaatggtctgccctcgggtgacataatctcccacgttgactacaatctcgctgttatgcgcatataaagtagtatatccaccgccgtgatctacaatcaggtacttgccgtatcctttacccggcgtataactagtgttgacgaacaccactttaccggaattagatgccacaaccggcgtaccgtaaatgtttgccccggagatgtcgatacctgtatggaaatcgctcccgttaaaccgccaaccatagtaagaggtaatattggaataactgggcgaaggccatccgaattgtccgccgacaaaatcttccatagagtccagcttcgcgtaaattgcgtcaatatccgcttggatcgctgccatttccgcctgggtagccgccttgtctttggtaaactgatcctccagtgccgaaatatcctgcaactgctgctgcgtttgccccaactgttcgttgaggctttccgtcaactgatccagttgggctttcgccgcctctacttccgtccggtccgcttctatctgtgccttggcttgttcaatcgactgcttatcagcaagcagttgctcaatcaccgcttcgtctcgttgggcaatacggcccatgatttccgatcgagtcaaaaaatcgtaaaaactatcggctcccaaaacaaggcccagagaagactcatccccactgagataggctgaacggatacgctttttaaaaagggtgtaattctcatcaatttcttctgatttttgctgaatttcttcttctttctgcgagatattgtctcctaaaagcgcaattttatcattcaccagctggatctgctggcgagtcaaggatatctggtgatcaatttgctgtttttgcgccagtgctttctccttatcagattttgctttgttaatatttttctgaattgcatcctgctgtgcctggagatcttttaactgttctcccaagtctgccaacgcacctttgtaatcttcatcctgagaagcgccttgtccggaacctgtgctgtctggattctcaactgtcatatcttctgcaaaaacatgaaatgtaccggcctgtccgctgaaaacaagcgacagactaagagctaacccgattattcggatcaatatttttttagaacccaatctgacacgtcctttcgtgcaggtccacactttatacttttaaatgcttgcgtacaaaaatcatactgccgaaaacgccaatggccacgccaccgaccgcaaaactggcaagcaactgtttcgccacttgggaaaaaggcaccagattctttaaaaaggccgacaacgtcgtggcagcctgtgtttgcacatagttcatcaaataggtatagccgccccataaaatcagataggcaaggcaggcggaaattacgcccaacaaaacgccttcaaccacaaacggcatacggatgaacagatcggtagcgccaacaaatttcataatgttgatttcttttctgcggttaaataccgtaaccttaatggtattggcaataataatcagcgtaaccgccagcaaaataatgacgataccggagccacagatataaacagctcgtttgattcctgtcacagtctctgctacgttggtaggcgcattgacccgcataattccaggaatggattcaatttgagctgtcgtttcatcaatcaaggacagatcttttaaggtaatccggaacgaaagggggaaaacctcttctttatcctgttccagattttccaataggctgtccggtacaatttcgctgtaccgttccagcgcttcctcccgggaaacaaacgaaaaagagtctacgttgctgtttttatccaatgccgctttcacggcagaaacggtgatatcgtcggcgctgtcctccaaaaaagcaaccatctcattttggttttccacataacttaccatcccattcagattaatggacagaagaatcgcgctgccaatcagcagcatacaggaaaccaaaatgccaatagacgccagggacatcattcggttgacccaaatgttgcgtgcgccttcttttatcaaataagtaaagctggaacctttcatcgctgcccccaatccgcatcgtctcttacaacgctgccatcgtcaatcgtgataacccggtgattgaactgggcaaccaaatcatgctcgtgagtaaccattacaacagtggtccccaccttattgatctcattgagcaaatctacgatttcataagaaagctccgggtcgatattaccggtaggctcgtccgcaataatcagcttgggattattcaccaaagctcttgccaaagccacacgctgctgttcaccgcccgaaagctcattcattttgcaccgcgcttttgatgccaaccctaccaaactcagaatatacggcacacgccgccggatatcccgcgtggaaacattggttacgcgcagagcaaacgccacattatcataaacattcatcgtaggaatcaatctaaaatcctgaaaaaccacacccaaagagcgccgaaatccgggaatttgcctgcgtttgagccgattaactgtatagccgttcacctcaatcgctcccgcagaaggcacttcctctctcagcaaaagtttaatcagcgtacttttgccggcaccggaagcaccgacgataaaaacaaattcaccgtcggcaatttccaaatccacatttttaagcgcttgtgtaccattatcatatgtctttgatacattggaaaaacgaatcactttgcacccgccctcacagaaccaaaccgatggcccttagtatttgatggggttagccgttaaatattttttgaccatcaacgccaccttaaaaacgatggcatggtcgaattcccgcagatccaagccggtaagctttttgattttctccaagcggtataccaacgtattccgatggacaaacagcttccgggaggtttcggacacgttcaggttgttctcaaagaatttttggatcgtaaacagtgtttcctgatccaggctttcaatagaaccctttttgaacacttcccgcaaaaacatttcgcaaagagtggtaggaagctgataaatcaagcgcgcgatccccaagttgtcatagcatacaatcgctttttctgtatcgaacacctttccaacttccaaagcaatctgcgcttctttaaacgaacgcgccaagtctttcacgccttctaccgcagttccgatacccacaaccgctttggtgtaaaactccgaaccaagggtatccacaatggaacgtgccagtttttccaaatcctttgatccgatgggagacttgatctccttgaccagcacaatatcattttcgctgatattgaaaacgaagtccttctgtttgtccgggaaaaggttctggactacgtcaaacgcggaaatatcattagacgaaatcacccggatgagcagtaccgcgcggctgacatctgtgttaaaatgcagttctttcgccttcatgaaaatatcaccaggaaggatattatccagaatgacgttcttgataaaattattccggtcatatttttcatcataatattgcttgatggtcaacagggaaatggccaaaacaccacagaattttgcggccaactcatcggctccttctacaaaaaccgcataatccggcttgattctggtgccgaaaggcttataggtatatccgtccttgacaaaaatttcattcccatctaccgcatccagggagatatagtcattgtgcccgccaattttggtcaggtcgctgcaggaaattaccatagccgtgtcgtcaatgacaccgacaacccgatcaatggtatcccgcatttgatgtactacaccttgaaacagtctgtttgacatgataatactcccttctgccgctcgttttgtggcaaaaaaataaaccgtccagaaaagcagaatcttttgatctgccaaaacctcattacatgttgtcattcagccaaccatattcattttacaaaaaaattgcgtttattgcaacctcattatccagaaaagtcgtgggattgccgataaaaactgacaaaatcaaagataaaaataatccattacagacatattacaacaaaaaaggaaaaattttgtgaataagctttgaatatgcctttttctccttctgtaatttggttgcgttttatatttttaagggatcgcaccattttagtcgaagttttggctggtcaaagaatcaggcccggtttttgcctaaacaaaaagaccgattccatttggaaccggtcttggatttgttttaaactagaagattgctctctcagtttctttgtcaaacagatgaatcttattaacatccatcgccattttgatctgctctccagcctgcgcagtaacgcgggtggaaactctggcggtcagagagttgccagcacaatcaaggtacagatgcgtctcagcgcccatcatttcggtaacatcgactttgcactcgaacaaaccagtagtagcagcacccaggaaaatttcctctgtatgcagatcttccggtcttacgcccagcgtaatctctttgccgacatagtctgcaatacccggcacttttgctttggcatccggcagttctaccgtaaagggtttctctgcatcgccatactcaacaaccagcttgccgtctttggaagccagcttcgcatcgacgaagttcatttgtggagaaccaataaagcccgctacaaatacgtttacaggatcatcatacaggttttgaggagtatctacctgttggatgaaaccatctttcataacaacgattctatcacccatggtcatagcctcaacctggtcatgggttacatagatgaaagtagtacccaatcttttatgcagtttgttcaactcggttctcatctgcgcacgcagttttgcgtccaagttggacagcggctcatcaagcaggaaaaccttcggctcacgaacaattgcacggcccagcgcaacacgctgtctctgaccaccggacaaagccttcggctttctgtcgagcaggtgagagatatccaaaatacgagcagcctcttctacgcggcgtttgatatcgtctttcggcgttttacgcagtttcaaaccaaatgccatgttgtcaaacacggtcatgtgcggatacaacgcatagttctggaataccatcgcgatatctctgtctttcggcggaacgtcgtttaccagtttatcgccgatgaacagttcgccctcagagatttcttccaagccggcgatcattctcagggtagtggatttaccacagccggaaggaccaactaggataataaactctttgtcttcgatttccagggtaaagtcagttaccgcagtaacaccgcccggatattttttgtagatattacgcaaagataagcctgccattattcattgacctcctaaatgccaaatacgaaactatacagtttaatattagacgaatttcttttccttatgatagcaaaaaatcgtgcttgatggcaagtacctatatacccaaagttaatctttctactttatctaaaatgcctaatttccagaaaaggtttccagatctgttgaaaatagtctatattttacccaaaagcattttgatttctttgtctaaaatttcgcgcgattctcctggctgcaatgcattatccagtaaaagcccgccgatcgcagtgcgcttaagccagaggactctgcggccaaaggccaaaaacatccttttcacctgatggtacatgccttgtgtcaaaatcacctgacaaagcggctgttctccattttccagcactgatagctgtgcaggattacaggtaaccccatcctccaatacaacgcctgcagcaaactcttccaccatctgctcagtcaacggcccatcaattcgtgcatgataggttttcggcacatgatgtttgggtgaaagaatagaatgggcaaactccccgtcatcggtaatcagcacaaagccctctgtatccttatccagcctccctgctgggaaaagccccgatcgtcgatatgtttccggtaccaaatccagcacagtaggctgtttgggatcccgggcagcacttaaaacgccggaaggcttgttcaacataaggtataaatgtttctggatgagcagaggttttccgtccagttccagcgtatccgtatccaaatcaattttaacgtcaggagacaatgcctttttcccgttgtgcaaaacccgcccctgccaaatcagcttctttgcgtccttgcgggaatattgcgttcttgacgctaaaattttgtccattcgttctaaatgcaagttttttcccccattttttgttcagcagagagcctgtttacgatggtcctctccaactggcagcgaccaaggccgctgccagacactttccatcttcttgttttccgccggaatttttcgttttccggccgcagtgtgatactttcgcacaaacataacgtgaaacgccaatcgaaacacgttgctcgggcaaatccgccgggtactttctccctccgcgtctttccatgcgtcggggatcttccagtttcgaccatgccgtgaggttattatagcatatctgttttctcttatccaatcccaaatcaagacattgaaaaaccgtgagtagaactttcttctccgctgatactgatgtcccctccgattatcctgccatcataaaccagcagcgtacagataacgtgttccggccggtccggatagttaaggacagaatattgatattttttacatctttttccctggtatttcgtaagatccattccctgcgttttttgcaaattattatactcttcgtatattgaatcgaactcctccggaatttttacttccataactgtcaaaggttcctccgtaatctcccagccaaaagaccggataaatttttgcctttcttcttcggtcccccccaagattttttcactttttattttggagtgagctgctgtttgctgaactgtgccaattaattttccgccaaataaaacggctgttatggcaaataaaaaaagccccacaataaaagcaatcttttttttgctgaaacgaaaagacatgataaccataccgcatcctccttttggaaaatgtatatgattttttgtcctatttcatacgcagaccagtccaaatgcttcattttccgcaggacatcattcctcctgatccgacaaaacagctttttcggtcctcattctttttacgcgctgtactcatggcagatgacaatagggctgtcaccggcaggccaccgataaaaagagccatatccaagcaaaactgctcaggtacggctctcctctcactattcttcctgtaatgcttttgcttcttcaatcacctgtacttccaaattggcgggaagttgctcataacgctcaaaagtcagcataaagtagccccgtccttgcgtcatggaacgaatcagtgttgcgaaatcatgcatttcactcatggggacctctgccacaatttcctgcaagccgtcttctgccggattcattcccagcacacgtccacggcgtttgttcaattcacccattaaatcgccggtattattgtccggcacataagctttcaaagagcctatgggttccagaatgcaggggctggctttgggaaggccttctttataagcaatagaggccgccattttaaaagacatttccgaagagtccaccggatgataggaaccgtcggtcaacgttgctttcaggcccactaccgggtatccagccaacacgccttttttgatacagtcacgtaaccccttttccactgccgggaagaagtttctgggcaccgatccgccgaacacattctctgcaaagaccagatcatcactgtcgcatggctcaaattcaatccagacatcaccatattggccatgtcctccagattgttttttatgttttccctgtacttttaccttcttgcgaatggtctcacgataaggaacacggggattttccatcacaatatctacgccaaacttcgctttcattttagaaaccagcacatccagatgctgctctcccaaaccagtaacgatctgctgcttggtttccacattattttcataagcgatggtacggtcctcttccatcagccgctgcagggcctgagcgatttttccttcgtcccctttcgcttttggcttaaacgcaatggacaaacaaggtgctggaaactccatcggctcacattttagcggacgggacgggtcgcacagcatatcaccggtattggttcctgccaacttcgtaacagcgccgatatccccggcaccaatctgtggggtatcctcctgtttttttcccttgacaaatataatcttacccaaccgctccggctgcccggttgttgtgttgaccgggatctggtcagccgtcagtttaccagataaaaccttgacataagacattttccctacgaatggatcagcaatggttttaaacacaaatgccgccaatggctgatcgtctgcacaaatcagctccaccgggtttccgtcagaatccatacagatttcatcgtccgcttccttcggagaaggcatcaactcacaaatcatgtccaaaaccatatcgacaccggctagggtaaacgccgaacagcatacaaccggcgtgatggcgcctgcttttacaccttttttgatgccgcttaaaatttcttcagccgtaaattgttcgccggaaaaatatttttcgaacaattcttcgtctgtctcagcaaccgcttcagaaattgcgttaataaggccatctacacggtggcctgttcccggcatcggcacttcttttgcctctcccttaccgttataggcatatgctttcatttcaatcaaattgatataaccgactacatctcggctttcataaaccggaacaactaccggacagacgctgggtccaaaaacagttttcagctgttccagcactttataaaaatccgcattgtcgcggtcaagcttcgtcacacaaaacatcgccggtttttttgcgtttttcgccatgcggtaggctttttctgtacctaccgatacaccggattttcccgacaaagcaatcaacacattgtttgccgctcgcacaccttcatacattcccgcagcgaaatcaaacaatccgggcgtatcgatcagattgatctttctatccttccagatcagaggagccactgccagagaaaccgaaacctgccgtttgatctcttccggatcaaagtcgcatacggtattcgcgtccagtacctttcccaatctatccgttgcaccagccttaaacagcaaagcctctgccagcgaagtttttcctgcgctgccgtgtccagctaatgcaatgttgcgaatgttttccgcagtatactgtgccataaatgtttacgctcctttcagaatggacatgccgcttcccaaacggcagaacgagaagggtattgtcaaaatggacaacctaacctttttccccgttcacaatatatacattatacataattcttctattctacgcaagcatctatttgtaaatgaaatacatttcatatagaaatattggaaaattttttatctaaatcgtcctgatttttcaaccatatctttcaaaattctactgccaatggaatatctgccatattgtatcccgctgttattctgaaaaaataaagagatcaaacatttttcgcaaaaaattttcctagggctatatattttctttatctcattaagattcctaataaccagtatttttaccgtaaaaatactggttacaaaaaaatggacggatcaaatccgtccattttttattcatgtttaatcgcttccaacgcactgattttaactgcccggttggccggagaaaaaccggagaccaaaccaatcagcgttgaaaaaaccaacgccaatccaaccagccaaataggaatcacggatatctggctggcaccttctgctccgccgtaatagtagcctcccatcatacctccaagtccaccgccgcccaccacatttagcaccagagatatgataaagctcaaaattacgccgattacaccgccgctgaatccaatcagccctgcttccatcaaaaagacggtccggatatcgccgactacgcagcccagtactttcataatgccgatttcacgggtccgctcataaatggacatgatcatcgtattggtaatccccatggccgctaccaacagcgaaatgccgcccaaacttcccaaaatcagcatcattttattggcctgttcctgcatgggtttacgcaccgtttccatgctgtatgtatcataaccaagatccttgattttggtttccacttcatccacgtactttatgtctgttactttgacataagcatgattgtaattgattttacgcggattaaacgctgcactggaagaggaagaaatcccgttgaaatcatcatattcctgatatagctcatacagctgattgatggacaaaaacgcgccataaacggtttcataccccttattccagtcaccgaccagcagtccggtcaccgtcgccttatgcttttccggctcctgtgtattttcttcgccgtcctgcttgcctacggaaatggtaaacgtatctttcgaaatatctaccggcggatcgtcgatactagggtcataccattccccgtttccattgggattataaaagctgaatggtccatattctccaaacaaaatggtatagtccttttcttttccggtggggaattttccctctttcaactcatatcccagtttctccagcgcttccggatacacgccgtaaacactctcctgataaacatagtctccgcactggatattcaccttgccccaatcggcctgaacaactggcgtaattacgtctacatgatcataagcggcaatctgcttaatgatgctatcgtccaggttggggatactccttgccccgccagcgccgccgctgtaattgtaaatctcaattttggtcaaatcgcccatttgggccagcatagcctcctggcttttctgaaggcccacgcccagcgaaatcatgaccacgatggcgcaggtgccaatgaccacccccatagttgtcagagcggttcgaactttccgccgagagaggttttgcaggcacattgcgatctgatcaaatatcttcatcgtcagcctcttctctcttcagcttggtttttaagaaaatccaggtaccggatacaccgcccactgccaggcagccaattccgaacatcgcccactgccaccagcgcatgccggtatcttcttctatcggttccaaacccggattcaagcccgggtccagacccggatcgatgatatcgccactgttgtcataaacatcacaggtaaaatccttggtgattgttgatacgtcgcctttttcattttcataagtaatggtgatgacagcggaaaccaccccgcccgcttccatggaggaaacggagaattttgccgtaccggaatctccggctttgatatttcctaagttctgcacctgattgggttcatcgatattgccctcaattttcgccgtcaggttatagatatccgcgcggcctttattgacatagttgagcactacattggtgctttcacccggccaaagcattgttgggacctcggtcagatctacttcaaaacgttccacctgcgcaatcgggatggaaatggtttcctccgatgatttactttggcgggtatcgttggccacatattcgtaactaaaggtaatatgtactgactcgctcccgggcacagcgctggtccggcacttgagcggaatggatttcgtcatcgcgccctttttgtccagggtagggatatagtaggtgttggatgcaccggtaatcgaaaggccagtggtcggttccactttcatgatgatattttccaaagtgatgttggaactggtattgtagaagtttacgttcagcgaaaaatcagaaccggccgccacgtccgaaccgccatagctgtaattttgcaccaggatatagggcgttgccggatccggaacagtgggatcgggggcgggggtactcggttcttgcggttccggggtatagcgggacaggtctgccgacaccacatattcgtaaaaattctcgttggaggaggaaggataattgtaatacatgcgaaacttggcttccgtcccttttttgtcgaaaccgacatacgggaacgacaccttaaagcggagatttttctctccgtccttccctaatatttctgcattcgtagtaatgctggtttcatcttttttttcgtcgctgactccgttcgggtaaaaattccctgtcagcaacgcagcataaaactcatcgaacgtatcttttcctttttggtagcttacatttgtatccaccaacgtcaaagtcaacgttcgtttggaatagctataactttcaattaaaataccgtcgctggtcacaatattaggttttccaccagtttcattgtcatccgtaccagaactacttgaagtggaacctccaactgtcgcgtatgccgcggacatcaaaaccccggtgagggtgccaagcaaaatcagtgccgctaaacctaaactaatgatccgtttcatcactctgctccttctgtgctcatattcaccgcgtccttttccgctggaatcggcgcggaaacttttgcttcctcgggctccgcctgctgccggttttcccgggcattgtcagcggcgatttgctccctagtccgggcaatggactcatttttttcatcccggacgatcttgccgtccacaatggttacaatgcgatccgcatagcgcgcaatgccgttatcgtgggtaaccaaaataaacgtctgattgttttcccgggacttattgaccatcagctccatcacttccgtggtggtcttggagtccaggttgccggtaggttcgtcggcgaaaacaattttcggcttggtcacaaacgcacgggcaatgccgacgcgctgctgctgaccgccagacatctgggttggcttatgcttcatgcggttacccaatcccacttcccgcagcatctctttggcgatacgggtccgcttgtctttgtccatcccgcggaacatcagcggcattgctacattttcgattccggaaaggccggtcatcaaattataagactgaaatacaaaaccgatattcttctggcgaaacagcgcccagcgccgctcgtcgaaccggcagacatctttccccgaatacaacacttggcctttcgtcggtctttccagccctgccatcatgttcagcagcgtagatttgccggaaccggaagtacccagaatacagcagatttcaccccgctgaatggtcaggttgatgtcatccagtgcaacaacccgctccttacccagcttatacacctttcgcaggcccctgatttcaataaagggcgtttttcccaaggttttccctcctgtgtccggcaaattccgctcttcgcggttttattcacaccatcataacgaaatatggcgtccggccttcacccattcgtcacattcggtcctactaattttagaccctgtttgacaacaatctgttacaggtttttcaaaagttttgcggaattcaccgaaagctttttcagcgcgccgctttatgctataataacctcacggcattaccggaaatgatagattcccggcgcctgagtaaaatgaaagcataaagcgtccgacatcggtggccgtctgccgcattttggttggcgtttcacgctttcatctcgctgttatgttggtaaatttacagctttgattcacaaaaaaccgataggatttttgtaggcaaaagcatggataataacgccacccatcggaacggaaccgtgccggtagatcacctgccgtctatttcggccaccgataccaataggaaggaatccaaacatccggcttttccatcctatgccggagaaaggtaaaaaatatgctgcaaaaaaatgatttgatttctttgaccatcacggatatcaccaacgaggcttccggtgttggccgccatgaaggcatcgccgtttttgtaccgggcacggcagtgggcgaccaactgaaagtacggattgtcaaggttttgaaaaactacgcatacggcattgtagaaagtattgtaaaggcatcttccgaccggattaaggatatttgtccggtctcccggcagtgcgggggatgctcattgcgtcatatttcctattctgctgaatgccggatcaagcaaaactgggtgacagaacatttccgccgtattggcggaatcgatctcacccctttgccaattcagccttcgcccgcccaaagtgcttatcgaaacaaggcgcagtatccgatcagacgcgggccggacggaaaaattaaaattggtttttttgcgccccgcagtcatcgcgtcatagaaaaccattgctgtgatttgcagccctccttttttggcagcattctcagtctgatacaaaattttttagaggaataccgcatttccatctatgatgaactgtcacaccaagggctggtacgccatctgtttctgcgttggggcgagcaaaccaacgaagtgatggtttgcctgattctcaacgggaaagaactccctcatgcggacatcttgattgaccggttgacaacagcattcccgcagattgcttccattcagctgaattgcaacacagccaaaaccaatgtgattctaggccccgtttgtcaggtattgtacggaaaacccactatttctgatgttttatgcggtatcaaggtggaactttcccccttgtccttttatcaggttaaccgtagcggtgctgaaaaattataccgcattgctgccgattttgcctctctttccgggaatgaactgctgctggatctttattgcggcaccggcaccatcggtctttccatggctcatctggtccgggaagttattggggtagaaattgtaaaagaagcggtggaaaatgccaaagaaaacgcgcatcgaaacaatattcaaaatgcccgttttttgtgtgcagatgctgctggcgcggcacagacgctggccgcggaaggattgcatcccgatgtcattgtgctggatcctccgcgaaagggatgcgatgcatctttgttggaaaccattgggcagatggcgccgggtcgaatcgtcatgatttcctgcaacagcgccacagcggcgcgggacgcagcgattctgtgtcaaaacggatatcaagcagccaaattgcaggccgtagatatgttcccccgtaccgcacatattgaatgtgtctgccttttctccagaacgaatttataatgatcaaccatgctgtccaaaggggacctctggggaatggccttttttctaaaagcagagaaatcttttgattcattatttaattaaaaggagccgttcatgcacacacagaaaaatgatcagataatgtttgcattttatcgctgggatgcaaaaatcaaaccctgtaaggagcaggatcttttcgatatttgccgacaatcgcagtcgcttatccggcagcttttgaatttggtttttgaaattcatctggtggatctcgaccgcacctaccaccggaactttcccggcgttgatctgggtgaaaagggcggattctgtgtgcaggttacttctcaggtcagtgcatccaaaatcactcatatgtcattgatattacacggcaagaagacgctcttttatccttaatgattgttctggcaatcgacgcagcaaagtgttcgaacggcaattagttttttgcctgagtgttccatagaaagagtagaactcagaaaggccccaggagtcaaatttctcctgaggcctgttagttcgtgatattaaaaggatcccgaaatctgaagcaaccgcatcagattatccatcgtctttgccagatcgttttctgcccgcatttttgcttgctcatacggcaccgccacacggttgatactgaaaaccgcactgacgccttcatgataaaccttctcaatatcatctcccacatctcccacgactgcaattagaggaatccccattttctttgcgcgccgcgccgtaccgatcacaacctttccgcgcagagactgggtgtcaagctttccttctccgctaaatatcagatcagcgccctgtgccaattcttcaaaatgaacggtgtccaacaccgcatcaattcccatttgaagctgtgcgccaaagaaagcagccagccctcctcccataccaccggcggcgccggaaccaggcaggtgggcgatttctctccccaaagactgttttaccacgcgagccaaatgggaaagattgctatccagccgctgcaccatctggggatctgcacctttttgaggaccaaatactgccgccgcgccatggataccgcacaaaggattatcaatatcgcacatggcgatcatctctatcttccgcaaagcgggaagtattccgcttacatctatctgtgaaatccggtgcagggttccacctaccggaataaacggtcgtttgttttcatcttgaaataaaacacccaacgctgcggcagcccctgctcctccgtcattggtagcagatccgcccaaccctactatcatcctggagcagccggattcgacggcatgggcaatcaactgtcccacgccataggtcgtagtctgatcgggccgttttcgttttccaaccagtggaagtcccgccgctgctgccatctcgatgaccgctgtgcggtccggcaaaatgccataaaaaccttttatcggttcaaaatatggcccccttataggcaatgttattttttctccgcccactgctgccaaaaaggcatctacgctgccctctccgccatccgcaaccggtacggacaagacctgtgcctgcggaaaaaatgatagaatctcttttttcataatgcagcagatttcttgagaagacattgttcctttaaaggaatccggaaccagtacaattttgttcatcagatactcctttcaattttggctaaagcagtataaatcaatgcgttcgttttcatgtcttgttttgttcagcatagcacattctgctctgaaaaaaagaattgcgtttctttctgtttcttcgaatcagcttgtgctataataacctcacggcgttgccggaaatcaaagattcccgacgcctgagagaattacgacaagtaagacctgtatatctctccaaagaggaattctattttaatcattgaaagggaccgatctatgctgaaaaaaattctttctatctttctcgttcttctttttttatcgggttgtagtttaccgtctctacaaacatccggcagtgatgttgaccgcacatcctctacagaaagtttttcctccacagaatggataacgacaaaagggacagtggaagatgcctctatgaacagcttgctgattcgcactgatcaggcagagtattttcgcttttccacggaaaacgcacaaatggagtttggtgaaaccggacttttgcttggccagcaggtggaagtaacctacttgctgtcacaggcagatccgattcccgctacaactgtccggctgctggcggaagaaatttctgccgagaacaaattgttaataaacattctccactccatgacattggaagaaaaagttgctcagatgttttttgtgcgctgtccggcggagtacgctgaccaaacagtattaaaatggcaaatcggcggttttatcctgtttggtcgggatttttccggaaaaacgccagatcagctgcggcaaaatattgccgattatcagcaaaatgcaaaaacccctctgttcattggcgcggatgaagaaggcggcgaggtaattcgcgccagccgccacagccaattccgtgctgtcccctttccctcccctcaggatctgtatgcacagggcgggctggattctgttttagaagatgccaaagataagtcttcctttctactggatcttggcattaatgtaaatcttgcaccggtttgcgatgtgtccgttaatcctgccgattatatttacaaacgcactttgggaaaagatgcccgcactactgcttcttacatagaggcagtagtacagcagatgcagaaaagtggtatcggaagcgtgcttaagcatttccccggctatgggccaaatggtgatactcatttgggatttgtgcgggatgaccgcccgatggagactttcctaaaagaggattttcttccctttcaggctggaattgacgcaggtgcccccagtattttagtcagtcacaacatcgtcagctgtatggacagctctttgccggcgtctctctcgcctgttgtccatcagctgctgcgggaaaatttaaagtttgatggcgtgattctgacagacgatctgtccatgaatgccatctgctctcagtacggtctggaggaatctgccgttctggcggttcaggcgggaaatgatatgataatcagcacagattttgaggcccagattcctgcggttctgcaagccgtgcaggacggaactgttccacagtcacagattgacaattccgtgctgcgtatccttcggtggaaacagcagttgggactattgacggcggaaggagaaaaaatctcttgacaaaaatcctcggtccagggtatcttggcaacaaagaaattcatctggtacttgctaatctcaccagagcagtcccagagaaaggctacctgcccgcatatttttttcagatccgccgatgccgggatgaaacacttttaggcagctgtacactgagagtaggagaaactgctgcgatagcatacagcggtcatattggatatgctattgccccagaacatcgggggaaccggtatgcggccaaagccttatcccttttactgccgcttgggtttcgctgtgggctgcggcagattgtcatcacctgccagccggacaacctggcttcgcgccgcacctgcctgcttgcaggcggagtttttgctggcattgtgtcggttccttgttggcatgaaatgtatcttaccggacgcaaggaggtctgccgctacctttttgtgtcggaggaatataaaaatacggcaaaagaaagatcggaggttttttgaatgctggtaagcgatgttttttcttatttggatgaattggctcctttttcctattctatggattttgataacagcggtctcctgataggagatccgtcgcaatcggtcaaaaaaattctggtagcactggactgcacaaaatccgtagtgagcaaagccagagagatgggagccgacttgattgttacccatcatccggttatctttgattcgctgaaaaacgtaatggtcggatccgtcccccatcagttgatctgcgctgggatttcgattatttgtgctcacaccaatttggatttggctcgcggcggcgtaaacgatcagcttgcccgacggctgaaactcaaatgtttggaaggactgtctcccatctcctgcaccgatcgtaatgggaatacggtaaccgaatatttgggaaggatatcttttctgcctgaaccgctcgaaccgaaacagttcgcctgttttgtaaaagaacgcttaggcggaaacgtccggtacgtcagcgggaaccgtccggtccaccgggtggctgtctgtggcggttccggggccgactgtctggccgacgcaatccatgttggcgcggatgcgttggtaacttcggagataaaacatcatatttttcttcttgcggcccaacaaggcattacgttggtggatgccggccattttcatacggaagatgttgtgatagagcctctttgtcaacagctaagagctgctttccccgaaacggaagtgttggcctatcacttagatgaaatccgcattttataaggcataaaaagtatttctgtgcgtccgttttttcttcttgcagcggtcattcatagccagctttggtttgaccacctattttttagaatccaggatattaacgctcgcatttgcaggtacggcaggattttcctcttttcacaaaaaaccgcagtcttattgactgcggttttttaatgactcgcaaattaagctttgttgattgaaccaaacaactccattttttcttttaccgtatctttaattgcctgtgtgccaggagccagaagctttctgggatcgaagcctttgccttccagatcttttccagcctcaatatatttgcgggttgcttcagcaaatgccaactgacattccgtgttgacattaattttggaaacacccaaggaaattgctttttgaatcatatctgccggaatcccagtaccaccatgcaaaaccagaggcatacccggagttttttcctggatttttgccagcacctcaaaattcaagcctttccagttatcaggatattttccgtgaatattaccgataccggcagccagcatcgtaacacccaaatcagcgatcatcttgcactcgtccggatctgcaacctcaccgccgccgacaacgccatcttcttcgccgccgatagcgcctacttccgcttctaccgaaattcctttttcattcgccagcgcaataatctctttggttttttcaatattctcttcgatcggataatgggaaccgtcaaacataacagaggaaaatcccgcttcaatgacagcttttgcaccctcataggtgccgtggtcaatgtgtagcgcaaccggaaccgtaatcttcatgtctttgagcaagccgtttaccataccgacaacagcatcccagccgcccatatattttcccgcgccttcggatacacccagaatgacaggagaattgttttcctgtgcagtttgtaggatcgctttggtccattctaagttattgatattaaactgaccgacggcatatttgccctctttcgccttggtaagcatttcttttgcggaaaccagcattttaactcctcctaaatttcgcagatttgcttcttttattatagtagattgtctaaaaaaaagcaaacctttttcataatttttacaataatagaataaaaacttttattgataaaatagaaccgactacagtcgcagccggttcgtcatcattttatgcagccggactcccggaaactgccgctgcgtcctgcgtagcaacactttgtgtgcctgccgcgccgctttgttgttcagcttcccaggtatccaaccctttaatggataagatatggtaaccatcttttacttttttcatctgataaatcatatacttatccggctccggttcatatttggagccgcccacagcggcttcccacaaggttcccggcgggatataccctactgtcagcgtatacaaatcgccttttttttcgatctttgttacctgaggggtatattggctggtctgccccataaccggaacgccataagtcttggtttccggatcgtaaggataggtaacatcgaaatcttctatggtttgatgctgcagttttatttccggcccgtaaagtttcgccgcatatacatccaaatccgaagcgggaactaccagcatagcgctctcatcataggtgtatttgtctgtattgctcaacaaagtaccccacaaagaggactgtaataaaaacaatgaatccgcatgttccggcgaatcaaattctaccgggtcaaacataaccactggaagcagataatcctcaaattccgatttttcttttgtgttatccataatttgattggtcagccgaatacaaaatccggctactgaaaccaagccaatcacggccaaaaccagaaatactccacccaaaggcaatgcatatttgctcctgcgtttatgtttattcaatgggctttgcctttccatagcgatacctcaactttctatcagtccccgtccggctgctctggcaaaatctccaaccgaatccgaccaatccgctgttcttctacttgcagaacggtcactttcagcctgccgcagacaaaactctccatcggttccggaatatgctccagtttctctaatacccagccgctgaccgaatgataatcactgtcgaaattcggaggggtatatccaatttcttcgaacagatcgtccagatccacctctcctgccgtttcaaaacaattgtcatttacgcgggtaatgccttccggaatttcatcactctcgtcataaatttccccgaccagttcctccagaatatcttccatggtcaccagaccataggttccgccgtaatcatcggttacgattgccatatgctggttttgtttttgcagcatattcagtactgccggaatcttcatagagcgatggacaaatacgcactggtgcatcaaacggcggacatccaatccctgtttgccatgctgcaccatttcatcgaacatatcacgcagatacaaaacgccaatgattttatccactgaatgctcatatacagggatacgggaataatgttctggcacaatcttttctaagatttcgtcgatactctcatccacatccacgcataccatatccacgcgcggaacagcaattttttccgcaggcgtttcatcaaactccagtgcagactgcaccaaagagctttcctcttttcccaaaacgccttcattttcaatggtttcgataatatactttaactcttcttccgtaacggaaggctgctttttttctcccttgaacaggttaataaatccatgctgcatttttaaaaacagaaacgaaaccggtgtcagtaccgtaataaaagccagcagcacaccacatacgcccaacgcaactttctcgctgtgttctttcgcaaaggtctttggcaatatttcgccaaaaatcaatacaacaatcgtaaccactacggtggaaacccaagtacctgcattccccatccaagaggtgaacagcaccgctgcgatggaggatattgcaatgttcaccaagttgttgccgatcaaaatgcttgaaagggtcttttcgtacatttccgcgattttcaaagccatagcggcttttttgtcacctgcatcagcatagtttttcaagcggatggtattcacggtagcaaacgcggtctctgatgcagaaaaaaacgccgaacccgccaaaagtgctaccaatcctaagtatacttgccatcctatgtcttccaaagttgtaccagctccataacaaaaaattttcataggagatcctatgaatcgttgtcattatagcaaaaaccattcctcaacacaaggtttctcccctacaattcacaatttcctaactttttgagatcttttcacctccttttttcactgattcatcacataaaaaaggccggccaaagccggtcttttcgtttttttgattattgtgcgtcggcagccttttttgcttccagcttggccagcgcatcttttcgagacaggttgattctgccctgctgatcaatttcagtgaccataaccacaatttcatcgccgacagaaaccacatcttcaaccttttccacccggtgattttccagtttggaaatgtgaaccaagccctcttttccaggagcgatctcaacaaacgcaccaaagctcatcaggcgggttaccctgcctttataaatggctccgatctccggatctttcgtaattaactctacaatatctgcagcgcgtttaatgtcatctttattgatggcagaaataaacacccgaccatcttcttcaatgtcgatttttacattacattccgcacagattttctggattactttacctccctgaccgatcacatcgcggattttctccacgtcaatcttcagcgtagtcatcttcggcgcaaaatcgctgagttcttcacgaggcgcagggattgctttgagaataatctcatccaggatataatcacgggctttatgggttttcgcaaatgcctctttgatgatttcgggagtcagtccatcaatcttcagatccatctggattgcagtaatacctttatgcgtaccgcccaccttaaagtccatatcgccgtagaaatcctctaggccctggatgtccaccatggtcatccaacgatccccttctgtaatcaggccgcaggaaataccggcaaccggcgctttaatcggaacgcctgcatccatcaaagccaaagtagagccgcagatagacgcctgagaggtagagccattagaagacaacacctcagaaaccagacgcattgcgtacgggaattcctcttcagagggtaaaaccggctccaaagccttctgggccagagcgccgtgaccaatctcgcgacggccggggccacggctgggacgggtctcgccaaccgagtaggacgggaaattgtagtgatgcatataccgacgggtttcttcattgtcaataccgtccagcagctgcgcttcccgcatggatcccagcgttgcgacagtcagtacctgagtctgtccgcgggtaaacataccggaaccatgtacccggggcagcacgccaacctccgcagccagcgggcgcatttcatccagttttctgccgtcgacccgcttgccctcatccagcagccagcggcggacaataaacttctgcaatttgtagatacactcgtcaatctgagccgcctgatccggatgggtctcttcaaatttctggtggatatcctccacaataggagccaaacgagcttcccgctccaccttatcatcggtatccagtgcatacttcacacgatcaatggcatattctttgattgcctcaaacaaatcatgatcaatttcctgagattcaaaggtgaatttttcttttccaatctctttttgcacatccgaaataaacgccaccatttttttgcattcttcatgtgctttcataattgcttcgagcatcgtgtcgtcatccacttcattggcgcccgcttcaatcataacaattttttcagcagaacctacaacggtaaccagcatatcggacactgcacgctgggcttcatccggacaaataatgatctcgccgtctaccaatccaacgttaacacctgctaccgggccattccacggaatatcagaaatggacagggcaaaagaagtgccgatcataccggcaacttccggctggcaatcagggtctaccgacataaccgtcattactaccgatacatcgttgcgcatatctttcgggaacagcggacggataggacggtccaccatacgggaagccaagatcgccttttcagaggggcggccttctctttttaagaaagaaccggggatttttcccacagcgtacaatttttcttcaaaatcaacagacaacgggaaaaaatcaatgccgtcacgcggcttctgcgaagccgtaacgttgcatagcacagtggtctcgccgtaacgtaccaaacaagaaccgttagacaagccgcacatttttcccacttcaaaagaaatcggttttccggccaaatctgttttgaatacacggtaattttcaaacatgttcatgcctccattttacgttggcaggcttcagatggatttagcaataaatccgttgctcgacatcgtaaaccgccgaacccccgattcactgctaaagacctttctttagcctccccaaatttttcagtatatgcacttgaagggcggacgaaaaccgtccgccctccggcataaaaactactttctcagacccagtttcgcgacaatcgcacgataacgctcgatatcggttttctgcaggtagttcagcagattccgtctgtggccgaccatttttaacaggccgcggcgggaatgatgatccttctgatgaattttcagatgctcggtcagatcgttaatccgtttggtcaaaacggcaatctgtacctccggggaaccggtatcgttttcatgggttttgtttgccgcaataattgcagctttttcttctttcaacagcattttctttccaccttttctattttgccagtatcttagcaaagggctgtgaaaaatcccgatccgggcgtttcccctaagccaaggtacagcatgattagcctatgtattataccatgggggaatcctcttgtaaagccttttttacgatttgatcagctttttgggcatctgccgcaatttgtgcccgcaatgcttccactgaatcaaatttctgttccggtcttagaaaagataaaaaagtgaccggaatttctttcccatataagtcgccggaaaagccaatcagatacgtttccgcccgcggtgccatccctttttcaacagtggggcgcacgccgatattggtcacacccgcataggttttgccatccacttgggccatcgtcgcatataccccaaaccgcggcagcaccatctggggcgggattggttgattaatagtcggaaactgcaatctgcggcccagtgccttgccatgctccacgggaaaatccaaaaagtaccgccgacccagcagttgccgggccctttccatttctccggcggcaattgcctgacgcacccgggtggagctgactgcttccccgccgtccatcacttcctccaaaaccgtgcaggataatccaaaggttttacagaatcgagacaatgattccgcatcacaggacgccccttttccaaagcggaaatcctggccgcagcagactgccgccgcattcattttttctttcaggatctgacgaacaaacgcttctccagacagattccgaaaatcggaaaaatcaggcgcataaatctgccggatccccatttttttcaaaatgcggattttctgctccagcgttgtaatttcaccagccccctgctttttggaaggaccgccttcatgcatggtaaaagtgaagaccgccgggataagatgtccgtttgccaacgataccgctttttcgattacgcggcgatgtccttgatgcacaccgtcaaaaaaacccagcgctactgccgtttgctgtttttccattttcatctctccccttaggtgtgttttctctcaccccactgaaaagttaacaccatactaacgtagccccagcttttttgcaacctactgggaagcaatattatccctatgaagtgctgtaaagcggcattctgccctcttttcgcaccgctcttgcccaagccataacagcaaggccggcatagcctcggccccgatacacaaaaagcgtctctaaaccagcttctgccgcctcattgctgattcggacactgcggcaaatagttaccgcttgtccattttgaatcactgccgcacagggaagtacataagaaatttcctgtgcaagccaagaaaatgcatccggaagaaacgattgaatattttcctggtttaaaaacaccacgtcgtccggcattgggagttcaggtatccaataacaaggcccataatccgcctctttcgcgtcgggaaggcgcaagtactcttctcgacatggggtgaatctgcctgcggcgccttttcctgaacagcccattttgtcagctccccgataaggctctctgtcagatcgctgcggaaccggtagaaaatatcgccatccagcgaacgagtcaaaaacatccgcaccacttttggaggattgggccacggttcgttgaccagcaaaagcctcccggataaattgaaagtatacatcgcccgggtatgccatttcatcagctgcccagcagtcagatttgtgccgggcagccactgtatttgttctttttgcaacctcttctcctctgcattgaccgatcttagcgcacaaacaattttcgaatgcgaagttcgctttgttcttcatatcccagccccaggaaccgcctgtccgggccaaaaacacagaagtttccctccatgccaacgcagcctgcttttaaagatgccagccgaactccgttttggaacaatcgggcattctttgccgtcagctggatctgttcataaactgcaaaagcagtttccaccggcagtaccttctgc

SEQ ID NO: 3323 - DNA, 16790 bp, Unknown
  16S sequences of unknown bacteria
tgagcttgatcgcaccgatggccgggatgatgtggtgttcaatgatcccctcatatcaaaggcttatactcttacctgtgaggttacatatttgagagctgggttacatcattataagagcttcggttacaaaatcttgagtgaggttacatccgttggagcatcaacgtttattgtattattaaatggtaatttgagaacaaattgccctattaatagagactgcatggccgctctgcgccgtttattccagctgtccgggtagtctccgtttttccttgggtgaaaaacaagcatcaaaagcctccgcatccgcgtcgtccacgaagtagccctccggatctttgtaagtgccggtgacgccatccagatagccttgttttaattcacaaagcaggaagtaaggtacctgtgcgtcccgtggttcggtaaaatagtggatgcctttcgtacttgctactataaaaccgaactttccataaaagttaatattgccggaaatgaggattgcccctacccccatcttcctggcttcctccatggaatgatgcaataaggcagtgccatatccctggcgctggtacgccggcgcgatgctgataggaccgaatgtcatggcgggaatcactcggccgtcgtcagcacagatttcggatcgcatatacatcacatgccctattatctttccatccttctccatcacgaagtccaactccgggacaaaggcggggtcctgtcggagcatatgcaagatatagtgctctgtacaaccgggccggtatacattccagaaggcttcgcgagtcaggttttcccctcacggtgatcgtcggacttctcaagacggatgacatcgttatttttcatagtatttcctcactttgcaacacaacttccttttgtattaatataccacatagatttgatcgctgtcatgctttttgtagttggcaaaagtctttccgcaaaacggtttgtatggtaatactgacagaaacaggggtgaatattatgacagcagacgagtttttattttttaatatcatgccaaatgcactgccactgtatgaaattctgcggagtaaattgctgaccgagtgcccaaacacctccctaaaggtgcaaaaaccccaaatcaccttcaaggcaaagtacggctatgcttttgtttctctaaaaaggatgaaaggttgcccggaagtattcataattgtgtctttcggcttgtttcaccgactgaattcgccccgcattgccatagccgtagaaccctatcccaatcgctggacccatcacatgattgtgttcgaggcagaacaattggacgatgagctgataggatggctgcgggaagcctatgattttgcgcaaaccaaggaaaggagccaatatgcggtaaatgtgcttcagaagttggccggcgaaaaaaaagattgggttaaaactttgaaaaaacggggggatctggatgatccgagaaatttgtaaagatagaacttttcttgcccgaaaatccgagccggcaacagcggaagacctctgcgtggctcaggacttactggaaacgctgaaagctcacaaggagggatgcgtgggcatggcagctaacatgatcggtatgaacaaacgcatcatcgtctttgacgctgagggtgcctacatgactatgtttcatcctgagatcatcaaacgatccggtccctacgaggcggaggagggctgcctgtctctcaccggtacccgcaagacaaagcgctttcattccatcaaagtccgatatcaaaacgaaaagttccaaacatgattcaaaacttttaccggctggactgcccaaattatccagcacgaaatcgaccattgcgagggcattatcatctaaggatgatttatccatgattgtttatttcaccggcactggcaacagccgttactgtgcgcagatgctggcagctgccatgcattttttgtggatttcattcgcagcggcagctttttgggcagcaaagacgcttatgtcgctaacggtatttactctttctatctgccctgcgtcgaatcacccgcaaaatcgagcagattatccgagaagaaatggaacgaatcgacggacaggaagtgcaatttccagtggttctgcccgcctcactttggcaggaatccggccggtatgaaagcgtgggcagcgaactgatgcgtttttcggatcgcaacaacaccccgctggttttggggatggcacatgaagaagccgccgtccatctggtacgggaatatggataaagctatggtaaatacccttttatggtctatcaaatccagaccaaattccgggacgaagcccgtcctcgggcggggctcatccgggtgcgggagtttaccatgaaagacgcttattcttttcacaccagccaagcggatctggaatcctattacgtccggtgctttcaggcctatgaacggatcttctcacgggtcggagtgccagaagtggtttcggtctcctccgattccggcatgatgggcggtaatctatcccacgaatttatgctgctgaccccggtaggagaagattctattgccatttgtgaaagctgcgcctaccgctccaatctggaggcggcagaatctattgtaaaaaaccaccgggatgaaatttctcgtccactggagctggttcatactcccaatatccacaccatcgaggacatctgcgaatttttgggcacgtccaaagaaaagagctgcaaagcagttgtctatcagaaaaatacggacacccgttatgtcgtgctgttcatccgcggagatctggacgtaaacgaaaccaaactgaccaactttttgggctgcgaaattcatcccgcggttattgatgaggattgcggcctccacgccggatatatcggtccatacggcctgcaggaagatttgacggtactgtttgatcggtcactgcaaggcgccaacaacttatgtattttcaaaaactgcctctgattcaaaggacaattcctgtgcagaaccgaacagcctggtataagccggttcgctagacattaccagctgataatccgcccgtctgccgaatccatatccaccgccaatgcgtagcaggcgctgttttccgcgttcagttcttcaaacggcatctgtttacgtagatagtccaccgtcagttctatgcctaaaacgccatgaggctctcctcctggcgttaaaagcggctgggaataggtgatgattttaatatcattctcgtcaatcgcaaacggaagagaccaatatcctaggtcggaagagtcaacactgggatattttagggcagccaaaaaaggttcataataagtcttgtcactgttgtccagacagaattgcggcgtccaaaaaatatccagcgggattcccaacgccttgctgatacgggaaatgccccgttccatcataatatccgaataatcagatggggttgacactgggtctgtatcccgaaaatgtacaccggagtaagcggcagcctgcccactttgaggtgcagaaaaaccggtttctccgttgaacacaacaaaggcgccggtaacagagttgcggcgcattaaatgcaaaaggtccagtgaaatcaattccagcaattcagaagtccattcctcttccgccgttaatgcggagtacgcagcctgattttgctccagcatattgctcacttttgattaatcaacgtctccgcagctgccagatcgctccaccgctggaccatttcattttccaggtaatttttacggtttgttacccgctcgttcaaaatttcaaaactgttttgttctaagcggtcaatggttccgccccacagaatggaaccaccgaacaggaccgattgcaaaatcatcacaaaggacaaaggaatccacattcttcgcataatggaatgctttctacctttcgctttcatctgctatccctccctgttcctcgctttatctgccggatgacatgtgctttctgtcattccaatgccgcctgtaaagattcctccagctgctgataccactgttcaaaattttcatctgtatcaaaagcggcaaccgcattctcataggattctccctgttccagcagcgttagaacctgcgctcggtcttctctcgctttatcgctcatcgcagtttccaacacggcgcgggcgtcaacccctccggcgaaagctttgctggtatacagctcgcagtccgcaagctgattcatcgttaccgtaaacatttttttagcaattctttggccgaaccgttctccaccgattctaaggctggcaggatcttgtccaactggttcgcctcattttttaccggcagatacccggaagatacagaaaagccaatgtttcgctgcgcttcggtaacccactttaaaaaggcggtcgctgcatattctgtgctttcgtccgattttgtcactaccatgccggctccctgctgcacaatggcaccttctcctccggcaaaagtggggactgagagcatggtacattcaattgcataactcgcaccgtcttccatattcacctaatccggaaaataggttgttcccgcagtagagccgaccagcgcaataatatccccagttttggcatcatccgaacggaaacgcccgaacgatccaaaatatccttttacagtgggcacataatagcaatcccacagtttacgcatgattttccgatccagctggagcgtcatttctccatcgcgcacagaaaagatttccaaccccagttgtttgcagccgataatgatataattggccattgcatccctgcccccaaaaggcctttccatcattgggcatttcggtcaggctgtcggtccattcataatattgccgtccaacttctactaccccttccatcgtttccaaatcagacagctgtacgccggtcgcctgtgcgaacggtttccaatccgtgctgttgagaatcatgacctccgtcgacttggcggtaggaaatatcttcagcgcaccgtttttgtcaaagcggccctcctccagatattctgagcggtactcattcagctcctcctcggtcaaataccggtctaactccgctaccagccccagctgatctaccacatgagccgtatcggcataagcggcaaaaatatcaggaatatcctccgccccacctttttattcgcagcgtccacaactttttctgtcagatccgatatattgccctgactgaatgcttccacgatgattcctttttccagaccaatggtttcattgaactcctgcaccatatggtcgaatgctgttttttgaacgccgttgtaataatgccaaatttccaaattcactggttttggggtccagctgtggcagaaaaatcgccgtattttgtaaagctgattgctccggttcaatccgggagccggatcctgcgctacaggcagtcagtaacagcgatgccgccagaaaaacgaaaaaatctttatgcctctctttttcataaaccccctcccattctcctcgtttccctattatcgtacacgatccttctctttaccaacaaaaacgtccggatttctcccgagagggcttgtcctttttattcccgcccgctccagcagtaggtgcacagcttgcagggttcaattcccaccgaatcgatcatgtcatccagcctatgataacgcagggaagtgaatttcagttcttttccgatctcgtccaccatttctttgtagttggtgctgtccggattcgcataatccagcaaagtgtcataatcagtaattccttcccggtgctgaatcacgcgccggccgatcagttccagttccgaattggaacgcgaaaaattcaggtacttacagccaaacaaaagcggcgggcaagccggtcggatatggacctctttggcgccgttctgatacaaaagttccgcgctttcccgcagctgggttccccgcacaatggaatcatcgatcagcaccatgctcttgttctgaatcaatgcgttaaccggtatcagcttcatccgggcaatcaggttccgctgggtctgattgggcggcataaaggagcgaggccaggtcggcgtatatttgatgaacggacgagcaaatggaatcccggaccggttggcatatccaaccgcatgggcaataccggagtccggcacgcctgccaccatatcagtgcgcacctcatctcgtcctgccagcttttctccgcagcggtagcgcatctgctctacgttgactccctcataagtagaggttgggtatccataataaacccacataaaggtacagaatttcatctgctgttgcgccgggcttaccgtttcggccccttccggcgtaatcagggcgatttctgccgaccccagttctttataatcctcatagcccagattaataaacgcggaactttcaaaagaagcacaaactgcgcctttctttctccccagcaccagcggcgtccggcccattttatcccgggcagcgtaaatcccctgcggcgtcataatcaacatcgtcatagatccgtcgatcaaactctgggcatagcgaatcccctccactatgctttgctgctgattaattagagccgccaccagttcagtgggattaatgctgcccccactcatttccaaaaagtgaatgtttcccttttcaaaggccaaattcaccagttcggcgctgttattgatcttaccgacagtcgtgatggcaaatgtccccaaatgggatcggaccatcagcggctggggctcgttatccgaaatacagccaattcccaaattaccgtgcatttccacggattccttttcaaacttggtgcggaacggagaattttcgatattatggatcgcccggtcaaaacctttctctccatacaccgccataccgcccctgcgggttcccaaatgcgaatgatagtccgtaccgaaaaataaatcaaacacacagtcggtgcgtgacgctactccaaacagtccacccatattcgtatctccttctcgcttaatatggttattataagagtatctgcctgatatttcaagaaaggattttttggtgcctctttcctgctataaaaacttgcttacaaatgagttttatccgtcttttaggaatttttgcaaaatgattcgataaaaaacagagtttttttacaaaagctcttgacatcctcattcttctttgttagaataaatcacgttgctggatttgctggtgtagctcagttggtagagcagctgatttgtaatcagcaggtcgggggttcgagtccgtccaccagctccacaagttcatatggaggagttcccgagtggccaaagggggcagactgtaaatctgttgcgtttcgcttcgatggttcgaatccatcttctcccaccaatgctaaaagaagtctatctctttacagaaatagacttcttttgttctttctgataaaatgcacacgaaactgtgtgtattgtttggttatattaccattgcgttataataagcaatcttattgaagggaattagcaatgggtactttatttcaaggagttcaatgggttgcaccaactgacttggggataagtcaattgtacctaaataaatccaaactggaaaatataaaaaaatggttcgatccaaaccgtatggatctgtgtcagcctcttcccgtccatgattttggcgatagccggctaacattgacagacggccacagccgggcttttacagcttaccagcacaaagccaaagtgcccattgtttatgatacggatgacatcgtaacatgtgacgaaggacagatgctttataaaaatgacatcgtttggtgccggcgtttcaatcttcggacaattgtggactttggaaatcgtattgtcgacgattctgaatatcaatctctttggattgaccgctgcgaacaagcttacaatttactgacccagaccaatgattatgagagagtggatatacagcggcagtatccggatttgtttttatatggtgcaaataccgatttaacaatctgtttttttgaaaatctgaatgggaaaatagttgaggttcctctatagtgattgatttttggggctgatattgccagtaattttagtcaccaaaaacaaaaatccgacacgctttgaaatgcctgatttttatttattttttactgcgtgtcaaaaaattccggtcgattaaaattgggaggatcttccggttcccgtaaggggtaacattgcaactaacaatccaatctacaaacgattcaaaaccggaaatcctgccatacacggctgtttgataaagaaaaaatgaagaaagaagaaaacttcttaaccttacttaaaatgaccagagccaaattttccaaaggtcttctgttcctcaaaaatctgattgccgggcgcttgtgaaaaaacttttgtcaaaggcgctgcaaaacgtgttcacgcccctggtttttccgttttatccatacagcaccctcaacaggatgcgctgtcagattgttttttcgtttttccatccttttgttgcttcgaaacggagttgactttcatgccgaaaattctcaaaaactgtatcctcttttttcgcagagaaaccgttctgtgtattgcggccctgctggcgctgctctctgtttttttcgttccacccagtgccgtttatatttcatatatcgactgggacacccttgcccttttgttcagtctgatggcggtgatgaaagggtttcaaaaggcaggactgtttgttttcctgggaaatcaactgttaaaaagaactgggaccacacgaaaaatgctgcttgttctggtctttttaccctttgtcttcagcatggtcatcacaaacgacgtttcgctgatcacttttgtgccatttggtatcatcgttttgcggatggcaaagcaggagcatcttctaacgccgctggtggttatgcagaccgttgccgccaatttgggcagcatgctgactcctatgggcaacccacagaacctctatttatacgccaagtccgggatgggatttggtgaattatgctggctcatgaccccctatgtcctgatttccggcctttgtctggtgctgttagtttttttccaaaaatctgttttgctgcctgtggtatccgttaacgtaaagctgggaagttcttgggaactgctgtgctgcacattgggatttataatctgtctgttaggcctttttcaatgggtctctccattggcggtggcggcaaccatctttctttttttactgtttgccaaccggtgcctgctggccggaattgactattcgcttctggcaactttctttttcttttttatttttattggaaatatcggaaatgtaacctctttcaagaactttctttcttccgttcttgccggtcatgtgttgccggcggcagtgctggcaagccaggttatcagcaatgtacctgcggcactgctgctgtccggattcactactcaatgggatgctttgatcgtcggatgtaatctgggcggactcggcaccttaatcgcctccatggcaagcttgatctcttataaaattgtggccaaagaatatcccgaccagcgcagaatatattttatctggtttaccgtgtgcaatatctgcctgttggcgctattgcttctggcaagttttctgctggcatagttgcacatctccatctccggtaaaatctcccccaaaaaccttgtttgttactttttgtatcggggttaagcgctatctctgcccgttttaccctgctgctctttttacaaattgaatacaaaataaaagccaaccgaaccggttggcttttattttgtattcaattttcttttctctgaagtcagtccggcgatatagtccaacgaaacattataaaactttgccagcgtgatcaaatgccgcaggggaatctcattctgtcctttttcataccgggaataaacttgttgcgttgtctttaataatcttgcgatctgcgcctgccgcaggtcatgattctcccgtaggtccctgatgatttcataatacggtttcatatgaatcccccaaaccgggctgcacatttctttgaaatcattctagcttacactagatatgacgcattaacattacaccaaatatggtgtatcctgtttttaagtattaaatcatttgcaattttttacaaaaatttttaagatggtctctacatcctgtaactgccgtggagtcagtccctgcagaatatctccaatgctgttctccagtgccttggaaggatctggaagaaggatatagttggggctgacctctaaaatgttgcataaagaaagcagtgtttgcacggaaagccccgcattgccgcactcgatttgactgaggaatttttctccgatgtttgcctgtgccgacacgtagtcctgcgtatatcgctttgcttttcgtgcctccttgattcgttgtccgatcagatgggtatcatactccataaattatccccctacttatagagtagtgatttcatctgggaaaaaaactatataaaaattggaaagtatttcttatagattgatttttttgttggatgaccttataataaggaaaaacaggtaagatttcagatgacgaagtgagggcctatggacatttacaattattttgccgaacaattaaactgttatgaatcggatcttcgcaccaataaaaggctttgctgggatgaatctattatccgcagtattccggaagatcaattttccctggaaaactggaacgcttttttatcctatgttttttccgagcagctggctttttccagtgtcgatcaggcaaaatcctttttaatcgaaaataaggttcaacaacctgtataagcgtaattcatttgcgtttcgtgccaccgccatgaggcggcttttttgttgtgtaaaagcattattttaaagcgcctttgccattggatatagatctcagtgcataagccgggacggttcatatacctaaaacttcatgcgccatccactttgatgtgcttcagccgcatgaacttttttctccattttctgcgtttttctttctttttttgcaaaaagcagatatactaatcttgttgaattttaagaatttaaacattttaaatgcaaaaacgaaaatttttcctgcccatagtttgagaatttctgtgcatactaatggcgaaatcaaatttccgatttcacaataacattcatggaggtcctatcatgaaagtgaagaaaacacttgctgtggcttgtgccatggctatgcttctggctttgagcggctgcacctccgggggaagctcttcttccagccgttccagcacttcttcttccgcttcttccaaaaccagttcctcttcttctgccgcatcctcttcgatgagcgaaggcagcagtgtcctcagcgatctggaaagccgcatagaaagcggtctggaaagcatggaagaatccgtatccccaactatgagcaccgatttcgccgaaatcggtgctttaaacggagaagcgctgggctggggccccggcggaccggtagacagtgaaaaccgctctcagggggccgtcgcttatcaggaaaagtatggaaaatatgatgcttattttattgcgccatcttccgaaaagatctatcttacttttgacgaaggatatgaaaacggctacacagctgatattttagacaccctaaaagataaaggcgtacacgcagtattttttgttaccctgccctacgtgaaagaacaaccggaattggtacagcggatgatcgatgaaggacatattgtcggcaatcacagcaacaagcacatcacatacccttccctttctctggaagaggcaaaggaggatttgatgagcctgcatcaatacatgttggatacttaccaatacaaaatgactgttttccgtttccccgaggggaatttctcggagcagacccttgcactggtgcaaagctgcggctataagtctctcttttggagctttgcatataaagactggtataccgacaaccagcctaacccagcggatgcgctgtcttccatgttaaacaaagcacaccccggagcaatttatctgctccatgccgtctccgccaccaatgcgcaggtcttgggtgatttcatcgacggcatgcaggaaaaaggatatgttttttccgattttgaatgattcggatttttgttttgatttgtgcatagagatgtaacaaaccctgcgtatgcagggtttgttacataggtgttgaaaatattgacgaaggagcattacatatgaactggattaactggacttggattggcggcggcctgctgggcagcctaatcgtcggactgattatcggacgaatcgtcgcgggaatcaaataccccaatccggataagccgcatattttcaccccgaaacagtctgttatcattctggtaggcgttgtggtggctgtggctttgatcgtatttgccgtgctgtaccagccaaagcccaaaaacggaggagaagaccttatgccttccggtatgccttccggtatggatggaatgatggaacccaacggcgcgctgccgatggatgacaccggattggaagaaggaactgctgaaccggcagatacgcagctggacgaagaggatttaacggaaggcagcactgcggaagatggcagcgaatctgaaatagaaggggatgggatcaacgccaatcccgaaacctgatttttcttaaaaagcagcttttgctgctttttttctgcaaaattacccttgacagtagttggtttgatggtatactgtttattattggtattttttatcgccaccgttttttgcgtgtgtgaaagaaaggaaaggtattgtgaaaaaacagatttccgtattgcttgccatgagtttattgctgattgctttgttgagcggttgcagcaagacccctgctgaaatttctgcgccggaatgggaaaccgtatcgggcacggccagtggtttttcctatgaagttcctgccaactggaccacaaccgaggatgtaaccggccagggcagcattatttatatccctgccgatgcagatgtttccaccggcacctccaatgtaaacattctggtacaggatgcttccggtcaaaaagccgccagcatgaaagatatgaaagctgctttggagtccgatttggaaaatcagttgatctctaacggctttgaaaaagtggaaaacctgaaagtagaagaattggaggcgcccatcggcagtgtgtgctctgtttcttatgacacttatcttagcggtatgaaatttacacaaacccagttttatccgctgatcgacgattatatcattgttatcactgccatcaatgtcggggacgaggtagctccttctgtggaagaggttgcggaatatatggctctgaccttgaaaaaagcggaataatattccttgttgacttaaataaccaaaaacgatatacgccccgttggggcgtatatcgtttttctttttatcatggtacctgtcctcttcccttttgacctcacccctacaaagaacctttaaacaaaattcctgtttatgatagcctcctctccctacctggcaaaggcagactcggtttatatcatccggccagaaaatctgcttttggtatcagctgttcaaccagaaagaagtatccctatttttcttttctcgattcaaatcattttacgattttcagagaaaaactgggatactgctaaaacaaattacaatgtcttcccatctgcttctcatgcacaataaaaaaacgaggcgaattgcctcgtttttttatcgctttagaatgtaaaatactcgtcgaggatcttttgcgcttcctcataattgtcacaaattaccaagattgcgtaatcaccagaagtcagaaccaaagcatttttggtgttttcatcattgttgttaaccgcataaaattcaaactcggaaatgcggttctgctttctttcttccagtgcagctttgacatcctctacttttccctttttggcttttactaccaggatatcaaaggcctgcacattaatcatcgacatttcgcccacataagaatctacattttccggatccaccatataaagatcctttaacgtggcgtcgtcaatcggcgttaagcttaaatcgctgtatagatccttcattgccgtcatgaaatcatccattgttttaccgtctttcatccctgttccggcagtggcggattcctcttgggaagattctacaacagaactcgcggcggactcttcgtgagaagacagggaagaacctgcctgagaagaagaagcggaattaccacagcctgccaaggccgttgtcatcagggctgcaagaacaaatgcaaatactcttttcatttttatctcctttattttttagagtctgccttataagtaaccgtttttcggcagattcatgcacggagacgaatttttaacaaattattcatatttttcctgcaatccttcttccgactgtttcgaaaccaccgcttttttcttccagcggccagtaaaataatagataattgccatggtcataccaatcagccagccgccgccatagctgaaaaagatgtattcttttccaaaccagtacgaaaacaaataagccatcggcaaacggataatccacaaagacaaaaggctggtgatcatagggaataccatatccccagctccgcgcagcaccgacagaacggtattcattatcgcaaacagcagataacaatacataaccgggcgcagatagtccattccagcttccacaacagcggcctcctggctgaacagatgcatcatattcggcccgcaggtcagcaccagtaccatagcgccaataccgcataaaacgctcatcagcatggtcgcgcgcaatccttccttgacccggtgcatctttcccgcaccgatattttgaccgacgaaggtcgtcaatgccataccaaagctttgcgccgggaaaaaggcaaacatatcgattttgttggcaccattaaaaccagccataaaatcggacccatacccgttgaccaggctttgcagcgccagtgtgccgaccgaaaaaagcatctgctgcaatccggcaggaagaccgagtttgatgattttctgaaacagccctttatcaaagaaaaatttcaacaaactcacatgaatgtactcatatttgcggttaatcaaaaaaatgcctacaatccaggaaattgcctgggccaggatggttgcgaccgcaacgcctgcaacgccccaatgaaacactatgacaaataaaagatccaatacaacatttagtccgcaggcaatggccagcagaaacagcggcgttttgctgtcccccagcgactgcataatagcactgttcagattgtagcccaaagaaaagatggttccggcaaaaatgataatcatatatagccgggcatcaaaaaaggtattgtccggtgtgttaatcagccgcagcaatggtccggacaaaagaatcccgatcaccgatatcggcagcgccccaacgattccggtggtataaatggtatccaccgtgtcagaaacttttttcagatccccagcgccgaagtactgcgaaatgataacagtcgcgccattgccaatccccataaacagcgccaccatcatatagatgattggaaaacctgttccaaccgccgccagtgcagttgtccccacatagttgccgactacgatgctgtccaccatgttatacatttgttgcaggacatttcccaacagcaaagggatagaaaaagccaaaatcagccgcatcgggctgcctgctgtcatattccctcgaatcccctttgattcgctcatacgacccctccttttataacgttataggatgtttattgtattatacgctttttctccttcaaatgcaagacagcctttgcatattcttttttcatcccgcccaaactaggggcaaaccgaaaggagagatcgatatgaaattggaaggaagcaaaacagaagcaaatctgatcgccgcattagccggagaaagtcaggcctcggtaaaatatcagctgtacgccgaaaaggcacggcaggatggatacgaagagatggcgcagatttttgaaaccactgcccgaaatgaaaaagcgcatgcacagcaatggtatgaatacctgcacggcggccaaatggccgataccaaggaaaatctgaagcttgccgcatccggcgagcattacgaatggagtgacatgtatccttcctttgccaaaaccgctaaggaagaagggtttacggaaatcgcaaaaaaaatggaactgatcgcctctatcgaaaaggatcatgaggaacgttaccgcatgctggaacaaaatattcaggatggcaccgtattccggaaaaatgacaaggtttcctggatctgtcgcaactgcggctatatctatgaaggcgagaccgcaccgatggtctgtccggtctgcaagcacaaacagtccttttttgaagtgaaaaaaccgggttgctaaccccacatccaaaatgataaaaggggagcggcagattaactgccgctcccctttttattttttcctggccgcaattatcagcatcatcggccgccgcatctcgtccttcatgcccggctgatcccacatttcttccggtggctgcggttctatcacccgcttaattgaaaaaccgttttgcaaaagctcatccaaataagtcgtcagtgttttatggtatttgac

SEQ ID NO: 3324 - DNA, 6171 bp, Unknown
  16S sequences of unknown bacteria
gccgtctgcattgccgctccggctggctgcgtgatctggctcctggcccactgcaccctgtccggcggcgaaacgctgctgcaggcagcagcggcatttctggagacgccgggccatcttttgggcctcagcggtcccattttgctggcgtttttcctatcgctcccagccaatgagctgatgctgccgctgtgccttttgatcctctgcggtggcggtctggacacgacgctgcccgagacagccatggccgccgccctcgctggctgcggctggacctggaagacggccctgtgctgcatggtctttttcctgtttcactggccctgcgggaccagcatcgccacgatttggcgggaaacacggcgctggcagaccgtcctggcggcgatctgcctgccgacagcgctgggcgcagccctctgctttacgctgcaatggctcttgcgtctgctgtgacggcccggcaatgcgacttacacaaaaccggcagggattttttgtcaggaatcacgattcgccgttttcctcttgattttccgccgccggacgattacaatatagaaaacgaacgcacagacgggaggcacaccatgagcgactttggcgataatttcatcaccatcaccgatgaggacggcgtcgactacgagctggagatcctggcaacagtagaaaacggcggcaacctgtactacgccctagccccggctggcgatgacgaagcggaagaggagctggagatcagcatcctcaaggtcgttgaagaagacggcgaagagctctttgccgctgtaacagacgaggatgagctggagcgggtctatgcccagttcatcgaagagtgctacgaggaagacgacgaggacgaagacgacgaataattctgtatcgttccctgcttggtgcgtgacggtcccatttagacccacatctttttcaagggacgctgtacttctgccgtggattgcaggcctcccgctgccgccttgtgcggccagtggaagttggaagcagcgaagcagcagagaggcgacccacctgccatcacgtgcaggttataattggggctgcacggccaaagcggggatacagacggcgccgggcaaccggcgccgcatttttcaattttacggcctcccaatccagcaaagagagacaccaccgcatgacaaaacaagagacctgcacctacctgcgcaaccacggcatcgcctttgaggtaacagagcacagtgctgtatataacatggccgagtgcgccgcgctggcactgctctacccggaggatgacgcgaaaaatctctttgctcgggacgataaaaagcgacaatactttcttatccccgtccggggcgaccggcgggtggacctcaagcagtttcgctgcgcccacgggaccagccctggccttcgcctccgccgaagagctgcaagcgtgtgcctgacgccgggctctgtcacgcccctgggcctactgcaggaaccggcgcatcaggtgcagtctttcctcgatgcagattttctgacgccgctgggccggatcggcatccactccaacgacaatacggcggcggcctggctccaggccgaagcgctgctgggcctgcttcgggacttcggcacgccggtggtggtcgccaacttctctgctcccgcggcggagtgagcgcaaaacagcaaaagcaggacggaaacgcggtttatctcgcggcttcgtcctgctttctcgcttttcgcagctccaagatgcctacggcgagtaaaaacccgccgaacaagcggcggaggagcgccgcatgcaagctttgggccagccaagccgacccggcggcactaaggcagccgcaggcgatggccggaagcgccgcctgccaagcgacgagcttatttttgatatgaaacagcaaacttgtgcctgcagtcggcagaaaatacagcagattgatgccctgggcttgccgctggggcagatcctgcagcgctgtcagccagatcatcagcaagctgcccccgccgataccgagccccgataggacgccgcacactgccccaaccagggtgcaaagccacgggccattcatggcgccaccagcagccgaatgccgccccagaggataaacaggcccatggccgcgtgaagccagcgtaccggcactcgccgcagcagtagcccgccgccgacaccgcccagaaagcctccggccagatacgtccaggccagggaaaacggcagctggccgctgtgccaatagatggccaaagaaaccagtgtcagcggcagcatcacagccaacgccgttgtaaagcaggtcttgcccggcaggcggcaccagcccgccagcagcggcaccaggagcatcccgccgcctgcgccgaaaaatccgttggccaggcccgccgcggccccggcggctgcagcacgccagtcccattttttcacgcagcgcccctcccctgtccgttttgcaggcaatgccaaatttctgcatgtacccgccgttattttcagtgtgccccgcctgcgagcagagtatgtatgccagcgatgcaacacgaggactctcagcctgaaacgcagcaaaagcccccttcgcagcagcgaagggggcttgcattggtttttgtgcaagacatcaaccaaagactgccagcaggaagccagcggcaatggccgagccgataacgccagcgacgttggggcccatggcgtgcatcaggaggaagttgccgggattgtacttctgaccttccacctgggagacacgggctgccatcgggacagcggagacaccagccgagccgataagcgggttgattttcttgccagacagggcgcacattacatcgccgcccagcagaccaccagcggtagagatggcaaacgccaccaggccgagggcaatgattttaatggtctgcagagacaggaagcgttctgcgaccgtcgttgcgccgactgccgttgccaggaagatggtgacaatgttcatcagtgcattctgcaccgtgtcggacagacgttccgtcacaccgcattcgcggaacaggttccccagcatcagacagccgatcagcggcgccgtggaggggagcagcaggatgacaaagatggagacgatcaccgggaacacaatgcgttcggtcttcgtgacctcgcgagactggaccatcttaatcttgcggtcttccttgcgggtaagcaagcgcatgatcggaggctggatcagcgggatcagggccatgtaggagtaagcagcaatggcgatggcacccagcagagcaggagccaaacgggtcgtcaggaagatcgccgtcgggccatcggcgccgccgataatgccgatggaagcggcctctgggccggtgaagcccaggcagatcgcgccaaagaaggcaacgaaaacgcccagctgtgccgccgcacccatgagcatactcttggggttggagatcagggggccaaagtcggtcatcgcgccgacacccataaagatcagcgacggatacaggccggccttgacgccgatgtagaagatatccagcaggccgccctcatggatgatatccgtgaaggaaatgtgttcgatgacttccccggacgccgtggtaaacgccgtaccgttgatgtaagcgtcccacaggttgaggttgtacaggcccgcaccgggcaggttggtcagcaggcagccgaaggcaatgcccaccagcagcagcggctcgaatttcttgacgatgcccaggtacagcagaacacaggcgatcgcgatcatgatcaaattccgccagccgccatctgcgaagaagcccgcgaagccggaatcctgcaccagcttcatcagggtctcgccgatattaaaagctagaatgttcattcgtgtcctccttatgccaaaacgaccagaggatcaccggtgtcgaccgtggcgcccttgctggtaacgacctgcgctaccgtgccgtcatgcggggccatgatctcattctccatcttcattgcttcgaggatgaccagcacgtcgcccgccttaacagcagcgccctgggtgcagttgaccttcaggatggtgccgggcatgggggagctgaccgtctcgccagcagccagagttacagctgcgggagcagcggcaggggctgcagccggggcagctgcgggagcggctgcgacaggcgcggcggcgggagccggggcgtacgcttcgtactcgtcgaccagcatggccttgccagcttcgacctcgacctcataggtcttgccgttcagggtaactttatatttcatcttactttacctccttgatggatttgaagcgcagttcgttgacgggcttttgcatcttatctgcaacgatggccatcagcattgccgcctctttatccggcacgtcgtagagcttcacctcaccggcagagcccggcgcgggcttctcgaccggagccgctgctgccaccggcgccgctgcgggcgcggcagactgtgcctttttcttctgggaggcagtcatgatcttaccgacaataatcacaacaatcatcagcagcaccaggccgataaagacgaccagatatcccgtcagtgcgacgagaccagcggtgccgatgttgatgtctaccatctcagggtttactaaaaacattccgcaagccctcccttatgcttcttcgattacataagttgcgatattctcctgctttgccttacgggcttccaagaatttcttcgtctggtccgggaagcagatatagctcatgacatcctcttcggactgggccagatcgcccagggcttccttggcggcggcgaagtcttcgccggtgcgcttctggtcctcaatacggcagtcgaccggctggccgccttcgcccaggatcttatcctgcagctctttgctgaccggggccggggcattgccgtactcgcccttgaagtaattcttaatctccttggaaatctgcttatagcgctcgcccagcaggacgttcgtcacagcctggttgccaaccatctgggacagcggcgtgaccagcggaggatagcccagatccttacggacattggggatctcttccagcgcagcttcaaacttatccatggcgtgcatatccgtcaggttggcaatcatgttggagagcatgccgccggggaccttgtagaccagcgcctgagcatcggtcgccatgctcttcgggttcaggacgccgctgtcaatgtacttctgcttgatgggcttgaagtagtcgttgacttcgttaatggcagcttcctgcagaccgcagtcgatgccgtactgctgcagcgcgtagaacatcgtctccgttgcgggctgagaggtgccgttggagaagcaggacgtcgcgcagtcgatgacgtcgacgccggactcgatggccttcgtgaccgtcatgtaagccatgccggtggtgcagtgggtatgcaggatgatgggcatatcgcccagggcgtccttaatgcctttgatgaggtgctcagcctcgaaggggctcatggtgccggccatgtccttcaggcagatggtcttgaagcccatggtcttgagttccttacacatggcgatgtatttttcgaccgtgtgcaccgggctctgggtgtaggagatacagccggaggcgatggtgttcttggtcgcgtacttcatcgttgcgtccagtgcggtgcccaggttacggaaatcgttcaacgcgtcgaagatgcggatgatatcaatgccgttcttgatggacagctcaacgaacttctccaccacgtcgtcatgatagtgcttgtagcccagcagattctggccgcggagcagcatctgcagcttcgtgttgggcatattcttgcggatattgcgcagtctctcccacgggtcctcgttcagataacgcagacaggaatcgaaggttgcaccgccccagcattcgacggagtagtaccctgctttgtccatggtgggcaggattgcttcatagtcggaatacggcaggcgtgtcgccatcagagactggtttgcatcacgaagaacagtttcagtaatttgaacttttttcatgtgtaagcctccatatgtgtttttaacaaagtttactgctttgcttttcaaaaatccaggggtgtttgcttttcttaatcacgtgatgatatttcttaatgaaattttaacgcag

SEQ ID NO: 3325 - DNA, 8839 bp, Unknown
  16S sequences of unknown bacteria
ggcgtctgaacctctctgcgttccccctgaaaagggcgccccacgcggagtggaataattaaatcgaaaagacgtaagtcttttcttctcaattctcacttgaatctaaagtgaatcttcataaagggaagtctcttagaatacgcttgtagtctaaggaaaagaaattagcttcgctctttcttgcgaaggaaataccgccacccgtgcatgggaggttttctaaggtagaaaggactttcatcctttcctacattatatcaaatccgcggggtattatcaatcacatacgccgaattttcgcgcggaaatgcttggtttttccccgaaaaacgaaaaaagcacaccgccgtgggacaaatcacagccgcgtgcctttttacttaattcaaaccaattcgactatttccggaatcgtgagagggtgagtccgagaattattcttcgtcgtcggatgtttcagcttcttcttcctcgtcctcatcgtcactgtcgcagcagcagatgggctcgtagttgctttcacattcgccgaagcagtcgtctccgcaatcgtcgcagtcgccgtcacattcaaacgttacctggaagtactttttgaatattgtatatacaacagcagcaagagcggcgagactgacaacagcacctatcactacgaaaataaccttcaaggtctcaatagtgcttttttcttttttcatctttatatcctcctgtaattgtttttcgtttaatgggatatcctgataaattgaagtatatcataaaaacgtgaaaaatcaacgggcataagtttaacagattattaactcacgcctattattccccttgccagccgaaattatgcgcattccggagccttctcttgatttattctccgcatatcctgccgatttccgccactgccgcatcaacaagccgtccgaccgtcaaatcgttcactcccactacaatgttgtcgcagtggttcaccggaatcagcacccgcttcgccccgctctgccctacagcgactgccatagccggagttatctcgccgaacagagaatctgctatcactatcccgacgggtcccgatatcacgtccgcgtgccggcagcctacctttaccgcgttctctccggtagcagcgttgtccgctcccgctttgagcatagccgaggtggcagcgctgtttgttcctaccgcagttaccgtgcagtccggcagcttttcctttatctccgagacgagctgacgacctatcccgccgccctgtccgtctattataagtatgtttttcttcgccatgttattccttaaattatctccccgccgcccaaaaccagcgcgagcgatgacgtcttttcgtccgtgtcggaagcgtcgggtgtgtatatcacggcaaactgtcccggcgacggcgctctctgcgcttcatcaaacgtaagatacccatccctttctccggttctcgtaaataccgcaggggacggcttgtgcgcgtatctcagctttgccgctactctgacttccccgtccagtgcgtgcgggtcggaggggagattcagtccgttcacatacacgcgctttttaaacagtccaccctcgtctccgagcactacttcgtttttctccgcgtccttcgagagcacaaaagcgtgcctgccgagcgagattccgagtcccttacgctgtcctatcgtgtagttcacgtgtcccttgtgccgtcctattacgtgtccgtccgtgtcaaggtagttcccgtccttcgggagagccgcgccaatccgcttcatgaacgatacgtagtctccgtcggggatgaagcaaatgtcctgcgagtcgtgacggtgcgcgttcacaaatccgttttccgccgcaatctcacgcgcttcgtcctttgtgtattctccgaggggaaagtacgcggcgttcacctgattttggctgagcatcgcgagcacgtagctctggtctttctttaagtccgcggcgcgcctgatgtatgtgtatccgccgtactctgcccgtcttgcgtagtgtccggtgacgacggcgtcatagcccctgctttttgcgtagttgtacagaagcccgaactttatctcgcggttgcagattacacacggattcggagttcttccgctaaggtagcttgacgtaaagtagtcgataacggcttttttgaattcatcgtgagcgtagaggaaagtgtgtcccactccctgattttcgcatacggagcgcgcgtcggagatgtttttctcgtccgcttcatgctcgggggagtttttgtcagccagcgcgagagttacgccgagtattccctcaccctcgcggaggctttttttcatcagtgagagcgatacggaagagtcgactccgccgctcattgcaatcatgtagttcatttttctccgacgtttatgtcgcacagcggaagaatctcatatccctgcgcgcgtatccagtcgatgaggtcgccgagtatggcagcgttcgttgtggactccgtgtggaagaggtataccactccgggatgaagtccgttctttgccttagcgagagcgtccgcgggatcgggctgattgttcacgtcgtagtcatagtaagcccacgaccacattacggtatggtagtccatcttgtcggcgagcttcagcacccactcgttgcacgcacccatcggcggtctccagtagtgcagaggttcggcgtcggggaatttttccttgatgagatcctccacgctctcaagctcatcaacaaacgtttcctttgacacctgcgtcatgttcttgtggttcacggtgtggttgccgagaatatgtccctcgtctatcattctgcggacaaggtcttcctcggatttgacgtaagctcccgtgaggaagaatatcgcgccgacttctttttccttcagcgtgtcgaggatgtcctttgtcggtccgtactcatagccgcagtcgaacgtaaggtagcacacctttctcgtctcgtccccgcgatagattccgccgtatttgttcatgaggtcgagcgtagtctgtgagcgatcccacgaatgcgtcgcctctcccgtagcctcgtcgtagcttgtcttgccgaagtaccaagagcctgtgaggtcgtccccctggtcgtcaaacagcgcggtcgaggtcgaatccatctcggagagtgtcgcaagtccgctctcgtcgcgaggcgggaatgagtaggtgtacttgccgttttccaccttccacgagatgccgtccgtgcttgatgcggtgtccgcggtcgtttcctcgtcctttttgtcaagcggcggtggtgtgtagcctgtctctccgctttcctttgtctcggaagtatcggaggtcgtttcggtatcgcgcgtcgtttcgctgtccgtttctttgtccgtgtccgtactctttgtctcggcgggtacgttatctcttcctatcccgctgtttttgtcgaccttagcggcttcacgcaggcaggaagtcagaagcagagccgccacagtaagcgcaagcactgttttgagttgttttttcatttctataataacaccttaataagctttttacgtagatttacaactatccagtttttattttaccacacaaacccacccgtgtcaagtaacaacggcgcggcgggaaaacgaacaaaaattaaaaattttactaaaactttaatgaaagatttaccctcggatttattgcaatcctattatggatttggtataatatattatgagaaactattttctatcagaataattcagaagttaagtaattcaggaggacaaatatgtcagttaacgattccgttgctcttttaaagaagtatgatcccgagataggcgcagttgtcgaggaagaactcgagagacagcgcggcgggcttgagcttatcgcgtcagaaaacgttgtatccgaagccgtaatgctcgctatgggcagtccccttaccaacaaatacgccgagggttatccgggaaagagatactacggcggctgttatgtggtagacaaggcggagcttatcgcaatcgagcgtgcaaagaagctcttcggcgcggatcacgtcaatgttcagccccatagcggagcacaggcaaacatggcggtatatttcgcgctccttaacgtgggagacaccgttctcggcatgagtctggcgtgcggcggtcatctcactcacggaagccccgtcaatatgtccggcaagaactacaactttattccctacggcgtggacgacaacggtattctcgattacgacgagcttgaaagactgacgaaggagcaccacccgaagctcatcgtagcaggcgcgtccgcttatccgagagtgattgactttgagcgcataggaaagatagcgcacgaaaacggagctttgttcatggtagacatggctcacatcgcgggtcttgttgcggcaggacttcatccctctcccgtgccttacgcagacgttgtgacgaccaccactcacaagactctccgcggacctcgtgggggcatgataatgtgccgtgaggaatttgcgaaggctatagacaaggcgattttccccggaactcagggcggaccgctgatgcacgttatcgcggctaaggctgtttccttcggcgaagctctcactcccgaattccgagaatatcagcgccgcattgtggacaacgcaaaaacactcgccgacggactgcttgaggaaggatttaatcttgtctccggcggcactgacaaccacctcatgctctgcgaccttcgtccgtttgacatcaccggcaaggaattcgagcacaggcttgacgacgttctcatcacggtgaacaaaaacgccattccgaacgatccgcagtccccgttcatcacaagcggagtaagaataggcacacccgcagtgacgagccgcggacttgacgaaaatgacatgaaaactctcgcacatctcatcggacttgccgcaaaggacttcgataacagtcgtgagcacatccgcgaagaagtcaaaaagctatgcgccgcacatccgatttattaatataaaatattccaccgtacaaggaggatttttgatatgaaaaacgaaatggacaagactataaccttttcgatacgcgaagaagagcgcgacagggagagaaaaatgctcctccgcactgtctatgacgctctcagcgaaaagggatacaacccgattaaccagcttgtaggctacgttctcaccgaagacccgacctacatcacaaactacaaaaacgcgcgcggtcttatcagaagaatcgacagagacgagcttatggcggcgcttctcacggagtatctcggactttgaccgctcttccaaaggtaaagctctccccgcgtctgccggagataacaaggatagctctcggttctctcaccgtgtcgaaaatgcaggcggctctcccgtttgacgaagcggcgaatgttatagcctacgcgttcgacagcgggataaacatgaccgacactgctcagtactacgaaaactacgacataatccgcgcgggactgaaaaaatgccgtcatctggaaaacgtccttgtctcgaccaaaacctacgcatactcgcgcgctcttgcagtcgaagccgtagaggaagcaagacgggagcttgaccgcgatgttatcgacattttcatgctgcacgagcaggaaagctacgacaccctccgcggacacatggaagctctcgaatacctgctcgaatgcagggaaaaggggatagtccgtgcggtaggtgcgtcaactcatcacgtctcccttgtccgcggcataatgaagctgcgtgagcgtgacggcataacactggacgtatgtcatccgttatataataaggaaggcatcggcatagctgacggtactgagcgcgacatggcagaggctgtatcggagctgcacggcatgggagtcggcatttacgcgatgaaggctctcggcggcggacatctctcaggctcggcagaggacgcgctcggatatgtgctgtcgagggactacattgacgcggttgccataggaatgcagtcgcgcgaagaagtggacgcgaacataaacttccttctctgcggctcattctcggcggaggacaaggtaaagctgttggcaaagcaccgctcactccacgtggaggactactgcgagggctgcggctcatgcgtaaggcggtgtgcgtcgggtgctctcactcttgttccggctgaggatgaagatgatggtgcatcgttcacggacgaatttttggcggaaagcggcattgcgtcaggcgagaaaaagcagaaaatgcgcgcaaagcccgacgactccaaatgcgtcagatgcggctactgcacaaaagtatgtccggtattcgcactgaaaattttttaagcaggtattattaatgcagatatactggagcggcaaggatgacgaaagcataaagtccgttgccgctaacaaaaacgtcagcgtaattctcggatttttcgacggagtacaccgcggtcacatgaggctcattgaagaagcgcgggatgggaacgctttcaccgtagtgaggatgttcaccgctctgccgaaagccgaagttctgctgaccacaacggaagaaaagctctcactgcttgagacagccggagtggacgcggtggttttcgacgatttcactcgccttcacgacatgagcggcagggatttctttgaaaaatgcgtgctttctctttccccctcccgcgtcgtctgcggctacaactaccgtttcggaaaaggcgcggcatggtcgacggatgagctgaaagggttctgcaccgaacacggaatctcctgctctcccgttgaagagtacaaatttgacggaatgacggtgtcctccagtgcgattcgttctctgatagccgagggagacatggtaaaggcaaacgcactcctcggacggatgtactcggtaacggacaccatacggcacggcaagcagctcggcagaaccataggctttcccacgataaaccagcgtcccgtaaagcacaaggctctcccgaaggagggaatctacagctccgtgaacagcttttgctttgacggagaagagcgctcatacgcgggagtgtgcaacataggatatcgcccgacagtgaaccgcgacgagaacgacatcacgctcgagacgtacatcatgagcttctcgggggatttatattctgtctcggtcacgacgtattttgccgaaagactgcgcggggagataagatttcctacggtcgaggctctgcgggaacagattgcacatgacgcacagcacgccgcggaaagcatagaaaaatacgctccgacatacaaaatggacgtcatattatgattatgaaaaaatacaggtatctctctctcgtcatggcggcggtgatgttctttttattcccgtgcacggtttttgcggatgacacggaagtaagctctgacccgccggagatacagcacgccgcgtctgcatacctctacaacttcgagaacgaccgtgtgctgtacgaatacaattcgagcgaaagagtttatcccgcctccactgtgaagataatgacggcgatagtggcttttgagaagtattccgacaacctcgacgcggagataaccgtaaaacagtcgatgcttgacgaggtgaacggcaacaggataggctttcaggcgggagaggtcgttacggctcgtgaaatgctctcgtgcatgcttgtaaactccgcaaacgacgcggctataatccttgcaaatgcggttgccggaagcacatcggactttgttgagctgatgaacaaaaaagctgcggagataggcgcattcgacacctactacaccaatccgacgggtatgcacaacgacgcgatgattacgacagcgaaggacaccgcgataatctccaaatacgcctactccgtccccggacttatcgacatgacctcgacaccgaagtacgtcatgcccgcgacgaatctcagcgactacaggaacatatacaaccgaaactccatgctctcgaactactacagcgcagggtactactacacgggtactctcgggctgaacgcgggcgcaacgtctcagggaggatattccatctcggcggttgcggaagacgcggagaacggacttacatatctggcggtggttctcggtgctgacgaagaggacgacggaatctacagctacaaaaacgccattgcgctccttgactgggcattctcggcttacgggtacagaacggtgctctcgagggacaaaatgatatgcgagctgccggtgaacctctcctccacgctcgactatgtgacccttgtgccggcaagtgacatcacggtgtacctgccgacaagcgtgaatcttgacacggagatacgctacagctacaacacctacgaggaatcccttgacgcaccggttgagagcgggcagaacgtggggaacattacggtgctctacggcgacgccatcctcggctcatgtccgctcatcaccacgtcaagcataacgagaagcgagtttttatacttcctgcaaagggtaaagaacttcaccgacagccgtttcttccgcggaacagttgtgggaatcattgttatctcgatagcgtacgcccttataaccgccgcgataagggaaaggaagctgcggcacagctactcaagctacaggcgaagataagcaaaaagcaagcctcgatgcgcatcacttaggattgatatgcaccgaggctgctttttttcatatttttaggagaagaaatatgttttgttggaaaaagacttgcgtcttttgatttgattgtatcgactgcggtcgaaggctgccactac

SEQ ID NO: 3326 - DNA, 32759 bp, Unknown
  16S sequences of unknown bacteria
ccgtatcaatctggtgcaccttggattcccggatcatattgcggatggcgccgttgactttcataatttcaaaagcgggagccaccgacccatctttggccggaatcaactgctgggacaccaccgcctgcagcaccatggacagctgcacccggatctgcggctgctggttgggcggaaacgcatcgatcacccggtcgatggtattggccgcgccaacagtgtgcaaagtggaaaagaccagatgcccggtttctgcagcggtcaaggcggtgctgatggtctcataatcccgcatttcgcccagcaaaatgacgttgggcgcctgccgcagcgctgctctgagcgccgtgacatagctttctgtatcgttggaaatctcccgttggctgaccacgctttttttgtggctgtgcagatactcaattgggtcctccagcgtgataacatgacagttgcgggaacggttgatcagatcaatcatgcaggccagcgtggtggatttcccgcttcccgccggcccggtgaccagtacaagcccctttttcaaccgtcccaaatccagcaccgtctgcggtacgcccagctgcaccgggtccggaaggtcgaattttaccacccggattaccgctgccagagaaccgcgctgtttataggtactcacccgaaaacgggacactcccaccagagaaaaagaaaaatcatcgtctcccttttccagcagacgcttggggtcccgctgagaagccagttcatagatctccaggatcatccggcgggtcgcgtccggatacagcttttcctccgactggttctggatgctgttattgattttataagccagcggcaggccggatacgataaaaatatccgaagcgcctttctccactgcctctttgagcatttcagtcagttgcattgtccgtctccttatcccacaggaagattacccggctggaacaccggcatacccgactcttcctgcatttcctgcggcggaactgcctgccacaaaagccgttggatggaagcgttctcccgatttagccagtagcgctccgtcacatccaaacggatttgcagtgtccatccgtccgccccacacaccgtaccggaaatcagccatcggtcgtcctccgaaacggtcagcgcggcgccgtcttccgacagatccgggctgtcaaagtccctcagagcattttccagcgccaggcgacaggccgtttcctcctgcgtctgcgccggccgcgttctttccaaaagatccgctagatccgaaagcatccgctcaccggctgtgtccagcgcataataggtagccgccgcatcagcggttttccggctgagcttataatccgcgttggcagacaccaggctgagcgtggcgaaggttgtcaggcacagcacaacaaaaaccatcaggattgacgaagagccgatactcaacccaaaactgcgtttttcctttttcatggctgcacaccctttctcatcccatcagtcacgcttatcccagatatttttccactggtatttgtaaaatttcccctttttcattccaaaccgcaaccaccgctgaaaaataatcctcccggccggttggggccggagcaatctctccgccgccgggcagcaccatgcgttggccggcgcaaagcactgttacggtgtaaatcgcatcctgcgcgccggtgcggttccagccgacgtcgaaatacagatccaatctgccatccgcggcttttgcatccagctgggccgccagcttttccaaatcgccatccgccgccttaagccattccgccgcggactggacctcccgggtcgccgccgtcagctctcctcccgcagtactggtcagatgggcctgcacaaacaggttcacacacacggcgctggtcaccgcgaaaaagaggatcacaatcatcaattccagcaagaaaaggccggagcgggacgttttgtgcactgccatgacttgtgcctcccttcccttattccccgcaccgcaggaaaacagtcgcccggcgggtctcgccgtctgttcccgtggcggtcaacgtcagcacagagccctctttttcagccagaaagctctgctgttccttaatcggctgtccgtcggtcggctttacctgcacaccctgcgccacaaaaacttcccgcaaatagccgtcgtacacataaatccaggtttcataggtccgctcccccgcctgctgcgacaaaaccaaagccggactatcccccacactgcggattgtcacagcattcgccgcatcgttctggcgcaccttttcggtcaaataggtcagggaggtgcggctgtcataattgctgtccatcccgcggactgtctgccggtacacgttggcgccgatgaccacaaccatcagcgcagaagcggcaaacacgcagaaaagcgccagagtgaacaaaaaatccaccacatgccctttctgtgcgccaaacggtttcatgccgtcatcccctttccctgttgttttttattcctgcccggcggattcatccccgatgggaaacacggcgatttccggcagcaggtttgcgcccaaacgctggtaatgaatcacatatctgctgtcgtccaccgcgaggccgtaattctctttcaaatattccacactcgcagggtaccgcccctcgacggcatagcactgcaccgccgcacggcgaaccgcctgttccgcaaaacgaagctgctcttcccgggctgtttgggagacgctttgaatgccgaaagaaaacagggcgacgatcaaaacaaacgacgccaacggcaaaaacaagtcctttaacagaacatgctcctttttctgtttaaaataccggctcatgccttgctcctttcttccgcacccgggaaacaggtcagcctatgctgctcataatccccatcaaaggcagcatgaccgaaagcaggatcatgccgacaatgatagacaaaattgccaccagagtcggctccagcacccccagcagcttgccgacggtttcgtcaatttcttcttcataccgctcggcgatttttttcatcaccgcatctgccgatccggttttaaagcccacggtaatcatgcgggcataaacgccggaaaaaagctgggtttccatcagcgattctgcaaaagaggcgccttcggccattttctgtttcatctggctgatcttttccctggttttcacgtcatcaatcaaattggcggccatatccaaggactggtccacgtccagcccgctggacagcatcatcgacatagcggaggcaaagcgcccggccgccactttcgccgcaatgcggcgggttgcaaaaaagctgccgtagcagtgagataaaaaggcgcggccgcccgctgtccgccgcaaaatcagccaagcggcggttaaacccaaaagcacgccgacaatcactgccgaataacggctcagcccggctccgaaacgcataataccctgtgcaaaagaggacatttcgctgcccagctgctggaacacctgattgaaaaccggcaggacgctgccgattaaaataccgatgatcaccgccataatggcgatcataatgagcggataggttgcggcgctttttacgctgcgactgatcgcctggctgcgttcataataagcggacagggaatccagcacttcatccagccggccggatcgctcgccgattcccaccatatccagcatgtatttcggaaagcggcctgtttgcgccaaggccttatgcagcggcgcaccttcctccaatttgttcagcaccgactgcatcagctcccgggtgcggacgtcgccggcgtcttccatcataatcgagattccctcctgcgccgggatacccgctttggtaatcaaagccagctgcgcgcagaacgccgaaagctcgttggcggaaagggtgcctctggtagaatctttcgcagccattttgtcactcctcacacaaatttaatgcctttttaatacacatacatggcgttataattgcttccgttgccgatatagttcataatatcgctgctttcattgccgctggaggcaaaggtcgggtccatccgcttccaggactgtccatcaaaataaatgatcccgttgacccagcccacatcggtgatataggtgctgatccaggcatgatagatattgcccgcgtatcctaccaccagcttggtagggatattctgggtccggagcatggtggccatcaccgccgcatagtcaaagcagattccgatgccgctggaaagaacgctgtccacattgggcagatatccaaacgagatgttcgccgctttattgaaatcataggaaatattgtgaatgacataattatagatattttccacaacctccagatcattggcggccgtgctggccaagcgggcgcctttcgccaccgtttggctgccattgtaaaaattcacatactggttgggatataaaaacggcagaaagctgttgcgcaggctcacgctgatgtactggcccaacgccaaggcgtactggttgccggacacgttttcatatatattgatgctgtatcccccgctgccctgagacaatggaaacacttcataggagccgctgttattgagcgcataagtataggtgctgcctccgtcccgggtaatctgcacccggattttggagacgctgccgctgtatttgaccatgacatatccctcagaagtgttggatgcgtcgatttgggctccgccgccggaataaacttctgtgccggaggccaccggcgtcaacaccgtataggttccggcggactctgccggtttttgcgtttgggtctgctctgataccgcgtcggacagggatggttccgaaacagaaggcacctgcggttccgccgcagaagacggctccagtgcagaggaagacggtagcggttcctgactttgctgcgacagctcctgagaaaactgggaagaaaggatttcttccccgccagcttcagaagaaaaggcatcccactcacccaaagccgactgagacggccattccggcgccgaggaaccggaggcatccgacgccaaagaagaaaaatcctcatcgccgcagctgcaaagagtcaacaacagcataccactcaaaaccagcgccgccaagcggctaagcggacgtttcggcacctttccttcacctcttttcatcatatgccgcagaaaaaccgccctattgcgcctgggatacggaagaatcggcgttccctttcgccgcaaacatcacctggctgttcatctcccgaacatcaaccagccggcctgttaccacaatgcggttgataaaagtgccgatgggatcgcaggatgtcagtgtcaggcaggggtagtccttacaggcaatggggttccagtcgtccgactggatgatctgcgtagactcgtactgatagatatagaccttttcctgataaaccagatacatcagatccccgtcggtcagccggtcaatataataaaactccgcgccttcaatatcccgatggccggcaatgcttacattggcgttggtatccggcgcgggcagctgcgaatactcatataatccagggccggagcgcagagattcggtgtccacattgttctggaccagcacatcctggtccagggacggaatgaccaggcgcagattgccgttttcgtaagcttcccggtcagtggtgaccaccagtttgcctaccgggtaatcctgccgtacctggctgaggctccacccttcggcaagagacactgccgacagttccagcccccgctccggcggcgcttccggactgcgcatcatccaaaggcccgtgaccagcaaaatcaatcccaggcccgcaagaatcagcgaaatcgcctgacggcgggtcagtctgcgtttttcctccggctggttgatttccattgtttcgacctcctaaaacacttgcgcaaaaacgaacaaaaaactaacatttaaaaaatattataaacgatattcctataaaaagaaagagcttttttcctgcctcttgttccttttgctggaaaccggaggaacaaaagactgcataaaaacggagggaaacgcccaaaagagaaaggagcgatcttttcccttttataggaaatcagaaaattttcatgtttttacacctgatttgcgtttttttttgaaaaaattcataaaatttgctataatgattttggtatacataaaagcagaaagggggaatcctgcaatggcaaggaaaacaccaatcatccctgaggatgaggcatatcctcctgtacaggtttccatgcttggcggattccggctgcaggctaacggtcatgaggtggacgaaagccttaaccgggcgcggcagctatggaaccttttggagtatttgattgcattccgccaccgggatatttctccggacgaactggtcgatgttctctggcataatgacgaaatcgacaatccctccagcgctttgaaaaatctggtttaccgcgtccgcactattttggtctcccatgggattcccggcgccaaaaacataatcctctgccagcgcggcacctattcctggaacaacgctttgaccaccacggtggacattgaggagtttgagaggctgattcgcgaggcggacgaaaaggaaagccagcccgccgagcaactggacctttatatgcaggcgctttcctattataaaggagacctgctgcccaagtcctcctttgaagaatgggtcgtcccgctttccacctattatcacagcctgtatgtaaaatgcgtggagaaaaccatccgccttttgatggatgccgggcgttaccaggaaattgcccacatcgcccagcaggccattgtgatcgatcagtttgaggaatctttccacgaagcgctgattctggcgcagatcgcgatgggcaatcaacagcgcgccatggcccactatgaacatgtgactagcctgttttaccgggaactgggggtgaaaccctcggagcggctgcgcaatctgtaccgcgagatcatcaaaaacgttcagcacgtggaaaccgatctggaaatcatcaaagaggacctgcgggaagcctcgctggcatacggcgctttcttctgcgaatacgaggtgttcaaaaacatctaccggctggaggcccgggccgccgagcgcaccggccaatctgtttttctgctgcttttgaccgtcaccgacacgcaggggcagattcccgctatcaagcttttgaacaacagcatggaccggctgcgggactgtctgctgcacagcctgcgccgtaacgacgttgtatcccggttcagcgcaacacagtttgtagtaatgctctcctccctcacctttgaaaacagcctgatggtacaggaccgcattctcggccgtttcaagcgggaaaatccccggatcgccgtgcggattcatcccaagctgcagccaatggaccccatctgcacgcaggaacgtttctgaccagcctggcaaataaaaattttcagagtctgctgaaaagcaggctcttttttttgatttgtgaccgttttatgacaggtatcttttatactggtgccataccaatcaggaaggaggggttctttgaaagcattagacactgttcagcgatccgtcaacattaccaaaacgcagatttgtgtggacagcgtccaagacggcgaaccgtccggttttttatacaatccatatatgcctgagcgaatcgcttttttggggtatctttccctgattaatgttatggaccgcttttttgaccggatgcagtgcccgcaggcatattaccaataccgcgcctggcaggccaaaaaatctgatcaacggcaaccagaaaaggaggtaacccaatttatggcggaagaagctctccactccaaaaacggagaaaaagctacctttaccattcaggtacagttccggcaaaacgccacctggcagggaaccatcgcctggatggaaaacaaaaagattcagcaattccgcagtgcgctggaaatgatcaagctgatggataacgctttggctgaatccagcggcagcgacacggtggattgggaatagtccggggctgtatcgctttatcagcaaccggcacagtttagaaggaaagaggaggaacattatgacacatctaaaacggcttgcttcctgtctgttggccattctgcttgtgatcaccctgatccccggcggtgtgctgacaactgctcacgcagcgcaagccactctgacgcctgatgccgtcgtcaacccggcggacaatgtgactttgtccaaaaccgcggtacagacggccatcgatgaatgggaagtgaccttgcagatttccggcggcggttcgactaccgtaaaaccgcaaatcgatatcgtgctggtcaccgactattccaacagcatggatgaacctgtttacggcagcggcggagtctgcggcagcacttctttccgcgcggacgaaaaaaccaaacgcgtctgcgcgaaatgcggcagcgatgatatcgagtggaaaggcattatcttcggttactggcaatgtgaggactgccgttctacaaacattgttgagcgcaaagtcacaaagggctggtggtgctcgaactgcggctactactacaaaggggaaaaacgtcccgcttcctgtacgcagaaacagggatccatcgatcttggcacccgccgggaaatcgcccagaacgcacaggtggcactggtcgattctctggtcagcaaaggcattaatgcccgaatcggcgttgtgcagttcggcggccttagcatgcaaaagcgggcgctgacccccattctggatgaggacggcaaagtgaaccaagcaaacgtcaccgccatcaaaaacgccatcaacgccgataaaatgagcgggcttgacagtaacaacatcaccagcggtccctataagagacaaaaaggcggcaccaatatcgaggcagggctaatccagggcaacaaaaccctgtatcccgacggcgacagcggctccaccaaccagaagtttatgatcctgctgtctgacggtcagcctaacgtatacagcgaaaacggctcccaatccagcgaggatggcgaatatgctgccactgcggcagaaaaccgtgcgactaccatcaaaaacagccacaaaaccaactttgagttgtatacggttggctttaccactcaggtaaaatgtctgcagaacatcgcttctgatcccagcaaatactactatgctgtcggtgctgacctcggcagcatcttcaacaatattctgaactccattttgtgggtcatcaacaacggtagagttgccgacatcatgggcggtcaggttaacctgattaccccgaaaaaggatatcttgtacagccctactgaactgaatcccaccggttcgctgcccagtccgacgcagccctctgtgggtgtctccggcgaaaccatcaactggaacaccggctcgtatgtatccggcagcgcaaccatgacctacaaggtaaaattggacccttctgttgtgacaggcgcaaatagcgacagcatcaacgttccgttgaacgaatccgctgttttgacctatcaaaacaaagagggaaacgagcagaaactcaacttcccgatccctactgctacggttgaaatcggtacgctcgaggtcacctctaccggacttccccagggcgtaaccggcacgacgcagtcggtcggcaaaacactggtcggcacagaggatttccctcaaactccttatgatgtagcagctccgattgacgcaccggccggctatgagctgaaaggcgtgaaagtcaacggcagcgatttgatctctatgacggcgtttaaagccgcttatgacgctgacaacgacggcaactataaactgccggtgcaaaaaggcgaacagaccgttgaatatgtctatgcggcgaaatcggtttccggtatccgcattgaaaaggtcgatggaaacggcgatgcgctggaaggcgcagtgttcactgtgaacgggcaggagaaagctgccgatcaaggggacggtaaaaacagcacctcggcattgacctttacctacggcgaaaaatacaccgtaacagaaagcactgttcccgcaacttacaacggcgtatcggaatttgttgtaacactgaaagccgactgcaccggattagaatttgtaggcactgctccttcgggcgttaccctgaacggcttgaccattaaagtcgagaatatccgcaaggcgcagcacaatgtcatcgttcactacgttgagcagggtaccaccaatgagctggctacccaggccaccgcagtgaccaagtacgaagacgaagcttacgatatctcctccagcgctttgctgaacaaagacgatatcgcctcctggagccgtgtcggcgtccgctctgaggacacctccaaactctccggcaccatgggcaccgctgacgttcatgtttacgtggagtatgcccgcaaggcgcagcacaatgttatcgttcactacgtcgagcagggtaccaccaatgagctggctacccaggccaccgcagtgaccaagtacgaagacgaagcttacgatatctcctccagcgctttgctgaacaaagacgatatcgcctcctggagccgtgtcggcgtccgctctgaggacacctccaaactctccggcaccatgggcaccgctgacgttcacgtttacgtggagtatgcccgcaaggcgcagcacaatgttaccgtatattactgggatgtcactgactctgaaaatccagttgcattgagtgtaaatggaaaaacttctgattcgatcgtaaagtacgaggatgaaagttacaacgtaacagatctgaccaatatccctgttgccaattatcaggagccggtcgttgctaccggcagtgatccgctcagcggtactatgggcacagaagatctggttattcacgtaaattacgcgaagatcagcgatctgtcctacaccattgagtactactacgttggcgaggacgctcctttcgataccgaaaccgttgagaacgtaattcacggcacacaggttgaggacgttgtcgattccgatgcactggcaaaaggctttaaacgggatcatgtagaaggtactccggtggaaatcaccgaaaacggcattgtaatcaaggtctactatgtagaaaaagaacccaccgacgttgagataccggtaacgcatatttattataccgataaactcgacggctccacggtaaaagatggttctcagcccggttcttcgctggttatttccgtatcggaagcgcgcgaaaccattgtgaacctggatgaagttggaagactgctgacctatggcggtaacaactacgatttcgtttccatccgcgttgtcggcacgctgaaagacgaattcaaaaagcctgccgtacccgttgatgataaactgcccgaagaactcgacgaggagttagaggaagaagttccggcaacgaccgaggacatcgcttggctggatgaagaaattgatgttctctctactacgccggacgcaggggctcttgttcccaccgctgtgctggctcctaccgtagagtacacctctgatttcacctatcagcctgagtatgattatgaaatcgagctgatctattcgaaggatgagcccaaacccgaacccaaacccgaacccaaaccggagcctaagcctcatccgaaaccggatgacgatgatgacaacacgaccaccatcgacgatcctactgttccgctgacacccgctcccaacaacctggtcaccattctggacccgaatatgcctttaggcaacctgccccagaccggcggcgccggtagattggcagcaggcgcaggattgatcggaatgcttggcgcggttctgaatctgttccggaaaaagaaagacgactaataatcgtccttttcgagccaaaataaaaagagggagatgattctccctcttttttgtatttatcccaactatcccaacagctgcacggcctgatggaacaaaaagcagaccgttattcccgccaccgtaggaaccagaaaagagattgccgtccatttgatgctctgggtctccttttgaatggtaaggcaggtggttgagcagggccagtgcatcagggaaaaaagcattacactgacggcggttgaccaggtccatccgttttcaatcaaaagctgccgaagcatcgtcagattgttcatttccaccaggctgccggtagacaggtatgccataatcataatcggcaccacaatctcgttggccggcaggcccaggataaacgccagcaagattacaccatccatcccaagcatttgtgcaaaggggtccaaaaaatgcgcgcaatgcgccaacagcgtcatgtcccctgctttgagattggccaacagccagatcaacaacccggcaggcgccgctaccgccgcggcccggcccagaacaaacatggtccggtcaaaaatcgagcggacgattacttttccgatctgcgggcgccgataaggcggaagctccagcgtaaaagaagaggggactccttttaaaatggttttggaaagaattttggaaaccaaaaaagtcatgcaaacgcccagcagaatgaaaccggtcagcaggatcgccgacccggtcgattgggccaatccgccggacacccctacaaaaaacatagataaaatggcaatcagcgtgggaaaacgcccattgcagggaacaaaattgtttgtaatcatcgcaatcagccgttcccgtggtgaatcgatgatccggcagcctacaatccccgccgcattgcatccgaatcccatgcacatcgtcaggctctgtttaccgcatgcactgcattttttaaaatagcggtccagattaaacgccacccggggcagatagcccaaatcttccaaaagagtaaacaatgggaaaaagatcgccattggcggcagcattaccgaaacgacccaggctaaagtccggtatgcaccatgtaccagcatatcgcagacaaacgccggtgcgcccatccagccaaaaaaaaccgccagtctttcttcgacccagaacaagccgctgcttagccattgagaggggacattcgcgccggcgattgtcaaccagaaaataaacgccaacagcgcgatcatgatggggaagcccgtcgctttgctggtcaggacccgatctatcttccggtcccggctgctgtaaccgcggtcggccgattccactgcgtgagcgcagattcgctctgcctggcgcaccaggcccgatacaatttcatcccgcagcgcttgctcggtcaggcccgcctgctctaacagttcccttgcttgggacaatggctcctgcacagcaggggtttttaaagcaggtcctcctaagtactgctgcgctgaccggatcagttcctcttcgccttccagcagccgaagcgccagccagcgggaactgattttttccccgcagcattcccgcaaagggggctccaacagcgccaccgcctgctcaatggccggcgcatacaaaatctgtaccggatcagcttgcgtggccttatcgtgggttaccgcgtccaccgcatccatcaattcatccaagcccctgccgctgcgggccgcagcaccggttaccggcacgcccagctgcttggacaacgcgccgatatccacatgaatttttttctttttggcttcgtccattaaattgacgcaaaccactgtacgaggcgtgatttctatggtctgcaaaaccaaattcagattccgctcaagacaggtggcatcacataccaccaccactgcatccggatctccaaaacaaataaaatcccgcgctacctcttcttctgccgaatgggccattagagaatagctgcccggaatatccaccatcacaaagcctctgccgttgtgctcgcacctgccctgcgcgttggctacggtctttcccggccaatttccggtgtgctgattcattccagttaagccgttaaacactgtgcttttgcccacattcgggttcccggctaatgcgaccacccgatcctgaggggattcccggtgaatcaccagcccttcgtctactgcttttcttcctgttgaaccgctggtcaatcccaacgtccgtcacctctttctgaaaataagcttctctgcatactgcgcctcatcaggccaagaaccccggagcgtattttttcgcgtccggggttttttctctcagcgacaaaacaccaaaacgcctgccgagtcttctgcgcgcagcgcaattaccgcgccgcggattaagtaagccacaggatccccagcagggcttttttgcacacactccacctgtgtcccttcaatgagtccgatatcctgcagacggcggcgcatgctgccttgcagtgtcagttttcctacccgggcggtttgcccgcattgcaaattagtcaaaggctgtatatcattcataaagataagctccttacaataaactaaaattaggaatcggaaactttgtttcctaatgctaagatatgtataacgcccaatcggtgtgaacaggagggaaaacgccgtggaatcatctgcgttttataccatgaaaggctacgagctggcggcggacgcccaaatcaccaccgctatggaggactatctggaaatgatctgccgtttagaggaagaagaggccggacccgtccgcatccgggccctttcccagaagctgcatgtcaagccctcatccgcttctaaaatggtctctaatctgcgggaaaaagggctggttaccgcccaaaaatatggagaaattcatctgaccgacagcggccggacttttggccggtatctgctgtaccggcatgaactgctgcatcagtttttgtgctttctcaaccactcccaaaatgaattggagcaagtagaaaaaatcgaacattttgtggatgaaaaaaccgtccgcagcatccaggcgtttttagacagcctgacgcgggatggcggaacataaaaagcccccggagaagaacctactccgggggtaagactcgtcagtaaaggatttattgttccaagttgtcaagattcagtaagctatgagataagtccagtgatttcgtttccaatgccatcagatcgtccatggtggttaaatagcaacgaaatatatcatcgccatcccacgtttcatagcagatattgtcttcggatcgaaaacacgagtagattttctcgccatcattcatgggacagtccagaattttcagctctcccttttcaaaatcaaagagataaaactgctgggagtaagcagaaaaaagcactgatgctatttcttcttcctgagaattgccggacgggtaaaaggtggaaagcgtagtggattttagaaccaatcgggcagtcccatcctccattttataaatcgccgcttcctccccgcaggcgaaatagatatagtctccccaaacctggaattgagtgataacatttacagtataatgcgctggggctgcatcgctccgaccgctataagaatccgcaactttaaatcggaacaaatcgtttgttttgtcattctatgaaacatactgttaaaaaaaggaagccttacaaaatattccctgttttcccttttttgttagatctctctatcatccatctccatacttgtaagttttatcaaaatcccccggggcaggttctgccccgggggattttgattggatttgcagcgccggccccattcgttagcggtctcaaagaatccttcgctttcgtgggaaaaggctattttgcctttcccccttttgggggcccgctcatcagatacagcgccgcacgcatggtatgaatcggctcttccttctcagccacccgaaccgcgatatagggcttggcgccggcgccgatggatacccggctgcgcagggccgccgatacgcggctggcccgctcaaaatcgaacaccgacggataaaaaacaatcatatcattcttctgggaaatttcgtaaatgcccagcgacgccgcaatattgcgcaaaagcgccacatcaatgagtccctgcactgcctgcggcggctccccaaaccggtcgatcagctcgtcggtcacatccatagcgtcctcctcgttctgaatcgaggcgatcttcttgtaaatatcaatccgttgggacaagttgtcgatatatccttccgggatatgggcgccgatgcggatatccaccaggcactcccgctggggaacggtattttctccccgctgttcgctcaccgcctcggacagaagctttaagtacatctcataccctaccgcttccatgtgtccatgctggctggtgcccagcacattgccggcgccgcggatctccagatcccgcatggcaatccgaaagcccgaaccgaacgaggtgaactcccggatggctgaaagccgcttggccgccacatcggtcagctcccggccggggaaaaaggtaaaataagcataggctctgcgattggagcgtcctacccgaccacggatctgatacagctgcgaaaggcccattttatccgccgattcaataatcagcgtgttgcagttgggtacatccaccccggtttcgataatggtggtgcagaccaaaatatcaatctcatggtccagcagctgccgccagacctcagacagctgctcctcgttcatcttgccgtgcgcggtcgtgattctggcgtccggtatcagctgactgatccgatgggcgcaggaatcaatggactccacccgattgtgcaggtagaacacctgtccaccccggcgcagctctcggcggatggcctcggtaaggattccccagtcgtgctccaccacataggtctgcaccggatggcggtccatgggcgcctcttcaatggtggacatatcccggataccagacatggccatgttgagcgtacggggaatgggcgttgccgacagagtcagcacgtccaccgattcccgcatttctttaaatttttccttatgcgccacgccaaagcgctgctcctcgtcgatgatgcacagccccagatctttaaactgcacatccttttgcagcagccggtgggtgccgataatgatatccacctcgccccggcgcagctttcgcaggatctgctcctgctgcttggggctgcggaagcgggacagcagttccaccgttaccgggaacccctgcatccgctccaaaaacgtttgataatgctgccaggccaggatggtggtgggcaccaacaccgcgcattgttttgcgtccatcacgcatttgaacgccgcgcggattgccacctccgttttgccaaatcctacatccccgcacaaaagccgatccatggggcggggagactccatatcctctttgatttcagcgatgcagcgcaactggtcgtcggtctcctcgtaggggaaccgttcctcgaactctttctgccactcgctatcctgggaaaaggcaaatcccttagcctgcatacgggcggcgtagagcttgatcagctcttccgccatttcagcaactgcttttttcacccgctgccgggttttttgccattccaccgagttgagcttgttgagcttgaccgttttatcctctttggggccaatgtatttgctcaccagatccagctgggtcaccggaacaaacagcgcgtcggtacccgcatagcggatcttgatgtaatccttggtcacgccgtgaatttcccgcttgaccactccttcaaacacgccgatgccgtgggcggcatgaaccacatagtcgccaaaggtcagatcggacagcgagcgaatctgttcacccggttttttggactttttccgtttgaccgttttagcagcggccttgccgtgggtaatgagggcaaattttaattccggcagttccataccgccggacagggaacccgacaatacgcagactctgcccgccgtcagttcccgttcgccggctgcaaccggaatatggagggcggccagatcatcccgcagcgccgcggcggccttatcggtgccggccagcaccgccacccggtaatcccgacgcagaaagctgtccagatcttcctccaaaagcttcaggtcgccgccccagggggaaagcgctacggcgttgaggctgacaagctcactgagccgaacttccggcaaagagcgggcaaagttttccaatatggcgcagggccgcccctccatcgccgccagcacctggggaaattccatggcaaaggtgtcgcagcccttgaacagaactccttcctgcaaaagctgggacacatcctcgtagtgctgccacatggaggttttggaggcttctttcaccgagaccatttcgcagaaaatcagccctgcgtccggcagatagtccagcagggttgccggctgcggatagatcagcggcaggaatttgtcgatgttgtttaacgaaagccctgcctccagcttttccatgtccgccagcaggatctccttggatttgaccccctgcttgccgcgcagcgcgtcatatgcttttcccagccgtttgaccagccaggcattgtccggatacagcacctcccgggcaggggtgatcagcgcctctttgacggtgtcgattctccgctgggaatccagatcaaaggtgctgatggtatcaatctcatcgccccagaactccattcggtaaggagccggcgcatggggcggataaaaatccagaataccgccgcgctgggaaaactggcagacgccttccacttgatccctccgctcataacctgcgtgcagcaggcgggcggacagcgcctggagagaatgttcctcgccgggatgaagggccagcgtattttcccgcagggtcttgggcggcagcgtatattgcaaaagcgcttcgatgctgcatacaaccagacaaattctcccctgggagatgccgttgagcaccttcagccgggcaaactcatattcccggctaaccccctccacatcccggaaggtgaattcccgcgccggatagaccagcgctttttctttgccggcaaatgcattgacatcctcacacaggcgggtggccatggcctcatccggcgtgactacgataaacggccctgtctcggacagcgccgccgttaccgcggccttgtggatatggcccaggcccgtcatttgggcaggccatccccgctttgccatggccgccagcagcatccggtactggggcgcagatgaaataagatccaacagcatggctttcccctcccttgtctcgcgcagaccgttactttccattatatccgttcatcgcttcatccatgcgaccggacacaatcagccgcgccatatccgccgcatggtccagcacgctgtccagcgctttttgctcatcggaggagaatcggctgagtacccatttggccaaatcataatccggatgcggcttagcccctactccgattttgacccgtggaaactgatcagaaccggtgagataaatgatattttttaacccgttgtgtccgccgtcggtacccttgcgccgaatgcgcacatggcccggttccagcgaaatgtcgtccaaaaacaccagcacccgctccatggggatcttataaaaggccgcggcttcctgcaccgcctgaccggacaggttcatgaaggtggagggcttcatcaaaagcactcggtgcccggccagcataccgtcgccgcacagggatttgaatttcaggcggtcgatttttacacccagttcaccggcaatccggtctaccgccataaatcccgcgttgtggcgggtattgtcatattcttttccggggtttcccagccccacgattagaaaatccaccgggcccgctgggacgtccgcttttttggaaaacagattgcgcatatttcctcctttatccaaaagccgggccaaaacgacaaaaaatcctcccagcttttagcgacagacaagcaaggcgggataggtcactaccccgccttacagaatttgaaaagcccaacaaaggccgttttgtttgaaagggatcgggttcccgtccgattagacgaacagcggggaaaccggtttgtccgcataaatgcgctcgatggcttcagcaaacaccgggcccaccggaaccatggtgattttggggatttttttctcctccggcaaagcgatggtatccaaaagcaccagttctttgatgacgctctgctcaatccgctcaatcgccgggccggaaagtacgccgtgagtagcgcaggcgtaaacctcagtcgcgccgccgacctcaataatcgctttggctccgttacacaatgtaccggcggtatccaccagatcatctacaatgaccgcgcgttttccctttacgtcgccgatgatattcataacctcggagacattggccttcgggcggcgtttgtcgatgatggccaaaggcgcattcatccgctcggcaaattttcttgcgcgggtaacggaacccaggtcgggagaaacgacgacaacatcgttttgatctttgaactgctcttcaaaataaggagccagaatcggcacaccaagcagatgatccaccggaatgttgaaaaacccctgaatctgcgccgcatgcaagtccatggtcaatacgcggtcggcaccggcagtggtgatcagatcggccaccagctttgcggaaatcggatcgcgggctttcgctttgcggtcctgccgcgcataccccagatacgggataacggcggtaatccggccggcagaggcgcgtttgaacgcgtccatcataatcagcagttccatcaggttgtcgttgaccggcgtactgatagactgcaccacaaatacgtctgatccgcggaccgactcgtggatggaaacagaaatctcaccgtcggaaaaatgggaaacatcgcatttgcccatgggcaggcccagcaccttggcgatatgctcagccaccgcaggattggcgttggcggagaaaattttgatatccttgccgtgaagattcatttttttaactcccttttcatgttgtcctgttttcgttctatattccaccgtcctcagacggcaaaagactattttttccgcgggcccagccgcaggcggcgggcctttgcccacccgggtttgagtacctgccgtgccctggcgatggccagcgcgtcatccggcaccgggtcggtaatggtagaaccggcggcgacatagctgccggcgccgatttctaccggcgcgatgaggttgctgttgcagccgataaagcagtcgtccccgattacggtgcggtattttgcgtgaccgtcaaaattgacggttaccgttccgcagccgaaattgacgtttttgcccacgtcgctgtcccccacataggtcaaatgggccacagcggtattttcatcgattacagaattttttacttccacaaaattgccgatctttaccccggctttcaaatggctgttgggccgcacgtgggtaaaggggccaattttgattctttcgtccagccgggactgctcgatctggcaggcgttgatgcagcatccgtcgcccacaaagctgtcctcgatcaccgtattcgggccgatgacgcagtttttcccaatgactgtttttccttttaaaatcgttccgggcagaatggtcgtatcctgaccgatcacaacatccggcgcaatcataacgccgtcggcacagacaatttctacccccgaatccatgtggcgctccagctcggcctgtcgggccatttcattcagccgcaaaagccccctgcggtcgttggcgcccatagcaatccggctgtccggcgcttcatatccgcagacccgtctgccctgtgccaccgcaattccgatcacatcggtcaggtaatattcgccctgcgcattgtccgcccgcagccggtccagcgcgtccagcagaaaatccaccgaaaaccagtaagtcccggcgttgatctcccggatttgcagcgttttttcatccgcgtccgcctgttcgacaatgccggacacatctccgccctcgccccggacaatccgcccgtagccggtggggtccgaaaacgacgccgtgagcagcgtgacggccgctccctcttttttatgtaagcggtaagcattctccaaagtatcggcatccacaaacggcgcgtcgccgtacagcaccgcgcagtcaccgccgcgatgctcctgtaaaaaagctctcgcctgcatgactgcatggccggtgcccagccgttctttctgctccacccaggcaaagcggggaatcgctgcccgcacctgatccgcaccggcgcccaatacggcgcacacttcaccgatgccgcacttttccagcgtatcggcaatccagcagatcatcgggcggaacagcacctcacacaacaccttcgggcgggccgagcgcattcgttttccgtctcctgccgccaggacaaccgcgcatacctgttccaaatttttcaccgcccttattcccatatgaatttctatttcatgaatacgcattcgatgtctattatattattgcaatttttttacgtattttcaagtaaaacagcccaacttttcgttgaatgctatcaatttcgtataaatgtaaaaaaaaatgtgaaatatatagaaaatcctagaattctttgctataatgattctgtgcctattgctcatttgaggatgggctttcgggttgcgcggattctacatgggaacagccaccgcgcaataagacgtaaaataaaataggaggttgattcccttgagcaaaaagtatgtttacctgttcaaagaaggaaacggctctatgagagagctgctcggtggcaaaggtgcgaacctggccgaaatgaccaacctgggcctgccggttccgcagggctttaccatcaccactgaagcctgcacccagtattacgaagacggccgcaaaatcaacgacgatatccaggctgagatcatggaatacgttggcaaaatggaagagatcaccggcaaaaagttcggcgatctggaaaatccgctgctggtttccgtccgttccggtgcccgcgcttccatgcccggcatgatggacaccatcctgaacctgggcttaaacgaagaagtcgttgaggtcatggcgaaaaaatccggcaaccccagatgggcttacgactgctatcgccgctttatccagatgtactccgacgtggttatggaagtcggcaaaaaatattttgagcagctcattgacaagatgaaagaggaaaaaggcgtgacccaggacgtggagctcaccgctgacgacctcaaagagctggcccgccagttcaaagaagaatacaaagccaaaatcggcgaggacttccccaccgatcccaaagagcagctgatgggcgcgatcaaagcggtattccgttcttgggacaaccccagagcgaacgtataccgccgcgacaatgatatcccgtattcctggggtaccgctgttaacgtacagatgatggcgttcggcaacctgggcgacacttccggtaccggcgttgcgtttactcgtaaccccgccactggcgaaaagaaactgttcggcgaattcctgatgaacgcgcagggcgaagacgttgttgccggcgttcgtactccccagcctatcgctcagctggctgaagtaatgcctgagtgctacaaccagtttgttgagatctgcaacattctggagaaccattaccacgatatgcaggatatggagttcaccattgaggatcgccacctgtacatgctgcagaccagaaatggcaaacgtaccgctaccgcggcgctgaaaatcgcctgcgacctggttgacgagggcatgatcgacgacaaacaggcggttctgatgatcgaccccagaacgctggacgcgctgctgcatccgcagttcgacgctgccgctctgaagaaagcaactcccgttgccaaagctctggccgcttctcccggcgctgcctgcggtaagatcgtattcaccgctgaagacgccaaagaatgggctgcaaaaggtgagaaagttgttctggttcgtctggagacctctcctgaggacatcgaaggcatgaaagcttctcagggcatcctgaccgttcgcggcggtatgacctctcatgcagctgttgttgcccgcggcatgggtacttgctgtgtatccggctgctccgatatcaacatggatgaggagaataagaaattcgttctggccggcaaaacctacgtggaaggtgactacatctccatcgacggttctaccggtaacatctacgacggcattatccccaccgtggacgcttccatcggcggtgagttcggccgcgtaatggagtgggctgataaataccgtaagctgcaggttcgcaccaacgcggatacccccgccgatgcgaaaaaggccagaagcctgggcgctcaaggtatcggcctgtgccgtaccgagcacatgttcttcaacgacggcagaatcgccgcgatccgcgagatgatctgctccgataccgttgagcagagaaaagctgctctggccaaactcgagccgatgcagcagggcgactttgaagaactgtacgaagcgatggaaggctgccccgtaaccatccgtttcctggatccgcctctgcatgagttcgttcccaccgatgaaaaggatatcgaggcactggccaaaacccagggtaagaccgtggaagaaatcaaagcgattatcgcttctctgcatgagttcaaccccatgatgggtcaccgtggctgccgtctggcggttacttatccggaaatcgctgaaatgcagaccgaggctgtcatcaaagcggctttgaatgttcagaagaaacatccggattggaccatcgttccggaaatcatgatcccgctggttggcgaagtcaaagagctggcttatgtgaagaaaattgtctgcgagaccgctgacgccatcatcaaagaggctggttccgatatgcactacaaagttggtaccatgatcgagatcccgagagctgcactgaccgctgatgaaatcgccaaagaggcagaattcttctccttcggcaccaacgacctgactcagatgacctttggcttcagccgtgacgacgcaggcaaattcctgggcgcgtactacgacaagaagatctacgagaatgatccctttgcaaaactggatcagaccggcgtaggcaaactggtcaaaatggctgcggatctgggtaaacagacccgtcctgacattaaactgggcatctgcggtgagcacggcggcgacccgtcctctgttgagttctgccacagagtgggcctgacctacgtatcttgctcgcctttccgcgtgccgatcgcaagactggcagctgctcaggcggcgctgaaagactaatctcttctcctgcaccgttttctcaaacagacaaacaggcgcaccgcttggcggtgcgcctgttttggattctgccgccgaatctatccgtccagccccccgagtgccggcgcatattgctatccttcacaaggacttgttggtaccatttgacatttcccccaaatcgtgcaaaaaaggcggctttctcccgattttggattgcctttttgccggcggtcatgctatgatgattgggaaattggaattggaaaggcggttttttatgattcgttctatttctattggcttcaataccatggatgtatatgattttgtcaagaccatgtatcccggcggcaatcagctcaacacggcaatttacgccaaatgggcgggggccgactccgcttacctggggtatttttccgacgatgtgcgcggccagcatctgaaatgggtgctggagaaaaacaaggtggatcttacccgctgtaaggtgctgcacggtcagtgcagctatgccatgactaccttggtagacggtaaccgcacctttcacggcacccgcaaaggagtcaacgccatgactcccattgtgttggacgaagaggatctggcatacatcaaaggctttgatctggcgatttccgattgttactccaatttggacccggccgaaattcagaagatcaatgatctgggcgttccctttgcctatgacttttcagaagaatttaccgaggagattctcaaggaatactgccctcacgtagactactgtttcctttcctgcaaccagcagggcaaagaggagcagattcacgagcttcttcagcggattcacagctacgggccgaagatcgttgttgggacccgcggcgccgaagggcagattgtttttgacggtgagcaattctataccgggaaagccgccccagccactgtggtcgataccatgggcgccggagattctttcacctgctctttttccgttgcctatactgattccaaaaaatccggaagcgaacgggtgcgggaggccatggacttcggcgccaaattcgcggcgaaaatctgcggcgtaaacggttcggtaggagacggcttgacgtatgaaggcagtctggaggatttatacaacgacgaagacgggtatgtttataaaccgtatatcaaacctttcggagaagtacagtccaaataatccgctgtaaaaaagagcctttcccgctgggaaaggctcttttggaaaattggacttccattcacggaagattttgtcttggtcaggacgggcgcatttcattcacctggcccggcaaagatgtgcccgttttctgctccaaatgcagccagcggtccagcctttggcggggcaggatcagattgacggccagcgccgccactacgccgatccccgtatcgagcatccggtccagcgcataagcgatatgatgggcaggcgtgttgaacaaaatgatgcacagcactacgccgccgggctgtacggcgccgggccagcgaaactgcaccgaaaccgccaccagtatcacaatgcccaaaaacaaaatcggcagacggaaaaaataattcccgcccggaaacaactggtgctctacccagaacaacccgattcccaaaaatccgccgatgatggtgccaattaaccgattcccaccgttgagccaggaattgtccaaatcacttcccatgccaaagattgcaccgatacaggcaaatgtaggattccgtccggcaaacacataaatcagcgctaccagcgatgccgccaatgcggttttcacactgcgctgaccaagtccggggattctggcgtggatgggacgatgatcttctttcattttatgaaaacacccctttatatccttacacaaaccgcccgacggccttccggcaatggtacaaaaaaggctccaacagagcggataccgttagacagctttcccagcatagcatacttttccgctcttttccactgcacaaaataaaaattccctttttcccaaaattgcgccatgctgcatccttttcttatacaaactgtcgaaatgctttggaaggaacagggcggtacttttatcatttcgtttgaggccgccaacgcctgccgatttcaccaaggcagcatatttttaagcattgacaaagtacaaaacaaatttataatggctgtaaaataagggaaaacttacaggaaacagggggtatgcgccgtggagaaacaaacaatgggaaccgttgtgtctgctgcaaaacagtggtggctaaaagtgaacaacaagcctatgagaacccatgctctggacggggcagtgtttccgtatatcataaaggtcaaatataccgtggacgggaaagatttcacttgcagaaaatggataaatgccggcaatcgcaccccggcgcaagggagcgctgttaaggtcttttgtgaggaagatcggcccgccaaagcaagaattgcaatttaaatcggattttaaaggctcccaccccttcggcgggagccttttccatgctgattggaagctgttttgaccaaaagtatttgaaacgcacaaaatcagacaacaggagcagttctatcccgttgtatccgtttcaaagctatgctacaataaaagcaatcatgattgataggaggtactccccatgtcgtttccccttccccattttacccctccggatttctccctgccgcggttttctcaggcgccggacgcggtgttggtaccttctccccaagacaaggttgcgccggaacagtatcacgcaaccaccatattccccgaatattttaaaattggcggccaatggctgctggccaaagaaagccgtatggattgtgtcgcagtttatgaaaacggcaacatcagcattcgagagttccggcgcttaaagaaaggggatctggtggttgtcggccggacggaagacgcttcggagggaatctttgtctatctggacggattttctgccgaggagagcggctctgcggaagcgttctctttccggcaggggcgctcccgcgaaacagcctactcccgggattacgattccctgtatgatttgctgcgccatgaaaaagaacacggctatatcacttgggtattaggccctgcctgcgcttttgaccacgattcccgagccgctttttccaaactggtgcaaaacggttatgtcaatgccttgttggctggaaacgctctggccacccatgacctggaggccgcttaccgcaagacagcccttggccaggatatctacacgcaaaaatcccagtccaatggtcactacaatcatatcgacaccataaaccgggtacggctggatggatccatccctgctttcatcgaaaaggaaggcattggcgacggtattatttacagctgcgtgaaaaaacaggtcccctttgtgctggtaggctccattcgggatgatgggccgctcccggaagtatacagcgacgtttatgaggggcagaacgccatgcgggaatgtgtcaaaaaatccaccaccgtcatctgcatggccaccacgcttcattccattgccaccggcaacatgacgccttcttatcgtgtgctggcagacggcaccatccgccccgtatacttttacagcgtggatatctcggaattttctgtaaacaagctgcgagaccggggcagcctgggcgtcaaaaccattgtgaccaacgtgcaggattttgttgtgaatatcagcaaagggctgggattgtaatattatggataagcagattgattttcgcatgattacaccttgcggagaatgctgcgccggctgcctgaaagagcaggacggtttttgccagggctgcctggaaagcggcgggaaatgtaaggaatgggagcagtctggcggctgccctatctttctttgctgcgtagagcacggtgtttctttttgcggactgtgtccggattttccctgccaagggctgcggcaaaaagcgccttggaacccttctatcgtagaggatttggccgcccttgccgcgctttattcccgttaaaatcctctgccaacaaaaaaggagacaagcagctgcctgcctcctttttattttgattacaaggtgtacttattctgtaaaagccttttgcggtgcgaacagcccggcatagatatccgctttttccaaaccaagaccttccatccagccgcagtactgcggcaacacccccacaaaaggccggcagaaaatattatgccttttgtgtttgcgccgcgtccaaaagcatttcaatatgataccgcgggcgcgctttgacttcgccataggtctttccgacataggcccctaccagacccaacgccactaactggatgccaagcgccagccaaaccgatatcaaaacccagacccatccggccacagccaccttgcagcaaagacagatcagcgctgccaaaaatcccagtccggacaaaaaaccgatcccaacgccgacaccggtaatcaaagacaacggcttggtgctaaaagaagtaatcccgtcccatgcaaaggagagcatcttctttaacgggtacttggattcccctgcaaaccgctcgctgcgttcataagtgaccaccgcggtaggaaatccgatcagcggcacgatcccccgcaaaaacaggttcacttcatggtagccggaaaagcagtccagtgcttttttgctcatgagccggtagtcagcgtggttgctgacaatatcgacccccatttttttcatcaggccgtaaaaacccatggcggtggagcgtttgaaagccgtgtccgtatccctggcgctgcgcacaccgtaaacgatctgcgcccctttatgatattcctctacaaattgatccagcacttcaatatcatcctgcaagtcggcatccagagaaatggtgatgtcgcacagctcccgggcagtcatcagcccggcgaccagcgcattttggtgcccccggtttcgggacagctttaagccggacaccgtcggattctcctggtgaaagccgcagatcagctcccaagtgcggtcccggctgccgtcgtccaccaacagaatccggctgtcgccggataccagccctttctcctccatccggcgcagcttatcggtcagccgccggacggtttcgggcaggacctcctcttcgttatagcagggaaccaccagatataaacgatccatggctatttttcctcctgtgattgattttccgttttatctttctttaacagctcttcaaaagaaagctgatgttcttcctccggcgtttgcagtacggtataggaaatcgatggcgcaggccgccggcgcaactgatgagaaagcagcagataccccgccagaaccgccagcgatataccgctggccaaaagaccgacccccaaacctggggttcgataggtaaaacggatggtgctgtccccaaccggagcgcgcaccgccataaaaccaatatcgaccttttcaatctgtgccggctgtccgttgacagtagcgctccacccctcgtcatagggaacgctgaaaaacaccagattttcctttgaaagcacgatcttggacgtaaagcccctgttgtcggtggtaaattcgtaagatgcctcccgccggcggtcggcgcaatcggctacaaaagcgtcctcgctgagcgtatccgcctgctggtccgaaagcttggtcaggatatcactgtgccgggcaatggcgtcgtcctccagcagcaggcccttcatcagcaaccggcagcggtaatcctttgcggtggcatcgaaggtttcccttgtaatgtaatggtcaaacgcaaaacccatagggacaaaatgatcgttttcgtagagattaaagttcccatcggtacgcacataggaatatcccggcatagggctttgctcttcattgcgctgttcaatcaccagccaacgcaccgaaagcaggctgcgcagtgcatacagcttggtatccggtttggaagacacatcccgggtcacgcctacttccggataaaattccatcagcgacaccggcacaatcgagtggaacgcctgaatggtcgggcgatcccagtacatgccaagattttcgagggtgccgtaaaaatccgtgcggacaaagctgctgtcctcggggaactgcaccatatctctgccgttgatcccattttcaatcagccactcatcggaactgcgggcgtttttcccgtcgataaaataaatccagccgaacagtacgctgaccgcgcaaacgccggcgatggcgacccgaggcatctgcttggtgtttttgaaatgccggatcaacagccaggtagccagcaggcacacgccggtaaaggcggcgtacatccaaaaggtcggcatgtcagaggcaaggccgattttccatttcccctcttccttgaccggggtcagccccactgccagcaccatgccgactgtaatgcccgccgtccattttacgccgcgcaaatagtcaatcccccgccgctccatagccagaaccgtagccaggcacatcaaaaggatcagcgcataaaaccaacgggtgtagtaagagttgttcagcaaaataaaaatgctgttaagccccggaatcaccgcaatcaaaaggcaggcggcaatcattttcttcagccacgaccgctgcggcatcagcagataggccatcatgcccgaggcgccaaacagcggcagccaagcggtcaggctggaccacttggccccatggttggggaacatcaccgggcgggagggcacatgcggcgggaacaggaaactgccgacgatggcaggcagccgttcctcatgccagtacagccagaaactccagccggacagcagattgtccaatgtggtgcggggatttccgagaatccccagtaccgccggcaggaaaatgaacagggaaagccccatgcccaaaagcgcctcgaaagccacccagcaaaattttttgaaatttgccccccagctcttatccgtgcagcggaatgcaaaatacaatatgcagaacactgcgctgccgatgaaaaaccagtagttgaccactgcgtttaatgcaaccgccaccgcgaaaaagccgcggcgattgttctgcaccagttcttccattccaatcaaaagcaatggaaaaaacaccaccacctcatggaaatggttaaagaacgtgttatagaacatgaatccggaaaaggcgtacaaaagcgaacccagcactgcaaactcccggcggcggacaaaccgcgccagataaaaataggaggtcaacgccgcgcaggcatttttcaaaatcagcagcggggccatcaaaaaaggcacccaatcgt

SEQ ID NO: 3327 - DNA, 15094 bp, Unknown
  16S sequences of unknown bacteria
cgacataccactttctttcaaccgtttgggcgtttgccatataggttttcatatcctgttactccttattcgtgtgtattttcttttttgtttgataacggctttaaaagaaccgaggaacgcttcgcaccttgaaaaataacggggttaaggcggtggagaggctcccttcttttaacttgctctctaattgtattattaatcgaaaattctgtcaagctgttttgagtcgtgtttttcaacttttttaggaattttttttatttttgctttttttgcgctctgtaagcgttttttcatacttttgccgccgcgggcgcctttcgcctcccgcaaaaggtttccgccgcaaaaagttcaggcgcggcttcccgccgcgcctgaataaagctttccttttcataaaaccgccctttcgccgcaaaacgcccgtcaaaacttttgcagcgaaatatgatcgatcaacgcctgtacttcggcaaaaaatcgggacagatgaaagccgtccgccgccgcatgatggatattcatggaaagcggcatcatcgccctttcgccctcccgttcccattttccccaggtgacgacgggcgcgagataagtccccgaatcgaaaacgtgcatatcgaagctcttatatttgatccagggcagacaggaaacgtcaaaggtattcggcgggatttgcgtcaaatcgaacgcccgcaaactctcaaagcgctttctgtccgcgagaaaacgcgcgtggaagtcaaagaggtcgtcgccgtactcggtcacgagttttgcgcacgcttcgtcctccgcgtggaaatgcgcgtaatagggagaaacgtaatcccacctccccacctcgccgttttgctgtcccagccgaaattcctcgcgggaattgacgattttactcacgatccagatcatggcgggataaaatttcaagccgttttcccgaataaaggaaagcaggggcgccacgtctatctcggcagtcatgctcatcacgattttcaaatcgttcatataagtatggaaaagctttgcgcgtttccattcgtcgagttttattttttcaaatttcattttctatttttacctcccaaaacaaataaacttatttcaggaggaaaccgcaagccccattttcatgtgacgatctccttttataaagattttttccattatatcatatccttcggaaaaaggcaatcgcggaaaattgccgaaaaattttcgccgcgtcctttcccgatagacttttcccgattgttcggacggtttagcgcccgcccgaaagcgaactgcctcgttcttctccgtctatgaaacgggagtgcaaaacgagctttaaaagtagatctccgcctctttcagactccgttttttcttttacgcctccttattccctctttaaatttaaagggcgcttagaaagaatcgcaaaaaaacgggctctgaatatttcagctcccgttttcctcttttcaaaaaatttactttccctttcgccttttgccgaaaatttctccgcgccgccttttcttttcggtccccgaacaggacccccgacgctttttaaaaatgacaagcccggattttgccgctatttgttgcaggtaaaatcgctgctgcccgccgcgtcgggtatccgccccacggaggtattgtcctcccgtctgtcccgaagctcgggaacgggattaggcgccacctgatagcgataatcttttccgcggcggcggatatattctttgatggtgcggtgcgcaggcacgatatcgggaaggggattgacgacgccctgatagcggaagaactcggcgtcggcgggcaaatcgcgcacgcggagataatcctctcccacggaggtgaattgtacggtattgcccagtacggaacgcacataggcgatattttcgtgcagggaaagcggttcgggaaattcgccgtttttgatcacttcctgccattccttcccctcgtattttctgagaagttccgccgctttgtgcagatgagaaacttccatggcaaagttttcttcccacagccgcttgatatagcggtcggtttccgtcgtgtaattcgaccaatagagatagcattcgttatactcgtgccaaagcagcatttccagccaggtggaggaagaatccatcagatcctcgtactgcgtgacgtgttcctcctccactaaggcgatctcttcgtagaggcggcgtcccaaatcggaagaggcgaaattcgtcacgttcatatagtaattcatggtttgctgttccgcggcggtgatgatcatcgtggaaagcaccgtctgcacgtccgattctttggaatcgatcctgcggcgcacgttgtccttgggataacgatgatgggagatcgtcgggcgtccgggcatgatctccgtataccgtcccaccagcttttccgcgtaaacgccctgttccatttccaaaagatcggcatagcgatagagatggtcgaagtcttcgagaagcgcgaaatcgagcgtctttttgacgtagcagttcttttcccgtttggcaagctccgccgtcagatcgactgcgagctgctcatagccgatggtatgttcgagaatgctctcgttctgcggctttaagagagaaattttgatctgctgttgtttctcgataaacctcgtcagagcaagctcccgcctcagatcgttgtcgtcggtgttgcgggaaaactgatgagaaaaccaatttgcttcgaactccgcgccgtttgcgagaatgattcgcgtcttggtatagggatccacggtcctcttgtcataaggcttcggatagagctgctgccagttctgaaacgccttgtcgatgggaaaaggcttctctaaaaacggattcatgtcgtttctccttgcaaaaatgtatcaattatctatatgctaagcagccgggaagtgttattttcgccgattatatgcattataaaagcggacttccgcagaagttcgctttttgttttttatagaattttcaaactatcgcggaagtttttttactttttccacacaattatcgcacagtggtatttctttatcatcgcttatgggcaagccacacagtcgacacaacaattttacccgtctaatcattaaggcgccgctttccatagaaaccgaaagcatagcgttttcatcaaattccaaagcttttctgtaacttacgggaattaccactcttccgagtctatctaatttttgcattttcatttttttcctccttgattagtgaaaatagttaaatttaattttagtatatcataaatttacaaaaaaatcaagcgttaggaaggtataccttcctatatttttctataaaatttgttaaaatacagatagggagatatatctgcctacggaggtaagccgattgactgtaaacgatgccgttgcaaaacgcatttccgttttgctaaaaaagaaaaatttatctttataccgtttggaaagggattcgggaatacaacacggaactatgcaatgcataatgaacggacgaaataaaacggtaactttaaccactgtcatgatgttagcgaaaggatttcaaatatctttgctggaatttctggacgatgatgtttttctttcgacagatttggaaatagaacaataaagacctctctaagtgaaatatagagaggtcttttacgttataaaaatatcaacggcctaatcgatcactgccaatccaccacgttcacccagctgcggagcattttcttttcctcttcggtgctcttttccgtctgcgtggcggcgacgatgggcaggatctcctcgatatatccgcgggcggtgcccgtgcgttcgcagtacaacttcatatacgactccgcgttctcgtcctctccgcgcaggcggaaagtcagataggtgcgcgccgcgtccgcggaagcgttgccctgcgtggcgtgcgcccagtcgatgatatacggaacgccctccgaggtcacaatgacgttgccgggacaaaaatcgccgtggcagagcttgtaatgcttaggcagcccctgcaaacgcgtctgtaaatcgtatttcaccgtttcgggatactcgctgcgggcgatcttggcgtccatcttatctttgagccggggcagaaggggcacgcggcaggcgctgatgtccgtttgcagcctgacgagcagggaaatatattcctcccgcctttcggggcgcttctccatcagcgaggagagcgtttccccctcgatgaaatccatgacaatcgcccatttgccttccagcgtggaaacgccgaggatatggggaacgtgcagaagggtgttttccacacgcgcctgattgagcgcttcgttcaaaacgttttccttgggatagctttcgtcgaagagcttgacgagcgtatttccctcccgataaaaaatcttgtcctttttgcggcagatctcttttttgttgtttctatccatccgattctccctttttaatctttacgcggcgttctcccgcttccgattctattatacactattttttgttccctttcaagtagctttttaaaatattttccgcgattttcgtctattttataaccgactgtgcaaatttgttttccttgacgacaatccgcccctttccttcgcgcaaaagcctcaaaaagtcccgttcggaggttattttttcttcaaattccattcccgccagcactttttgacgcacggaatgcagatcggagcctcccgtccgtatttttccgtatgcgtccgcgtaaaattcccccagcttgttgcatcgctcggtgcgtcccgcgttgaacgtttccacgccctcggcgttcgggaaaaggcggatatggtcgatatagaaatcctcgcggaaagggtgcgcctgcacggcgagcgcgccgttttcgcggcagaaatcgcagaattcccgcatactcatggaaaggatctgcggaaatcctaaaagcgtttttttgtcccagccgtaacagagcacgtcggtgccgagataggaatactcgaagccgaaaaacacctgtaatctctcccctgccgcccgctttacttcttcaaaaccctcgcagaatctttccacggcttttgcgaaaggcagccttttgtccaccgtggtgttcccgttgagaaaatgatcggtgacgaaaatgcccgaataaccgttgcaaaggtacagttccaccgtttcctcgggcgaaaggcggctgcacgcgctcgccttcgcggtatgacaatgcgtttcgtataaatacatatttctcctttttccgccgaacgaaaagcccttttccactactccttcggcggaacttccgccgtaaaccccgacgggacgcctttgggacctttctatctcgtccgattctcttctgatccgtccttgttctcagccctgcccccttctcacgcttaaaagcgaaaggacggatacaaatatttccctcagtcttgttgcctaaaaacacggcgtaaagggcatacggataaaaagcgctccctgttgcagacttataagcctcctcttgcggcgccaaaaaaagacggccgctccgagtttttttctcacggctatcacggcggataggacggtcgtccgccgcgaagaatgtcacagcaaaccttcgataagaagttttatgccgattcccaccagcacgatgccgccgacaagttccgccttatccgccagcttatccccgatcagcttgcctatgtagacggcgagaacgctcagcgagaaggtgatgacgccgatgatgaaaatcgaccagcccaggggaggaaacagtccctccgcggacagctgcgccatttgcagagtcacgccgatggcgaaagcgtctatggacgtggcgatcgcctgtaaggtaagttttcctatcgacaattccgcaagattctccgccgccgcgatttcgcccctgtttttcgcccgtatctcccgcacgcaatcgaagatcattttgccgccgagcagggtgagcaggataaaagacacccaggaagacgccgtttcgaactcgtcgagaaaggcgtccgcaaagagctttgtcaggaaatacccgccgagcggcatcaacgcctgaaaaaccccgaaaaacgcgccgatggtgagcacccgcttcacaggcatcttcgcgtccgccatgccgtccgtcattcccaccgcggcggcgtccatcgcaagcgccaccgccaaaaacagtatatcgaaaatatccataaaaatcaagctcccgcatcgatttgcccaaaaactctacgtcgttatctatcgctcttccgtcgcttcgacgcccgccttttattttatatccgcccgcgcattttcgggattgcgcccggatctgccaaatgccaaacgcgattgcctcaggactcaaaagccgcgcccgctgataaacgaaatcgcccttcccttttcccggtcgtttttctccacgccgtcccgttttttaaagtcccgccgcatttaaagaatttctcgaacgcggatccgcggcgttttcaaagaagagcccgcttatccgactccgcgaaaaagcgggcggcagatttttgcggcttctttccatcgagggaaagacgtgcgggcaatccgtcctcgcccttcggcaaaacaagccctatattcgcccgcctttctccttgtccgacgaatatttatctcccatttccccgatctccgtttggtcggcgcgccttgatttttccgacgaaaaaaggcaagactccttgcgcagaatacagaattttcctcttccgttacgcataagtcttgccgtttcctgtcaaccctaaaaacacgccctaaaaacacgctcccgaataaagaccgcctaaacgttttttcgccgtctttcccgctcaaaagcccgtccgctttaaaaaagcgccctctttccttgcccttttaaagccgaccccgttcggatttatcccaaacgaatcgcattttgccttccaggactttgggaaaggaaaacttttgccttacccgcgccgggatgtatttccattatgtagatttgaccgctccctttcgaaagccggactactcccttatttttttattttagcataaaccactttacttgtcaaacgatatatgctataattcccttgttaattttacgcggcaaagcgaggttttaagccatgtcctatacgatttatctcaaaaaaaacgaagaaaagcgattgctcgcggggcatagctgggtatacgccaacgaagtcgcccgcatcgaaggcaaagacaaaaacggcgcgctcgcctgcgtatgcgcccacgacggacgttttctcggcaaaggctatctcaaccacgcctcgaagatcctcgtcaggctctttatccgcggcaaggaagaggacggagaagcgctctataaggagcgcatttccgccgcctgggaatatcggcaaaagctgggctatgagaactgctgccgcgtcgtattcgcagaagcggacaatctccccgcgctcatcgtggacaagtacgcggacgtcctcgtggtgcagtgcctttccctcggcatccatcaacgcaaggaaatgatcgtgaaagtgcttgcggagatcttttctccccgcggcatttacgagcgttcggacgtttccgtgcgcgccaaagagggcttgcccccggaaaagggcactctttacggagaagttcccgacgaggtcgtcgtcgaggaaaacggcttaaaaatgtccgtagacgtcaaaaacggacaaaagacgggctattttctcgatcagaaggaaaatcgcttcgcccttcgccgctatgccgcgggcggcagcgttttagactgtttctgcaacagcggcggcttttctttaaacgccgctctgacggcggaaaccgtgacggcggtggacatttcccggccggcgcttgaaaacgtcgaaaggaacgcgcggctcaacggcctttcgaatattcaaaccagatgcggcgacgtgttcgaggtgctcagggaatataaggcgaacggagaaaaattttctctcgtcgtgctcgatccgcccgctttttgcaagagcgccgcggaggtgaaagacgccttccgcggctataaggacatcaatcttctcggcatgaaattagtgaaaagcggcggctttttggccacttgttcctgctcccactacatgactctgccgcttttcgaaaagatgctctccgaagcggcgaaagagagcgggcggcgggtgagaagcgtggaaatgagaagtcaggcgcccgatcatcccgctcttttaaacgaggaggaaacgcagtatttgaaattttttattctgcaaatcctctgaattttcgtccgaacggccttttcgttcctttcgctaaaaataatataaaaaacgcatatttgcaatattttccgaaaaacgctttacaagcacaggggaaaatggtataattacttatggatatacgacgaaaaaagcgggaacgtgtcgaagccgtcccgagagaagacgccttctgatccccgccttttaaattcgtttccctttccgcgttccttgatcttagcttttttaagggaccttaggaaaagtcaaaaatattttcagatgaaggagtattttatgcaagaagaagttgtgtccgaaggcgagatcagcttgtctgacatctttcgcgctctttgggcaaaaatctggattatcctcgcttccttgctggtaggcgtgatagtgggaggaacccttggcttcgtcaaaaatcacgacgtacattattacggcgcgagcgtggattattttatcacctccaataagacggacgattcttcgggacaaatcaatccgtccaattacaacgaaacggtgttcatcaccgtcacctccctgctctcgtccgaactgttcagccaggaactcatgaaagatcttcccgaaacgagcgacgtggtgtttccccaatcggaaaatttcaccgaagcggacggcaaaaaatacgataagtacctcaaattgctgaacaattccctctcttacacctataattataaggccagccagatcaaagtatccgtttcggtgctcaacgacgcgggctttgcggcgagccttttgaaacaagtggaaaaaaacgttcccgaatttatcgaaagccgtctggtggataaagactcttcttcgagtaccaccaccccgggcaaggtcagctgcgaacagctcactcacaaccgcgcggcgcttctcaacggcggtcagaccaccaaggaaatgatcaaattcgcggcgattctgggaattttagcggcgatcgtggcgtgcgtggtcgtcgtggtcatcgacagaaccgacaaccgtctgcgcgactacgaggatattccccgtaaattcggactgcccgttttgggagttattccccgcatcgaagctcttgcggaggataaggaaacggaaaaacgtacggaggcgataaaatgagtttttttacaaagtttttttctgagcatcgccgtaacaaacaacaaaaatattacgaacaaaaacattcggacgcgctgcgcaaggcttaccttctcgatacggaaacgcctttcgccattaccgaagccttccgcaatctcaaagcctctctttccgtagccattcccaaaaaggaggagggcggcatcagcatcctttccacctccacctttcccgaagaaggcaagacgacgattaccgtcaatttggcgcagatgttcgccacgtccaatttcaaagtggttcttatcgacgcggatatcagaaaaggcagagtttccaagtatttcaaggatccccatgagccgggattgagcgactacctctccggtcaggcgaaattggaagaagtcctgcatcagtccaaacagaacaaaaatctctacgtcatttatcagggcacccagtccccccgcccttacgaactcttggaaagcgacgcaatgaaagctctttcggaagagctgaaaaaacaattcgattatatcatttacgatacgccgcccgtggagctggtttccgacgcgctcgcgctggtccctatcaccgacggcgcgcttctcgtctgtcggtatatgaggtcgtatgaaagcgatataaagagttcgctcgataccctccgctttgccaaggcgaacgtgctcggcatggtcgtcaacgatttccacgtcaatcctaaaaagttgaagaaaaatcagcagaaatattattattcctactattcttacgggtacggcgaagccgaccccgaaaaagattcgaaaataaccaaaaaagtacccccccccccagtgtttctaaataagtaaacgtgcggcgatgcggcgcggatagggaaaaagaacggcgagaactattccgccgttctttttttataaattttctatgagggatgccgaagacaccttttctcttctgcccttatctgccgtaggggacttgaaggcgctcagtcatcgtcgtccaaatcgcggtcgcgggcggcgtcccactgtttcttgaaatcgtaccaagaggaggcgaacaattcttccttttcctcctgccattcgtcgatgtcgaactcgtcgtcctcgccgacggaatttccgaacttatcgagccgcgccgaactcgtttcttccgcggtggcgctcagctgttttaattctttccacatatcctccaagccgtcgtaaatgcttgcgatctgcgcatagacggcgtctatcagttccttcaaagccgcgtccgattcgtttttcgacatctccgccaaagagttcaaaagcttatgaacgaggcttccgaattcgcctttatttttcgcgtcctccatctcctcggcgtatgcttccaactcttccagctgtttttcgtacttttcctccaagtcttccccgtccgaatcctccgaatcctccgcccgttcctcgatatagtcgctcaattcgtctatcagcttttggatattttcggaaagcgtttcgaaaagcgtttcttccagctcgcccgcctccgtttccagctcctcgatctccttttccttccgttccttttgcagtttagagattccctgatacaactcccgcacgctgacggaagaatattcagcttcttccaggctgccgcccaaagcgagataggagagaatgagcgcgtatttctgagcgtcgattccgtacttttgcgcggcttcctctaattgcgcgttttccacgcccgtgatcaccacgccgcggatcttattcgcggcgaacgcctccgacaacaaacctttcatctcggcggtcatcgtttcatccctgcccccttccgagagcacggcggaaaccagaacggcgttatcttcccgtcccgaggcaaaatagcccagcttcacgcagcgcttgaaaaggacgtccgccgcttcgccgccgcccgcagcggcgacggcgggcacgaattcaaattcctcttccgtttccttctcgggtaggtcgtggcggcactttttccacaccgcgtcaaaatcggagggggcggcggcttgaaggtcttttttcagttgtctttcgatatccgattttttcattccgagtcctcctccaaatattttttcaatacctttaaagcctccgcgtaccgccaggaaacggtgcctcgcggcaggtctaaaagctcggcgatttcctttgctttcatgcccgaattcctcagcagtacaatctgtctgtccttttcgtccaaaagccgtagagcggcggcgagcgcaatgcccgtttccgccgccccgtcgatggtataacagccgccgagagtttcgttttcggcaaaatccgcggaaaattcgcgtttttgccgccgcagggcgttcaaggccttatttttcgcaatcgagagtatccaagtcttgaatcccttgccgcgaaattccccgcatttttcccacacggcgacgaacgtatcctgcgccaattcctccgctgcggcgggatttcgcaccacgccgaggcagacggaatagacgagccttctgagcttttcatatagctctccgaaagctttttcgtcccgccgtgctattttcggagcaagtttgtcaagactcatcgccgcgttcctttcctttgttttagtccgttgccccctgccgcggcttccggcggcaaggcgcagactcattgtatcatatggtcggacaaaagtcaacccttctatttatcggaaaaggaaccgcccgtcggcgcaaaggcgcgccctcagccgagcttttcttctttctgacgcttgacctgctctttcgccgcctcaatctccgctttcatttcttcgcggatcttgtttttaagcgcttttatttcttctttgagcgctttgatctgctctttttgttcctcggtcagcttcacggaatctttcagatcttccaaagcctcctccgcttcgtccacgtactcttccgcgtcctctatggtcttaaaggagagcgtgtcgcccgcggcggcggacagcgccgcaaggtcttcttccgtcaacgcgtattcgtcctcgtcatacttgtcgagaatatcctcgacggcgtcctcgacgtcctcgttttcttcttcctcgtcctcgtttttgtcgtcgtcaaaatgcttgtcgagataatcgtccacgctgtcgggcgtcaccgcgccgttctcttcgaggagagtgcggtcggaaatgcccaaaagctccatcaccgccgccacgtcctcgtcggaaagggaaacgttttccgctttgtcctctatgcgatcgaaagccgtttccaaagcctcgtatctgtcccatgccgccagatactcctcgccgtaaaccgccgcgatgcgccgctcgatttccgcttttgcctcgtcgtaacgcgcctcgaatttatcttccacttcatccgtcaccatatcctcgtattcgtccgcgaggtcttccagcatatccgcaagctcgctcaccttcattcccgcgcccttttcgtacgtcatggaggaatcgtattccatgatcgcctcgatgattctcacctttgcgggcgtgagatccttgtagacttcgggattttccgcctgtaacttcttgacggtgcgttcgtccttggagcggggattgctgttgacctccgccttttcgctgccctttgccgcgcccgatttcgccgcgtcctccacttccttggcttccttttcgtcgtccgaaagaacggtgattttcactttcttgttgccgtcgttgagatagcccatcttctccgcgagagccacgattttttcgctcgcctcctcgacggtcattcccgtaaagtcctcgccgctcaaaagtacgctggcgtcgtcgttgcccgctttgacgccgaccactttattctcccgcaccaaaagctcgatcgagggattgatgtcgatggcgaggtaggtatacgccgccgtatggagatcggagccgctgtcggaagccgacgaagtgttgcacgccgcaaaagagaaacaaagacccagcgccgcggcgcccgctaaaaaccgatatgtttttttcatgataatttccttcctttttgtttttataattttgccttatcgataagggggagtttcaaactccttacacccatatagacacgccgaaagagcaaacggttgggaaaaatcaaaattttttgaaaaatttttttgaacgcgtttttttgcgtttcccacgcgctccgcggcaagattttttctctctaatcctcttttgagcgaatcttcctatttcaaagggaggatattttttcaaatccgttttcttcgcacgtaacgtctgcgcatagacagaaatacgcgcgcgtataaaacacccatccgtaatgtttgttgacgaactcttttgccaaaagtcctgaaaggagaaacaaaaaaacattttcggaaatttcgcaaagaattatatcctccccttttatctcgaaaagggcggggaacggaagcgcccgaaacgccgaaagcgtttcgggatttattgtgtcggggaaaaaggcgtttaagcgttctcccgttttcaaagttccgtgccatacgcctgaaagaatcgctttgaatgcgcggtgatattctcttaaaaaggatatatacacgcgaaaatctttcgggaaaggcaagagttcaggatttttcggtattttctccgcagcgaaaattttttcaaggcggagcgtcaaacgttccaaccccgcgagttcttcttcggtgtaggcggattcgctcatatagcgatcgagcaaaatatccgcaaatccttccaattttatcgcgggagcaagaatgcggacgagtttatgatgcagataagctcggcattcctttcgaacgtcgtaatccttgccgagaaaaacgccgttgcttcggatttttaaattttccgttttcaaatttttatttaacgcggagcgcgagcgaaaaatcgctttttgaagccgcggatatgccgtcaagggcacctttctgctttttgtttctccgacaaaaaggaaatattctttcgtcatatctctgattttgtcttgtaaaaaaagcagttccaccgccttttccatagacaggcgagttttattcgtgtcagtcattgtacctttctcctttactcgtaaatattgatgattttttttccgcgttttcgggcgtaacggcaagcggcaaaagcgccgccgtgattatgattgacgcccgaaagaatatagtccgcgagatctgccgcgagcctgtttgtataggtaatggcaaagcgtaaaggaacttgtttttcgagtaagtaaacggaatcgtcaaaaaacgggggcaactcaaaattttctttgggcatataggaaagaaagatggtatttttgatatgcgggtattccgacttcaactcccaaacgagagaggcgcatagcttatcgaagttgccgcgatatccgcaataaaattgcataacgttatgattgacaattaaatcggcgataatacgctgaattttttggcgcataggaagataattcacctcgctatgaccgaaaaaagtgcatgaatacataattttctcccttgctggaattttttaatatatataggtaataata

SEQ ID NO: 3328 - DNA, 14017 bp, Unknown
  16S sequences of unknown bacteria
tgggcacaaccgccgtaggcggttagcgacccgcaggtgtgacacgaaacgagcatggactacggcagtagtccatgcgacgattgagtggcagcactgtctcctgcactgccacttttttcaacaattagaaaccgcccgtcggggttttcccccccgcgggcggtcttttttgcggttttatcgggccagcggcagcaggatatggaatgaagtcatcaccttgccgtcgatggtttgctcgtccatccagatgcgccccttatggagcgttacgatattccggcacagcgccagccccagaccccagttccgctgagcgggcttggtggagaaaaaggggtcgaaaatttgattccactgatccttatcgatccgcgggccgtcgttgctgaccacgatgctggcgtagcgccgctgcacctccagatgcacgtcgatcaggttcagaatttcgtcccggtcggattccagtgcgttctggatcaggcattgcagcacctccatcatctgctcccggttgcagcacacccatacaagctcatccggcgatcgcagccgaagctccacgccctccggtatattcatcccgtccacgcccttccgaagaagctctgtcagttccagacggctcagcaccgtctttttctgcttcatggtctctcgtaccgtggtcaagcgccggtagatgtcgtcgttgcgctgcatgataaagcgcacgtcctccttcaactccggctggaccttcacctccaacagcttcagctccgcctgctgggaaagcagttcgtttttcaggtagtggcagaagacccgggacaccacatccacggcggagaccttgctgcggaaaatacggtcgtaccgggaattgcgggaatttttcaggatcatccacgccgcagcgaagaaaaacagtcccatcagcaggaacgtcagcgtccgggcgtaaatattgaaggcggtgggcctgtaaatgggcagggattcaaagctgatatagtccgctacccgggacatccacagcgcctgcaccggcagccagctgaacagataaatatacaggaaggccagacagctgaaaagcagcgccaccagcgccgtgcccgtccgcagggaagcgggagtgcggaaaaacgcgccgaccaaaagcccggcggcgaacaggatccatccgacggaaaaccaccgcagcagccgcaccagccagcggtaaaagccccggaagaagcgcacgttgtcaaagactccgatccgttccatgtagagccagctgagaaattggggatccagaaacacgacctgcaccagccatatcgcgccgatcagccagcccagaaaccgggccacccgctccggcagcagcgacgaaaacgacatcgcgaacatcaccgagcagacgataaaacaggcgtgggagaaattcaggagccgcagcagcgtcatctggcccactggcagccccatcagccacagaagcgtctgactgtcgatgccgaaaaatgcatacacagagttataggcgtaataatccttggcaatataaatgacggaaataaaaatgatccccaaaaagctcaaacaaatgcccaccagcatggccgccaaagaaaaagagcttcggcgggtggaaacgggcttattctttctcattctttttctcctttttattgccggaggcgcagactgcgctgccgcgccttctttttgtactttttggtgtgtttccttctttttatactacaatgagacggtttctttccttctcatacagggttgattttttctcatccattgtatattcaggcgtaatccaaaccatttttttcaacttgattcggatgtgttatctggttattatatcgacagaccaagggacgcggatgcgtcacgtacaaattctataggaggttttttcgcaatgaaaaagatttgttccattctgctggcgttgattctggcgatcatgccgctgactctctgtgccgccgaaagcaccgggaaggtcaccctccactactacggctggaccgatgaacagagctacatgaccgctctgatcgatctgttcaacgagcagaaccccgacatcgagatcatccccaccttcgtcaaccatgatgaccacaaccagaagatcgtcgtgatggcctccgccggctccaccgagatggatctggtcagctgcgacgctcaggccaccgtgctgaatctggtcacgctggacggtctgctgcccctaaaggagcgcatcgaagccgccggcatcgacatgagcgcctatggccccatcatcagcgagaccatgtacgaagacgagtactacggcgtgccctatcgcagcaccctgtactccctgtactacaacaagaccctgttcgacaagaagggcatcgcctatcccgaaaagatcacctgggacgagtaccgtgagctggccaagcagctgacctatgaagaagacggcacccagtactggggcggtttcctggctgactggctcggtgctcccctgtctgcctatcagcgcggctccaacctgctggatgacgatctgtccgctataaaggaatgggtcagcatctggaacgatgttatgaacgtggacaagagccacatgagcttcgcgcagcagactgccgagagcatcgactggctgaagttcttctgcctgggcaccaccggtatgctgatcaacggcgaatggactatctccatgctgaaggactacgaagctcagggcatcgagctgcctgactgggacgtgacctacctgcccgccttcgacaccaccggcgacatcgtgagccccggcggtctgagcaccttcatctctgtctgcaagaacagccagcatcctgacgaagcgttccgctttgtgcagttcatggccggcgaagaagccaacgtttatctggctggtcagggcgtgttgcccgccttcgccaacgacgcggtaaaggcttccttcgctgaggctgccggtgtgcccggcgccgccacgctgctggataccaccatcactctggaaactccctccgtgcccggttattccgaactttccaccgctttcggcgaagaacgcaagctctacctgaccgagcaggaaagcctggaagacttcgaagctcacatgatcgagcgccgcgaagaaattctggacagctacaaataaggctcccaaagcctgaaacaagcgcggggtgggcggtttccgtccacccccgtgccttatcaaatgaaggagtgtgtccggatgagagccctgacattccgcaaaaaagagaaacttctgggtctggcctttattgctcccgccctgatcctgtttctgctgtttatggcctaccccatggtctatggtctgctgctcagctttaccagcaaccgcaacgcgggcgctgcgctgaagttcaacggccttgccaactatatccgtctttttaccaaggacagctattttcagatcgccctgaccaacaacctgatctacgcccttttatttacgcccggcgtgctgatcgtcgccctgctggtggcgatgctgctcaattccaaaattcgcggcaaaacggcgctgcgtaccatctgcttttttccttacctgacctccatggtttccgttgctaccgtatggaacctgatccttgcccccagcggcccgctgaaccagcttttgcgcatggtgggcatttccaacccgcccggatggcttctggatcaaaactgggcgctgtattccgtaattatcgtcgccatctggaaaaacttcggctattacatgatcatcctgctggccggtctgcaggggatcccaaaatatctgtatgaatcggcggagatcgacggcgctaccaagcgtcagtgcttcaccaacattaccgtccccatgctctcccccaccattttcctgtgtctggtcacgatcatcatcgcggcgttccaggagttcgacctcatcaacatcctgaccaagggcggccccggccgggcgaccaacgtgctggtcttccgcatctacaccgagggcttcgtcaacgtgaagatgggctacgcttcggccatcgcctacacgctgttcgccattatcatggtcatcaccctgatccagtttgtgctgcaaaagaaatgggtcaattacgattaaggaggcgtcggaaatgaaaaagcatggagctgcccgcatcgtgcgcctcattcttctggcgctggcactggctcttctgatttttgtcatggcattcccgtttttctatatgttcacctcgtcctttaagcaggacacagacgtgtttaccaagtccatgttctacattcccatcccgcccaactggaacaactacgtccgggtgtggacggagatcaacttcctgcaatactaccttaacaccatcaagatcaccgtggtggccacggcactgcagtttctggtgtcggcaacggcggcctacgccttcgcccgcatggaagtgcccctgaagaacttcttcttcggcctgttcatcagcaccatgatgatcccgtggacggcggtcatgatcccgcagttcatcctgatctcgaagatgcacttgtacgacacccatctggcgctgatcctcctgcagcttttcagctccttcggcattttcctgctgcggcagttcttcatgagcctgcccaaggaattgagcgaagcggccatcatcgacggatgcggtcacgttcgcatcttcacccggatcatgctgcccctgtccaagtccgccatttccgcgctggtgatcttcaccttcatcaaggtatggaacgactatctggctccgctgatctacctgcagacgccggaaaagcggacggtgcagctgggtctgagcctgttccgcagccagtattccatggaatacagcgtggtcatggccggtacggtctgcgcgctattgcccattttgatcctctatttctgctgtgagaaacagatcaccgaaggcatcgcattctccggcatgaaaaattgacattttcaaaacggctcctataatgaaaacagctgcaaaaagggggaaaattccaatgagcacggtcactctacgggaaaacgagcttcaactgaacggcaaggcgacgaccctgctgtgcgcgtcgctgttttatttccgcattccccgggagaactgggaggagcgcatggatcagctccgcatggcgggctacaactgcatcgacgtctatattccctggaacttccatgaactgcgccccggcgaatggcacttcgaagacgagcacgacgtgtccgcctttctggcgctggcggcgcggcacgggctgtatgtcatcgcccggcccggtccctacatctgctccgagtgggacggcggcgcgctgcccagctggctgtaccagccgggcgcggtgctgcgtcagaatgacgagacctatctgaaggcactgagcggctggctggaaaaggtgctgcccatcgttgccgagcgccagttcacccacggcggcagcgtggtggccgtgcagctggaaaacgagctggacttctacggctgcaccgatcccgccggctatatgacccggctgcatgagatcgcccgaggatcaggcatcgatgtgcccctgatcgcctgtgcgggcgaatgcgacgtgcagggctgcagcggctatgtggaggatatttaccccgccttcaacgcctattccgacgactatttcgcccatctggaaacccagctccaccacatgcgggagctggcggcccagcgcggaggcccgctgatgatcaccgagaccaatcgcgtccacgccttcctcaagcgggagctgctgtgcggtgcccggctcatcagcccctacaatcaggtaggcggcacggactatgacatgaccaacggcatcagcaactgggcctccgatattgccaagcccctggcgctgatggcctccgactatgactttgtttccatgatcaccgtggacggccgtctgcgggaggaagccgccgaggcccggttgatggcttccatgatgaacgcgctgggcgaaaagctttccgcctccaagccctgtgccgcgcctacgacgctgcgctgcgacttcccctgcgcccagctgctgggcgaggacggacgggacgctgacctgttcccgtcggtggagctgggctacggatggcttatgggtgcgtccaatctgggcgaacaagacggaatcctccgttttgacaccgaagacggcgaggccagcctgacagtgcacgggcacaagaccgtcattttgccgtggaagctggatctgtccggctatggctgcaagggcgcttccatcctgtgggcggaagcggaaattctgtccttccggcaaacggaaagcgggctggaagtcagctttgtgggcgacgagaacgcccgagccatgctctctgtgggcggcgaaaagcacatcgtgaccggcaaggtatggacggaactgaacggcctgcgggttcgcattctgccccgctcggaagccgttttcgagtgtccctccctgcccccgctgaccgaggcgatcccctccgtggtatctgcccgggagaccaaccatttccgggcgcaggacgtttccgtgaaggggctggctcacccgctggcagaccggctctgctccatggagaacgccggtcagtaccgcggcgacgtattctaccgtttctccgtgaagggaaacgaccccgtcatgctgctcagccccgccgatttcctgtggatcagcaacggaaacggaacgaaagcgctgtactgcgatggttccgaccttctgctgcccgcagcggaaggcgaatggcaggtgcgcgcccagtcctggggccacgtgaacttcgacgacgtgcgccagccctccctgcatatgggcagcggcaagggcatcgaaggcgcggcctgcatcgtggagcagcaggagatcaccgatctgtggtatatcttcccctatcccaagtaccgccgccagaaccggcccgacctgcgggagactgaccgcattctggccacgaccctgaacagctggagctatccctccgcccccatggacgcggacttcgagcgcaaggtctatttccggcccgactgcgactgcttctggctgcagctggaatacccggattctcaggttacggtcttcgtcaacgatcagcccgtgggcgtgctgcagccgggcgtttccctgctgcggctgaacctgccggagggcctgcgcggcggcgcaacgctgcggctgcatacggttcgccggttcagccacaccacgctgggacgggcgcacctgctcagcggccgccggatcgcggaaggctccatgagcggcgcggatgtgaacgtgtggagaaatattcatcccgccgagggcggcacggcagtgcagctgcccgtatcgttggctccgggacaggaagtgctgctgtccggcattctgcctgagggcgaaaatcgcgcccgcacgctggtgctggagggcagcggtatcgaagccacgctggtggcccacggtcacgtgtgcggccgggtggaactgaaaacggaaggctaccccgaggttcggggcggaagcagtcgccgggtctacctgcccaagggctggtcggacgaatccgtctgcctgcacctgtgcggcatcggcgaaggcggcgcgctgacggccgtgcgctgggaagaaattcagcgctgacgagaaagaattgaccccaaaggaggcggtcgcatgaagattcgggtactgatcgcggaggacgaccagtctatccggaaatggtatgcctactcgctgggctccatggaggacatcgagctgctgcccatggcggaaaacggctatcaggccgtggcctccgccgtactctaccatcccgacgtgctgattctggacatggaaatggaaagccgggacgcgggcctgaaggcgggccagcaggtgctcagcattctgccggagaccaagatcatcatgctgaccgtctacgacgacgatgcgactattttccgcgcctacgaaatgggcgcggtggactacctgttcaaaaacgcctccacggaaaaaatccatgaggcgattctggacgcttaccgcggaacttcgcccatccgtcaggagatcgcccagcggatgcggcaggagttccggcggctgaagcggaatgaaatgagcctgcaccagatcgtccgtgtgctgcggcagctgtccggcacggaaagcgccatcgtggtgatgctggcgcagggcatgacccgcaaggagatctgtgaaaagcgcttcatcgaaatgagcacgctgaaatcccacatccgcaacattctgcagaagatgggcgtaaaaagcaccgccgaattgatggaactggtcaatcaggagaacctgctgtcctatctgcagggcggaaacgatgcggacgagcagccgcccgaagaagaataaaaagggagtttttccatgactcttttcctgaacggaacctggaaagtgacccaccgcccttatcaggcggatattcaggatattctggccgaaaatttcgtcccggagggctggctgaacgccaacgtgccggaggagattcacgccacgctgcgccgcgcgggcgcgatccgcggcaacacctacgacaagcgggaggacgaagaacgctggatcgaggaaaaggactggatctactgcaaaaaattctttgttcccgctacggaaaaaacaaaaagcgccaccctgctctttgagggactggataccttctgcgaaatttacctgaacggcgaaaagctgggcgaccaccagaacatgcataccgcctgccgtctggaagcggcctcccggctgcgctggggcgggcagaacacgctggtgatccgcttcttctcgccggtggccttcgttgccggagaagaccagtcggaaattttctccatcaccaccagtgagcgcatcttcgcccggaaggcccaaatgaactattcgtgggatttctgcgcccgctgcgtcactgtgggcatctggaagccggtcagtctgatcccccacaagaccccggagatcgacaattactatctctacaccgattctttgaaagacggtcaggcggcgctggggctggagaccgagctgcgctgcttccccggtgttcaggccgagggctgcaccgtccacgcctgtctttccgatggagagacagaggtctggaactgggaaggttccccggaagaagcgaagaaggtctccttcaccctctcccaacctcgcctgtggtggccccgtccctacggcgaagcgttcctgtaccagttccgtctgcagctgtggcagaatgggcgctgcgtggatgaacgggcccagcgcttcggcatccgcacgattgaagtgctgcaggagcggcaggaggacggcaagtccttccaattttccgtcaacggaaagcccctgttcctgcggggcgctaactgggtgcccatcaacaccgtctataccgacattacccgccgggattatgaaattcttctgcatgacgcggctcacggcaatctgagtatgctgcgtatctggggcggcggcatttacgaagaccccgctttcttcgagctgtgcgaccagcacggcattctggtgtggagcgacttcatgctggcctgcggcatttacccgcagacggaagcgttcctttcggccatggcgcaggaagcggacgaggtgctcaagacctaccgcaactgcaccagcatcgccctctggtccggggacaatgaaaacggacaggcctacggctgggcgggacggccttacgaatttgaaagcgaccgcatcagcaatcaggtgctgaaagaagcctgtgcgcggctggatccccggcgctactatctgcccacctcccctgccagccctgacccggacttccggggcggcgacaatccctcctccccctaccagggcgacctgcatctgtacatcatgtccggcgatcccggcgtgaccgccaatcgggactacggcaaggagtactataagcgggtgctgggcttccgtccccggttcatgagcgagttcggctttatcagcctgccggagaaggacagctactaccgcttcaacgtgcgccgggagcctttgcgcaaccccagcgagatcatccgtttcctgccctccaccaaacaaatgctggacgaagggcgcattgaggacgtgatccactacagccagctgttcaacagcatggcgctgaagttctggatcgagcatttccgcagcctgaaaggcgtgtgcgcaggctccctgtactggaagttcaacgatccgttggcggactgcccggacatctggatgtacccctcccacatgtgcgcggtggatatgtacctgcggcccaaaatgacctactactacacccgccgcgcctatgacgatgtgctggtgatgctggaggaagaatcgggcggctggcaggccgtggtctgtaacgagaccgaccgacccatcgagggcacactgcgtatcgagcaccgcaccttccacggcgaccttctgtggagccgggagcaggccgtgttctgcggtgcggacgctgccgttcatctgggccacgtagccaaggacgagctgcctgtgcacgaccctgcggcagaatatctgcgggtgatcctgacggcggatggtcaggtctatgacaaccgttacttcttcttggatgtgaacgagctgcaccgtctggtgctggaaccggcggggctgcgcatcgttcggacggcccgtcagggagaccggctgcaggtggagctgcgggccgagcattacgcccgctgcgtccggctcaacattctggatatgcgcgccgattacagcgacaactacttcgatctggatgcgggcagcagccgcgtcattaccatcgacctgcaggaaagcagcgagccgctctttgccctgaccctttacgcagagggcgaaaacgtagagcgtctgtgcctgcccctttccgacattcccgaggaaaagctgtgatccgctgaaaggagcaaacccatgaaaccgtcgtttattcagacccgcggcacggagttcgtgctggacggtcagcccatccgtctgcggggatacacgctgggcacgtggatgaatctggagcacttcatggtggggctgcccggcacccataccatgatccgccgcgcctttgccgacgtatatggcaaggaacgggcggacagcctgtttgagcattttctggactgcatggtgagggaggacgatatcgcctttctcaaaagccttggcaccaacgccgtgcggatccctttcggctaccggctcttcatcgacgatcggaacccctcccgctatctggaaagcggctttgcggcgctggaacgggtgatcggctactgccgcaagcatccgctctacgccattctggatcttcacgccgcgcccggttcccagaacaacgactggcacagtgacaacatgacgggccaatccctgctgtggcaatacgactatttccagcagcagacctgcgatctgtggcgggagatcgcctcccgttatgcggacgacccgtgggtcgtaggctacgatgtgctcaacgagccgggctacgacatggacgcggacactctcaacggcttctaccgccgggccatttcgtccatccgtcaggtagaccccaaccacatcattttcctggaaggcagcgatttcggccgctgcttcgacctgctggaagacccggacgacccgcagatcgcctatgccttccacttctaccccttcgtgctggacgaggacgtgctggaccccaccatgccggaggaaaagcgggacgcgttcttccaccagctgttcgacaagcagatcgagccttgcctgcgcttcgggcggcccctgtggtgcggggaatccggctacaatattcccatggatcaggagccctttaccaccagcctgattttgaaaaacattcggctctgcgaggagcggggctattcctggtcgctgtggacgtacaaggacgcggggcgcatggggatcgtttatccccgtctggattcgccgtggatgaccatgcgccggaaaatggaagcccgctggacccacgaatacgaacaggcttcctccatgaagttcatccgggccattggggagcagtatctggaccccctgaccgacgagttggcctatgatctggacttccgggtgcgctccatcctgcaccgcatcggcgtggagcaggtgttgaagcccacactgcgctccattccgtgggaggaaatgcgcacctatcccgaatccttcctgctggaaaattgcggccggcatcagcagatgatcgacgctgtttccgcggttttgaagcaaagcgaataacaaacagcccgcgttcgcaaaagaatgcgggccttctctatctttaggcacaaaaaagcgctctcccctaccgggatgcgcttttctatcctatatcgccttgcggcggtttggctggggtagcaggatttgaacctacgaatgcgggagtcaaagtcccgtgccttaccgcttggcgataccccaaaaaaggatataaaaaaatggggtgagtgatggggttcgaacccatgacatccagagccacaatctggcgctctaccactgaactacacccaccatgtctggcgcgcctgaagggattcgaacccctgacccacggcttagaaggccgttgctctatccagctgagctacaggcgcaaaccgtgcggacccaggagacaagcccttaaggtttatccgctgacaatatgggattttatcatatttctccaacgctgtcaaccataatttcggattttttcctgcaaagggagttttcttctgctttccaaagcctttttttattttttgacacagaatttttgaatatgacaaaatataatctttgtgacattcttttttctcaatttccaaatcaaattgttgcacggtttcgttatagtaagcgaacctcggggtgcggactccgagctttccttcccgataccgaagctgctttgcggaaagcggcttcggttctttttgatgggagattaagccagcgcaggggcggttttacattggttatgatggaaaaatagcggtgagtttctgctttttcctcgaattaggaccatttgtcctattttataacaaaattcaatagccttatttagcgcaaaggcaatggcatgatagattccagaaattttttgtacttccgccgtcaataaaataggactatttgtcctaattataaaaatccacaagccggggattgacacgcagactacggcgcgggttggggcttgccgtctcatggggcgttcacgcttttctttcgacagcccgaagggatacgatgtgtaagcggaaagcccccgcttacacctgagtgtgcttgagctgggacggttcccctgtcgaggggaactgacgcgccgactacggcgcaggcggggcttgctacacacttttttcgatggtccgaaggggtgcagggggggaacggagagaaatgtcagcccagtgggctgtccgccgaaggcggaaatgactcggagttcaggcaaacaaccagcggagcgcacggcagtgcgagccgcgccgattgtttgcctcgaggaaagccccatgcttgtgacggtatacgccaactttgccgtatgcgaacccctgccggggacatgacgcgccgactccggcgcgggagtgggacttactgtcccatggggcgctcacacttttctttcggtggcgaaagaaaagtgtgcaaaagaaagccagcggcacggcgactacgaagacggcccacgtcgctgcgcgccgtgggcttcggcctgcggtagccccttcggggctgtcctcggcctcggctcgctgcgctcacccgccggaaaaaggcttttattgcccattttgacggcggggctcgcaatgtcgcgcgcaatggagttggatagctttcaccagctcttggagcgcgctcgtgctcgcctttttccgcc

SEQ ID NO: 3329 - DNA, 32759 bp, Unknown
  16S sequences of unknown bacteria
aaaaagtatttgctgtagatgtggatccagatgcaaatcttggacttgcactggggttttcagaggaagaacctttcatccatgcgtgttaatttacagaaatgctatagtactgaacggtatgtcaggcggtgtgggaggatgtaaataaaataattatttacctcctgcccgatcgttgtgcgtgctcataaagaaactgtatgcgtccacagtgtacggaaaaatgtccatcatccgcggaaaaaacagttgacgtaccacgaaaaacgagttatagtatacggcagtgacagcaaaacgagaagaagtttgcaggaaagaggagaaagcccgccgaaggagtaaaactctcaggttcccgttttcgggagaaaactgcagatggatcgttctctggagacacctgtatcagacaggggccgaaggtgcaaacggcgcgcagcgtcttgaatctctcaggcaaaaggacagaggatgcttgattttttatgacaattcttatcagttccatgtaagcggagttctccgtcttctttcgaacggtcttttgtatttcccgtattgttatgttgcaaaacagataactgaacagagacacgaaaaatttgataaaacgaacgtaaaacgcctgcgtttttaaggaggttttataaaatttatttggctcttcagttataataacttgagaagaggagagatttgggtatgtggaacatggtaaatcagtttctggtaaaggtcgatgatcttgtgtggggtgtaccgcttatggtactgatcctggcaggaggcattcttctgactgcacgtcttggacttcttcagatgcgcaggctgccgctggcgctgaagtggatgtttaaaaatgaagaagagggagacggtgagatctccagctttgcagcactttgtacggcactgagcgcgacgatcggtaccggaaacattgtcggcgtggcgactgctgtctgtgcaggcggaccgggggcactgttctggatgatcgtagctgcgttttttggaatggcaacgaaatatgcagaaggtcttctggcagtcaaataccgtgtggttgcagaagatgggcatagcctcggcggaccgttctactacattgagcgtggcatgggagcaaagtggaaatggcttgcaaaaatctttgctttctttggcgtctgtgttggtctgttcggtatcggtaccttcagccaggtaaacggtatttccagtgcaatccagaacttttttgatccgaataaaacaaactgtgtgacacttccgttccttggcacgtattcctgggcggttgtaatcgcatctttgattttggctttctgtgttggcgcaatcctgattggaggattaaaacgaattgcgacagtcagccagatcatcgttccgtttatggctgtgatttattttgtatttagtgtagcgctgatcctgctgaacattacacacattccggcagcgattgtgactgtagtaaagggtgcgttcaatccgtccgcagtgacaggcggtattgtcggaagtatgatcgtggcaatgcagaaaggtgtggcacgtggtatcttctcaaatgaggcaggacttggaagtgctccgattgcagcagctgcagcgcagagcaaggagccggtacgtcagggtcttgtaagcatgaccggtacctttattgatacaatcattatctgtacattgaccggactttccattgttgtgaccggtgcatggcaggtagacggactggagggagtccaggtgacaacgtatgcattccagaacggaattccgattccggcgcaggtatcggcatttgttctgatgatctgtctggtattttttgcattcacaacaattctcggatgggattactacagcgagcgctgtctggagtacctgacaaatggccataagaagacaatcctcacttaccgctggctgtatatctttgcagtatttatcggaccgtacatgacagtaagtgcggtatggacgatcgcagatatcttcaacggtctgatggccatcccgaacatgattgctctgtttgcattaagcggtgtcgttgtaaaggagacaaaggacttcttcgcagcgaagaaacacattgaaaaataaaaatacaagagcaggtaaggctccccgtaaagaagattttgcggggagttttttatgtctgcgattcgataactgttcagagctggataaaaggttactgtctttgaacagacaaaaggatacaaaaatcggaatcacacttgtatgaagatgaaagaaacgatataataaaagaatgtagcgtcagaataaaaagagaaaaaacgccaaagcaggcggtacaggaataaaacgggcgaagagccggaggcagaagcgatgcttacaaaaaatgatattatccatttttatgatcgatataagaaaaatctgaaaaaagaagaacaggtcatcgcacggcttctgcaggtgaaggatcaggaggagtggattgataacctgaagaaaaaatcacgggtgatgcgcagcctttatatcgaaaacgaggcgcttctgaatatgtacgtccgtccgtttctggaaaacggggacattttaagcgacgaactggcagaagagttcctgcaccagattattcaggcagatcaggaaggatatatggatgatctggcgatgcgtgaggtcgtagaacagctggagccgtactttgagaaaacggatcatttaaacgactacatctggacgatcaacatgatcggcagcatttacaaccgcagttcaggcgtggagaacggaaaacggagtgcacagtgctatcggaagctgcagaagctgagcagccggtactttgagatcgaggattttgaggtacggaaaaggattctctattcttattataattatccggttgtgctgttcaatttcgggatgatcgggccgaaagggatcctggaagaaatggagcgtgcgattgcgttttatacggatgaacgagtggtagcgcttgatggtggccgctttgattttaagcagatcatggaggagctgaattatgatctgcttggcaactatatgattgcgagtgagcgggacacggtcgatccggagcttctggagcgggcgggaaaagagctcggaagctattaccagagttatctcgatgagggatgtcagccgtatgaggtgccggatgagatttactgtaattaccaccggtatctttttttctccggaaaaatgtcgttcacagagtttgtggaggactataagaggttctgcgattacagcgtggagcatgatacgatggatgaggaggatgctgatttcacggacagccgtttgtttcaggtggcggtcaatcacctgacgaacattatttacagcctgaaatattatgaaaaagagtatgagggtgatccgaatctgggaaaggaatgtatcaatcagtacattcaggtactgcgaagagtgccgcgtgcgggaaacgcagcatttgtcaacgacgtgatgtaccgttcgctgtgcggacttctggaaatgttcgcggacgatgaggaaggctcgaagatcctgacgaatatcctgatgaaccgagatgagattacgctgatccatgcgtccatggtagataaaatttcgcaccggattctggatacggttctgaaaaagaagccggagctgctggtcggtgcacttggctgtacaagcgtgatggaggtgctggagcagccggagaaatttttcaattttatggaagagtctgcaaagctgttcgatatcggaaagcttcagatcgcggagattatcaacaagcagtcgcgccgccttacaagccgtgaaaaaaagcggatttatgaacatccgaaggctggaacaaaagtacttgaaaaaattccgtcgatgcagaaataccgtgatatgatactgggacaccacaagtcctgggatgggaaaatgggttatccgaaggactttgacaactgtgcgagtccggatcggatgctgattgagattcttcggatcagtgactgtctggacgcagcgacggatttcattgggagaagctacggtacggcaaagaattttgcgcagtgtctggaagaattcagccttggaaaaggcacactgtattgtcaggaactgatcgaacttttggagggggatgcggcactgcaggatgaactgacgtatcttctggaggcaggacgtattcgtacgtactatgagattttctggggcatgatggaaccctgcgatgaagaacaggagaaacatctgcaggagcgctggaaacagacggagctggatgaccaggaagaactgcttggcatcctgcacgagagtggacgggaaaaccgcagcgtgatccgggcgctggcacgcaactcgcttttgatcctttctgtcaatatgcgaaacggggactatacggtgacataccgtggaaagagcggtttgtttgcgcatctggagaacggaaggtatgaggattttctgcagaactgtctggcacctgcggcagatgcgtcggactgggagaaagtccgctataagcttcgcctgaaggcgctggcgaaatcgttttcagagcagagcggaagctatgagacggaactgcgtatccgcacggagcacatgatgcgctgggtacgttttcagtttgtccagacagatgagatcaacgtgattccgaaccagatgatcgtgattttacaggatgttcatgacacaagaagcagaagtgagcagctgaagcaggccatgaaggaagcgtacgatacggcagagcatgccaaccgcgcgaaaagcctgtttctgacgagcatgtcgcacgatgtccgtacaccgatgaatggtattatgggaatgacccagattgccagaaagcatctggataataccgcacgtgtgggggactgtctgcggaagatcgaggaatcttcaaaacagctgcttggactgatcaacgaagtactggatatggcgaaaatcgagagcggaagcgcacagctcaaggaagaggcactgtcgcttcctgaactggtcgatgcggtgggagaagtgtgccgcacggatgcagagagaaagcatcagcagtttgaggtgatcgttggcggcatccgccatgggcaggtgctggctgatccggtgaagctgcgccagattttgacgaatctgacagcaaacgcagtgaagtatacgccggacggaggccgggtcgagctgctcgcagagcaggtgtcacttagcaaagaaggatatggcagctatcgctttatcatccgggataatggaatcggcatgtcgaaggaatttcagaaacagttgttccagccattttccagagaggacaacagcatgacgaatgtcacgcagggaaccggtcttggactttctattgtaaaatcagtgattgatatgatgggaggaagcattgaggtgcagagtgtacaggggcagggaagtacctttacggtgctgctgcagtttgcacttacacaggagagggcaggagaaatcgagacagaagaggaagtccgctttgacggacacagaatcctgctggcagaggataatgagctgaatcgtgagattgcctgtgaactgctctcagagatcggactggtggtggaaacagcgcagaacggacaggaagcaattgaaagcattgtgcgtcggccggactattattatgagcttgtatttatggatattcagatgccggtgttaaacggttatgaggcaacaagaaaaatccgaaatgcggggaaacggtataccgatcagcttccgatcattgcaatgacggcaaatgtctttcagaatgacattctggaagcgatcgagagcggcatgaacgaccatgtgacgaagccgatcgacatgaaggtgctaagtgatttactgcgcaggtggcttccggagaagggaaacgtcggacacagggaagcagctgtttaaccggggcagaaaaacagctggagagagctgcggctgcagaatgatcttacgcttggggatctggcatcgcgcagtgagcttaccaagggatttctgtcgcaggtggaacggaatctgaccatgccggagttttttgtagatgagcaggcagcaaagcggactatgaagttctgctgaccagggttacggaaggagaaaaggaagatgaaagaaaagaaactgatcgagtttcggaatattgtcaaaagttttgacggccagattgtattaaagggtgtcaatctggacatcaacgagaaggaatttgtgacgctgctcggaccgagcggctgcggcaagacgacgcttcttcggattcttggaggattcctggatgcggacgagggacaggtaatttttgacggggaagagatcagcaaaaagccgccgtatgagcgcgagctgaacacggtttttcagaaatatgcacttttcccgcatctgaatgtgtatgaaaatatcgcttttggattgaaaattaaaaaaatgagtaaagacatcattgaccagaaggtcatgaagatgctcaagctgatcggtctggaaggatttgaaaagaaaaatacgacgctgctttccggcggccagcagcagagagtggcgatcgcacgcgcactggtaaatgagccgaaggtactgctgctcgatgagccgctggcggcgcttgacctgaagctgcgaaaagagatgcagtacgagctgaagcggatccagcaggaggtcggtatcacgtttatttttgtcacacacgatcaggaagaggcgctgacgatgtcagataagattgtggtcatgaagggcggcgagattcagcagatcggtacaccggaggagatttataatgaaccggcgaaccgctatgtggcaaactttatcggagagagcaatattatcccgggcgttatgccggaggattataaagtacggttcgatgacattacgtttgactgtgtagattttggatttaagccaaatgagccggtggatgttgtcatccgtccggaggacatcgatatcgtgaagccggaagatggaaagatgaccggagaggtgctcagcgtgctctttaagggcgtgcactacgagatcatggtcgagacggtacctggtacgagcgtcacggtaaatatgagcgtagtcaagaaccaggatgtgaccggagacggcggaaaagagaaaatgagtgccggaaacttttacgtggatatcgaggatgtgccggtacttgatgataaggaagtcatcgcacgtgcgaatgcgcaggcatggaatccggagacggacgattatatttccattgcaaagatcgagtatgatatcagaccggaagtcggcgagtatccggtgcgtttctcgactgccgcaggcacggtgatcgagcggaagatttttgtcgtgaaccagccatttgtaaagaacgagaaggccaacgagggtgtcatggcattcagcttcacgaagactgtcgatgagatcaaagagtcgcaggcgctcgacactgacctgaagacctgggcaaatgcgcagggctggaagctgagtgacgaggagcagagcgtggacatttacgtggattatgattttgaaccggaaaatatcaaagagggcgtttatcagattatattctccacagagggacgcgaattcaagatccacacaaccgattactcagaggtgggtgcggaggtcggcctgaccttcttcccggaagatcttcacgttatgtcaaggatggtgtactaaatgaaacgattttcacagcttgcagtgccctacattgcatgggccgtgatgatgctgattctgccgatggggctgattgcgctctattcggtaacggagcagggaaacagcattatctcctttacctttactctggagcattatgcaaaatttttcacggatccggattttctgatcgttttgtggcgctctcttctgatcgcactgaaaacgacggtgatctgtctgctgcttggctatccgatcgcctatttcatctcaagaagcagcgaaaaaatacagaatctgcttgtgctcgtcatcacgatcccgatgtggatcaacatgctggtgcgtacgtatgcgtggattggactgctcagtgagggaggtctgatccagcggcttctttccctcataggccttggcggcggggagctgctttatacggagggagcagtgctgcttggcatggtgtacaatttcctgccgtttatggtgctgcagatcaatacgtcactttgcaagatggatcattccctgctggaggcaagctccgatctgggagcaaatccgcgccagacctttgtcagggtgacgcttccgatgtcactgccgggtgtcatcaacggcattacgctcgtctttctgccggcagtcagctcgttctttattccgaagctgctcggcggcggccagtatttcctgatcggcaacctgatcgagaatcagttcattacggtaggcgagtggaacttcggaagtgcaatctcgatgatcatggcagttatcatgatgcttctgatgatggctgtgcgcagagtagagatccgcaacaacggcggaaaggaggagtagaccggtgaaaaaagaaaaaaggacctttggaacgattctgatggcgcttgtgattgtgtttttttaccttccgatcgtgtatatggtcatcttttccttcaattcaggaaaatcactgaccagctttaccggtttttccctgcgctggtataaacatatgatggaatcgcacacgatgatggaatccctgtccacgacattcagcattgcgctgatcgcgacagcagtttccacgatcgtcggaacaatctctgcgatcggcctttccaaatcaaaaaagattatccagaggctgatggagcaggtcaacaatctgccgatgatgaacccggagattgtgacggcaatcggcttcatgctgctgttcatcacattccgggtggaaaaaggttacgtgacgatgctgcttgcacatatcgcattctgtattccgtacgttatgctctcggtcatgccgaagatccgctctctggatccgaaccttgcggatgcggcgatggatctcggtgcgacaccgtggcgtgcgctgacaaaggtcattgtgccgcagatcatgccgggcatcgtttccggtgcgctgatcgcatttacgatgtcagtcgatgatttcattatttcctatttcgtgaccggcggcggtgtgaagaacctgagcatcaccgtctacacgatgagcaagcgtgtcaatccgagtatcaatgcgatctcgacactggtggttgtgatcatcacactggtgctgcttctgatcaacgtggcgccgcttgtgatggcaaaacgggaaaagaagactgagatcagccggaaaaagcagattgttccaattgcagcggcagttgtggcggtggctgcaatcgttctgatagtgcgtcttggtaaaaaagattctgtccttccgtatgccgggcagacactgcacgtttacaactggggtgagtataccggtgaaaatatcctgcgggagttcgaggaaaagaccggcgcaaaggttgtgatggaaaactttgattcgaatgagcagatgtacatcaaagttgcaaacggcgaatcctatgatattctggttccaagtgattatatgatccagaggcttattcaggagggatatctgcagaagctggatcacagcaagctggactgccttgacaagctgtgtgaggatgtcgtgggactgccgtacgatcctggaaatgaatattcaatcccgtatttctggggaagtgtcggcattgtatatgacaaaacgaaggttgatctggaggatctggagcgggaaggctttgacattttcaaagaccagaaatacaaaggccagatctatctgtatgattcagaacgggattcctttatgatggcattaaaagcgcttggctattccatgaatacggagaatgagggcgagctgcaggcagcctacgagtggcttgtggaatgtgtacagacaatggatccggagatcgtgacagatgagatcatcgacaatatggcacagggacgtaaggcgctcgggctgatctattccggtgatgcgacgtacgtcatgtcagaaaatgaggacatgggttactatctgccggagagcggaacgaatctgtggtcagatgccatggtaattccggcaaatgcaaagaatccggaccttgcacatgagtttattaattttgcaagcgattacgagggtgcgtatgataactcaagctttgttggctatagctcggcaaaccaggaggtaatggatacgctttccggcgaaggtggagattacgagggcatcaatgcctatgtgccgcgctccggaaatccaaacgatgaagtattcgaatacaacgaaaatacgagaaagctgatcgcgaacctgtggagcaaggtgaagatcgcggcgagcaacgcgagctgagatatgtcggcagaggaaattttaaccgagtcaagcaagtcccctgcgtggttgcgcggagcaagtagcgaagcggattgcgaatgtccgttttacatacgagctgcagcagtcaaggagatttttgtgatagaaaagaacagccagaacattactgaagggttggtaatgttttgaccggaaaaaggaggatgtatgataaaaaatattatcttcgatatcggaaatgtactggcgagctttcgccccagggaagttctggaagagatgggactggatgaaacagaagtaaatgtgattctcgacgcgacggtgcgtggcccgtactgggtcgagctggaccgcggtgtgatggaggaagcagaggtgatcgaggcgatgcgcagccgcgtgccgcagcgttatctggctgattttgaacgcttcttcgcagaagaaacggggaagcttgtaaagtcacttccgtatgcggcggactggctgaaggggttaaaagagcggggataccacgtgtatctgctctcaaactacccggttggactgttcgagatccacagtccgcatttcactttcctgccatacacagacgggagagtcgtttccggctatgtcaaatgcgtgaagccggatgagcggatctaccgctgccttctggaaaaatacagcttaaggccgcaggaatgcgtcttccttgacgatctggcggaaaacgtggagggggcaaaaaagcttggaatccacgggatttgcttcctgggatatgaggatgcgaacgcgaagctggaacgtatgctggcagagacagaataaaagtatccgaaggcaaaaagggcgtcggttccatttagaaaagtggaaccgacgcccttcttatctgttatcctgtgttgattttaatcttctttcttttccgggagatccagcttgatgtgtacatctgagagctgtttcggatcaacagctgacggtgcgcccatcatgacatcctgtgctgtcttgttcatcgggaacgggataatctcacggatgctgtcctcaccggcaagcagcatgaccatacggtctacgccaggagcgatacctgcgtgtggcggagcaccgtagcagaatgcgttgtacatagccgggaattttgctttcacatcgtcctcaccaaggccaacaagcttgaatgccttgaccatgatctccggatcgtggttgcggactgcaccggaggagagctctacgccgttgcagaccagatcgtactgatatgcatagatatcgagcggatccttgttctcaagtgcatcaagaccgccctgcggcatggagaacgggttgtggcagaattccagctcgccggactcctcaccgatctcatacatcgggaagtctacgatccagcagaattcatagcagtcggtcttcatatggccttctgcagcagcgccgaggtatttgcggagcactccggctgtcttctgggcagcctgctttttgcctgcgcatacgccgacgaaatcgccgtttttcagtccgagtgcttccttgactgcatctgcgcgttcctgaaggaactttgcgatgccgccggtcagagcgccgttttcatcgaccttgaaccagtaagccttgttgccggactgaacttcgatgtcagccatcatcttgtcgatgacttttcttgtgcccttgaagccgtctgccttgactgcctttacgacagcgccctcaaacggtccgaatccgcagtctgccatgcatgcagttgcgtcctgaacggtgaggtcgatgcgcagatccggcttgtccgtaccgtagatctccatcgcgtcattgtaggagatgcggcggaacggagcgcgggatgcggttttgtaggtgccgaatttttcaaataccggcggaagtacgtcctcaaggactgcgaagacatcttcctgggaagcgaatgccatctccatatcgagctgatagaactctcccggagaacggtcagcacgtgcatcctcatcgcggaagcacggtgcgatctggaaataacggtcaaaaccggaggtcatcagcagctgcttgaactgctgcggagcctgcggcagcgcataaaacttgcccggatgatttctggacggaacaagatagtctcttgcaccctccggagaggaacaggtcaggatcggagtcgtgatctccaggaatccgtgctccatcatgctgcggcgcagctctgcgacaacgttgcagcgaagaacgattttctccttgactgccgggttgcgtagatccagataacggtatttcagacgtgcattttcgtctgcttccttggaacggttgatctcaaacggaagctcattgtagatacatttgccgagtacggtaatctttgtcggcacaacctcaatctcgccggtcggcagattcgggtttttgctggagcgctcacggactacaccggaaacggagattgtggattccgtattgacaccggcaatctgctccatcatttcctcggtctcgatgacgatctgtgtggttccgtagaaatcacgcagaatcaaaaagccgagattcttgcttactcttcgtaaattttcataccagccggcgagtgttacttctttgcctgcatcgcaaagacgaagctcaccgcaggtgtgtgttcttgactgtgtcatggtataccatcctttgctttagcttttctcaagtatctcattatactctgcataggagctttttgcaaccaaaagacggtcagacgctctcaaattcttcgacgatttcgcgggatggagccggtgtgagcaggctgaatacgatgatcgcaaggcaggagcacagaaatgccggaagcagttcgtaaatcgagaggattccgcccatcggagcaatgaggtatttccagacgaagaccataacgccgccggtcagcataccggcaagcgcaccggcgcggttcgtccgtttccagaaaagagagaacaggacgatcggtccgaagcttgcaccaaatcctgcccaggcaaaggagacgatcttgaaaacagaggaatccgggtcgcgtgcaaggaaaacaccgaccactgcgattccgatgacggtgaggcgggccagaagcatggatgctttctgagacagctttacgccgaagcagtcaccgatgaggttgtgggaaacgctggaagccgctgcaagcagctgggagtccgcagttgacatcgtgcaggcaaggattccggagagaatcaggccggccatgacgacagcaaggacaccgtgattggagagcagcagcgctgctttaatgatcagtgtttctgattccgaggaaccatttaagacagagatgacacccgcttttgacatgctgtaaccgataataccgataaaaatagcgacaaacatggaaatgaccacccataccgtagcgattcttctggaaaacttcagcttgttttcattttcaatccccataaaacgaagcagcacatgcggcataccgaaatatccaagcccccaggccagcgtggatgcgattgtcagtgcactgtgcggaacggctgtgccggtagctgcgtcgtgtgtggaaaacatgctcatgtagcctgcaaggctttcggcgtttgtaagaaccatgtccagtccgcctgcctggctgatgccgaagaagacaacgatcagaagtgccagtgtcatgacaatactctggacaaggtcggttgtgcttgcggcgagaaagccgccgagtgcggtgtaggcaacgatgatcacggcactgaaaagcatggccgggatgtacggaatatcaaagagagtggaaaagagctttccgcaggctgcgaagccggatgcggtgtacggaacgaaaaagatcacgatcaggattgcggagatcgccatcagcacgtggctcttatcgcggtagcggttggagaaaaattccggcagtgtgatcgcgtttccggccttcacagtatagcggcgcagccttttggcaacgatcagccagttcaggtaggtgccgattgccagaccgattgcggtccatccggcatctgcgattccggagagataagccacaccaggcagccccatcagaagccagctgctcatgtcagaagcttcggcgctcattgcggtgacgatcggtccgagcttgcggccgcctaagaaaaagtcgccgacatcatttgtctttttggaacagtagtatccgatcacgatcataaaaatcagataagcgacgatcacgaccagaattccggtaatagaagcgttcataaattttttcctcctcctgtatgaaatgtactcttggagtctttcctgtatttattgttggatcgagtttctgtcagccgcatcacgatttcatcatcatacacactgtgtacgtctcagaaattcgggtacagctgaaaaaaaacaggcacagaaagatcgcaggagcacatctgacggctgttatactgccgcatttccgcgagtatagcacgaaaaaaaacagactacaatacagaacaaagttcatacttaaaatagaataaaaaataaatgaagcctgaaaatatagaaaataaaagaaaaaaacaacaggaagaaaaatagactaaaagaaatactaatataaaaaattaaagaaatttttctgcccggatcttcgagaggaagagcggcatcatacggtcgccgtagctgcgaagggaatattccccgccgcagatgcaccagtcgtagagcagagcacgctcggagatcgcgtacagtttgacgaggtcattgaccgtaaaatccgtgcggaattcaccgctttcctgcccggcaaggcagatgcgccgcagaagccggtaataaaaacggctgcggtcaagcaggtgacgctcgccgcgtgtgatgagctgggtggagagcaggcgggagagcagatcgatcgcgattgtattttcgatcatggtgaacagttcctgattcagaaagataagctgttcaaagtatgtctcgaaacgcgcaagctgtggctccagttcctcgtatttttcatcaaagaggaaggagagcgattcgaggagtgcgtcttttccatcgaaatagtgataaaaagaacctttcgaagtgccggattcgaggatgatctcttccagcgtcgtctcttcatagccctgttcataaaagagtttccaggcggcggcgatgattttgcttttggtgttgcgcggctttttcttactcattatgggaaaatcctttctataaaataataacaggtatgttattgggttaacattgtctggcagatgttggaaaaaccaaagcggattcataagtataacggaaggagcggaaaaacgggatccgacttgcataaaacgccgaaaatggatataattcaaaaagctgtaaagcgggaatgtaaagcggacattcgcagtccgcttagtactttgcgcacttgaagcgggggaatgcttatctgcgttcaaagaccagcacacgtttcagggtaaaatcagcagcagaatcagtgtaatcgaaaaagtggaaaatgaaaacaggaaattacgaaaaaatatggaaatgtccggtttgacacacgctacagggaaacacaggacgggaggcagagcaggtggaaagatgggaaaaccagcgggatgcacagcaggagcgcatgacagaggaagaacggaggcggagcaggcgtgcacttcgcagaaaacgggagcagcaaaggcggagaagactgatcgcggcagcagtggtggcagtgcttgtgcttggaggcggcgcagtggggattgtgcattctatattgcgtgacgcacagacggtgaatgtcgggtctttggcagacagcggacaggccggaagcgatgggagaattacggaaaggctgcaggaaaacggagcaggaaatggaactgattccgcagcagatgagagcagtacagaagccgggacggatatgagcagaacggacggtgcggatgacgatgaaagcggaaacagtaccggtgaagcagcggatacggatcaggacattacattttccgagaccgcgcagctggatacactgaacagcccgtatgcgatcctgatggatgcttcaacaggagaagtcctcgcagagcagaatgcggacacgcagatgtatccggcatccatgacgaagattctgacggcagtcaccgcaatggagagcgtgaacagcctggatgaaatacttacaatgccatatgagatttatgctacgctgtatgaggaaggagcgtcgatggcggggtttgaggccggggagcaggcaagcgtccggcagcttctttacggtgtgattctgccatccggcgcggagtgctgcattgcactggcggatttgattgacgggtcggagagcgcatttgtgcagcgaatgaatgaaaaggcacaggcgcttggcatgagcagcacacattttgtgacgtgtaccggactgcatgatgcgcagcattactctaccgtcagagatatcgcagtgcttctgcagtatgcactgcaaagcagcgacttccgggaaatctttacagcgcacagctacagtgtggcaccgaccgcacagcacccggagggatttacattttatagcacgatgttccagagcctcggagacgcgtccgtgaccggaggtgagatcctcggcggaaagaccggttatacggaggaggcagggctctgtctggcaagtcttgcacaggtaaacggaagagagtacattctcgtaaccgcaggcgcaccgggtagccatgataccgagccgctgcatacgatcgatgcgaaggcggtatacaaccggatcggggaagcgacaaataatgaataggaatgataaagaataattggaaaagtgatgggagaaatacaggaaacggctgagatcagggcggaacaaaattatcagaaattcagaacgacgaagcaggaaacgctgcggcttcaggctgcgcttgccggattttttgaggaagagaaagcgggaatcacagcggagcgaaaaggagagtatgcagcttatctgaaaaaacggattcgccctgcgctgcaggcacttttgaaggaaaacaggatcaatgaaatggaaaaactgcagaaactgggctggtttggcgctgaaattctggaggagctgatcgtgaaggcacaggaggaagggcggctttcggcggtgatccggctgatgcgtgtaaaagcagaaaagtatggatataaggatcgagattttgagatttgaccgagtcaagcaagtcccctgattcaattgcgcggagcactaagcggctgcgttcatgagcaagtagcgaagcggattgcgaatgtccgctttacagaaagagtggaaatggaagaaaaaaagagcgaatacagcataaaaaaaagcgaacacagcataaaaaagacagcggtttcatcgaaagaacatctcggactgcgtatcctgaactactgccgcagcgagctgtatgcacagtatccgcagatggatcttgcatttgcggcactttcgatggaaccttccagacgggcagagacggctgggacagatggcagcagcctctttttttcgtcgcaatttctgatcgaagcgtacgcagagagtccacagaaggttttgcgcggttattttcaccttctgttgcattgcatgtattttcatctgcaaaaaccgcagcagtatgagggacggctgtggaatctggcgtgcgatattactgtggagcagattgtggagcgggaaatgaaaaaatggggaaatagctgccactttaacagcgggagcggagaacggcaggaatcaggcgagaaacatttagcctggaaatgcgagaaaacaaaaagtccaattgaagaaaaaagcagtcaggtggcgaagggaaatcagcaaaggaatgaaaaatgcagtttaaacaaggaaaaggatcaccaaagtataaaaaaagaccccaatttaagatggtcgcaggcagaaaaaatgaaagagatagaagaaattcgccgcgatgtatggcagcagcttaaagggcgtgcggcatccgcggagtcagtttatgaatcactgcaaaacggcgtgtttccatactcacccgggcagatggaggcggctttttgttttgatgatcacagtctgtggaaggttccgaaagaacagcaggcggaagttcgcagaaaatgggaaaaaatccggaaagaatccgggagcggaggcagccgcacaggcggtacatcgacaggcagcgggagcggaagctttcaggagacgctggaaattacgaaaaagagcaggggagattaccggaagttcctgcgtcagtttgcggtgctgcgtgaagaactcaagctggatcagtcgggctttgactatatttattacagctatgggatggaacattacggcaatattccactgattgagccgctggaatacagcgaggtgaatcggctggaggaacttgtgattgcgattgatacgtccggctcgtgcacctcggagatggtggagcagtttctggcggagacgtatgcgattctgtcggaaaaagagaatttttttgaaaagatgaatgtttacctgattcagtgtgattgctgcattcagaatgtaacgcatattacatcgcgcagtgactgggagatgtgcggaaaatacgtggagatacaagggcgcggcggcacggatttccggccggtatttgggtatatagaaaagctgaagcagaaacgggcgcttaaaaatctgagagcactgatttattttacagatggagacggcatttacccggagcagcggccggagtatgagacagcatttgtttcacttggaaaaagcaaacggcagatttatacgccggactgggtgcaaaggatgtacatctgaccaggctggctgagaatatccattttgacggaacaaggaggcggaaaaaacaggttatgaatatacaggatgcaaaagatgagattatccatacgctgcaggcgtatcacagaaaagacgcgacgggaaattattgttttccggtgacgagacaacggccgattctgctgatgggacctccgggaatcggaaagacggccatcatggaacagattgcggcgcagtgcggcgtcgggcttgttgcttacacgatcacgcatcatacaagacagagcgcagtcggtctgccgaagattgtgacgagaacgtatgacggacaggaagtaagtgtgacggaatataccttaagcgagatcattgcatcggtgtacgactgcatggagcgaaccgggaaaagagagggtatcctttttatcgatgagatcaactgcgcctccgagacgcttgcaccgacgatgctgcagtttctgcagaataaaaaattcggaagtcatacggtgccggacggatggatgatcgtcgcagcgggaaatccaccggaatacaataaatcggtccgggagtttgacatcgtgacgcttgaccgtgtgcgccgactggatctggagccggatctggaagcgtggatggcatacgcctgggagcaggaggtgcacggagcaatcctttcctatctgaatctgaaaaaggatcatttttatcagatccatgcggacggagaggaaaagcagttcgtgacggcacgcggctgggaggatctctcggaaatattgaaaaattatgaggcgattggcgtgccgtgtgggtcggggctgatgggccagtatctgcaggagccggatacggcgcgcgaatttgccgcttattatcagctgtatcagaaatatggagcggattatggaatccgggaaattctggatggcgtgatttctccggaaaaagaaaatgcagcactttatgagcagaaagtgaaaatggcagggaatgcaggcttcgaggagcggtgtaccgtaattcatttgctgctcgatggactggcggagacctttaccttgttttcctggctggatgaccgggcagtaaaaacacaggagacgttaaagcagctgaaaaaagagctggaacgggagaagaatatcgaatatctggaagaatttgtgggaaagaaacgccagcagcttcgtatgaaggaacagatggagcttggtacaaaacgggaactgcatttggaacgggaagttttgcagctgcttgaaacgtatcaaaaccaggtaaagcttatgcatcttagaacaaaagaagagggaatggagtgtatttcgcagctttttaaagagacagtgagtcagagaatggatgtacttgaacaaggaaaacagcagctgacaaatgcatttcgttttgtggcagcgtgcttcggggaggatcaggagataatccttctggtgtctggacttacaaaaaacagacgggcaatggattttatccgggtacacggatgcccggaatatttgaagttcagtgaggtattagtgccggaggacgcagatgcgctgcaaaaagcgtgtctggattccttatgattcgtcaaatcattgccgcatggaagagaatatgataaactgatccagaaaagcaaatcaagccgtgaaacataaaaaaaagaggaagaaattcaatgaatattatcaacatcgaacatatcagcaaaatttttggggacaaagttatttttcaggatgcttcctgtggaattcaggagggagacaagattggaattatcggaatcaacgggaccggaaaaaccacatttttaaatattctggcaggaaaagaggagacagacgaaggaagtgttgtgcgtcagaatgggattcgtcttgcttatctgacccagcatccagagtatgcaaaagaagatacggtattttcctttgcatgtaaagatacggatgaatcggactggcaggcgatgagtgaggtaaagagcattttaaaccgcctcggttttacggattatgaggagaagatggagcatctttccggaggacagaagaagaaagcagcgcttgcaaggacgcttgccgggaattttgacgttcttttgcttgacgagccgacaaaccatttggatgaggcgatgctgcagtggctggaggattatctgaaccgttttaagggaaccgtgatcatggtaacgcatgaccggtactttctggatcgcgtcagcaacaggattctggaaatttcacatggaagtatttacagctatgaggcaaattattcgaaatttctggagctgaaagcgcagcgtgaggagatggagcttgccagtgaacggaagcgccagagtattttacggattgaaatggaatgggcgaaacgtggctgtcgtgcacgaaccacgaagcagcgggccagactggaccgtctggaggcgctgaaaaatggaagtgctccggtatccgatgcagtggcagagctggacagcgtggagacccgtatggggaaaaagacggtggagctgcatcatgtgacgaaagggtatggagagaaaaagctgattgaagatttcaattatattctcctgaaaaaccagtgtcttggcatcattggaccgaacggctgcggaaaatcaacgcttttaaagctgatggcaggaaaaattcagccggatgcaggtgaggtagagatcggagaaacgatcagaatgggctattttgcgcaggatgtgccggatatggacagcaatcagcgtgtcatcgattatatccgtgatattgctgagtatgtgcccacgcgcgatggaaaaattacggcgtcgcagatgctggaacgttttttgtttacaccggatatgcagtatgcaccggtatcaaggctgtcaggcggcgagaaaaagcggctgcatctgctcagcattttgatgcaggcgccgaactttctggcactcgacgaggtgacgaatgatattgatattccgacgatggcgattctggaggattacctgacctcattttccgggattatcgtggcagtatcgcacgaccgttattttctggataacatagcagatcgtatttttgcatttgatgcagatggacatcttcggcagtacgagggcggatataccgattatctggagacaaaaaaagcaagagaagcggtaaaaatggaggtttcggaaaatgcagacggcctggcaaagcaaggcatgagctcaaaatccggagatacggtcggagcagccacagatacacagacgaatgcgtccaggtccaccacaaaagactggaaacagaatcgtccggtcaagctgaaatttacgtacaaagaacagcgcgagtatgagacgattgatgatgagatcgcaaagctggaagcaaaagtcagtgcactggatgcggacatccttgccaatgcgacaaattccggaaaactgaatgagctgacgaaagaaaaagcgtaggccgaacaggagctggaggagaagatggatcgctgggtatacctgaatgatctggcggagaaaatcgcagcgcagaaataaataaaaaaaattaaaaaagtagttgacaatctcaaaaaactattatatactcttattgttgcttgagagaaaagaaaagcaatttaataagagatgcgggtgtagttcaatggtagaacatcagccttccaagctgaatacgtgggttcgattcccatcacccgcttttttcatgcccaaaaagagaagagggcggaagcagcttaaaaataatataaatcggggtaactgttcagagccaatctccaaaatgctacgcatttcgtcggtgtggcgtatccgccaaataaaatttcaaaaacaggcttaaaaatgcaagcattttccgccttttttatgaaattttgcttggctctgaacagttacaaatcgggaaaatataaaaaaataagaataagaataagaaagagaagttccggattcacaatcgtatgaatcagagaacttctctttttggtttaactgagtcgagcaagtcccctgcttcaattgagcgaagcaatacgtagtgggtaggaacttgcttttatcataagataaactgactcatgataaagattaggaacaagcatcaaaagcgaacttcgaatgcctgtttgtatccgttactgtgcagcctccgtctcgctttctgtttccgtggctgcaaggctgctctcgtccagaatatccttcagctcgttgatcatttcctcgtccttcaggcggaaccgcacttccactcgccttgaggcatccatgtcgacttcgccgtctgtgtagacaggattgctcatagagtgaccgttggaggtcagcttttccttgaggcttgaaagctcgtcggcggtcagatagctgtcggcatttgcgaagagataatctgctaccgcgagcgcacgggcctgtgagagctgcaggttgtagagataatcaccgctcgtgtcagtgtagccgtcaatgctgagctcagcaaggtaatcctgatactgcgattccatcaggactttacaatagagcggaaggacttcgccgagcatctgaataccctcgtcggtcagttcgctctcattgtagctgaagagaacattggagtcgagggcgatcgagccggttgcctcatcgatgacgacgtttagattgtgctcgtcaaactgttttttcagcgcagcgatcaggtcagctttgacaccgatgatctgttcaatctttttctgctgctcggccatcagcgtttcctgttcctcgagagccgcctgttgagactgcatcagcgcgtttttttcgtcaagttctttttgctggctggcaacgagcgtttcctgggcatccagatccttttgctgggagaggacgagtgcactcttttcatcgagttcatcctgctggctggcaacgagtgcagtctgtttgtccagatcggcctgctggctggcaatgagggcgcgctgctcgtcgagagctgcctgtttggcattcagctcactttcccgctgctgcagttcaagctgtagctggctctgggtctgctgatgggcagcctcttcctgtagtttttcctgataatttttttgtgcctccataaaagaaatgcacatgacgaggacaaacagaagcagaagcccggccatcatatcggaataagagcgccagatgttgtggcgttcataatttcttttgcgttttgaatacatggaacatcatcctttctggatagaaccggatcaggcaatggccggcttatttcttccggcggcggaacagcaccggctgatccatttttctggaaagctcatccagctttgtaagcgtgcgctccagcatttcctgcgtctgatcagaggaatcatcctgtggggaaacaaagagctgctcatgctggattttctgcagctgttcggaaatttttgcaagctgcaggcgcatctcggcagaggactgaaccggtcccattttcgcgatctgatcggagtagcccttgatctcctcactgtttttctcccagatttcggagaatttttcgatcgtctggtacatgaaacggatgtaatcctggtaagcttctttctgttcctgattgatacgggaagcaccggtctgcgcttctgcgagcttttcgacggattctgtgaggtaattctgtgtctgcgtcatggaatcctgcagggaagcgagcgttttctgaatgcgcaggatcgtgcggtccatgaaatcggtgtagctggcctgtgtctttgtgagctcctcgacggtctttgagatctggttgaaatcagagagcagttcggtacgcatctgacgggtaacggtgttgcagacattggtgagcagctcttcctgactgccggtaaaggtatctgccacctgctggaagccctcggtcatccgggcaaaggccggtgtgatcgcctgctcaaagctggctgccatctgctcaacgaaaataccggtcaggtcatgcactatatcctcctgcgatttcttctgagagagcagtctgccaagtgagtcgacctcatagggcggctgcacgtgaaggtaataggtatccagaaattcttccacgcgtgcggacaggttggagaattcgctgcgcaggttgaaagaaaaggagagtgatagtgcgatgccgtagatggaggtgatgaaagccaccttgataccgttgatcagaggggtgacggaaccggccatctgttcataaccggacggatcgaactcacgcagtcccatgacaaggccgacgaaagtaccgagaataccgagactcgtcaggatgtcggggatattttccaggatgccgcggtgtacatacgtctcgatcgcatcctcattgataaaactgcggatatcgcagacactggatgggttctgagcggccatggagcggtactgatgaaagcagtcgtcaagaaacgcgttctgaaaaagcggagcggacggatcgtcccaggacgccgcatctttggatgcggtctgccggattttgtcggaggcacgtttcagggcgcacgtcgtctgaatcaggcggcgcaggccggaaaagcaggccgttgcggtcatgagcagcatgatgccgagaaagacgaggttgaaaagtatcgtggtgaagtctgcctcacggctgatgtaggtgatgaatacgcacacgccgacggacagagctgcaccgaggatcgagatggttcttcgcagatacaagatgattccccctttgtcaaagtttcgttccggagcgtgttcaaacgcaggccgcaaagtggcttgtgaatgtccgctttataaatcattgccgcaatcctgcacaaagtatttttcagacacgctcaaaaaaacgccatatttatcctcattataaaaaaagaagacccgctagtaaagtgattctgaaaaatattaagaaaaaaggtggagaaagatttcgaaaacacagcagatgctgcttggcggcggaagtttaaatggtgttcgcgtgatgaaccaggcaacggtggattattttacggacggcggcctgaccccggatcagcagaaatcataccgggcgtgggtcggactggaaggattcacgtattctcatctgatgcgcatcctgaaagaaatataaatcaaaacgaaaagaaagcatacagcccgataagaagccgtatgctttcttttttaaaattattattcagacggatcaaatgcatcgttttactgctgtaaagctttgcggcagatccgaaaggcgcgattaatgctcgatctgtgcaatgatgcctttgaggagatctgcgcttgcgcgaagtttttctacttcctcatcagtcagctgtaccggaagtttgcatcttacaccgtccggcccgatcatggtcagagtactgatgcagacatcctcaatgccgtactcgccgtgcattaaagtggagacagttgctacggaatcgcttgatgcagtcagcagggaaacgagctggcagacagaagcggatactgcgtagaaagtagctcctttgcgcttgatgacttctccaccggaagtatgcacatactcaaccatcgcatccttgtcgatcggagtgtagtctacggtatcttttaccagttccggataattgtcgatagaggttccggccacgtcagcgatggaccatggaacgaaagagctgtcaccgtgctcaccgtatacgtaagcatggatgttcttctgagcaatcttgcagtgctcggagagaccgtaacgaaggcgtgcggtgtcaaggatcgtaccggaaccgatgatctgcttctccgggataccggaaatctttgtgaagacataggtcatgatatcaaccgggttgcttacgatcacatattttgcattcggagcaacagcagtgatctgcggtgtgatctgcttaaggatgtttacgtttgtctgggtcagctcgattctggtctggccaggcttgcgggcaattcctgaagtaatgatgacgatatcggaatcctttgcgtcagcgtaatcaccggcaacgatcgataccggattgcggaagaatgtaccctgagcgatatccataacctcgccaagtaccttttccttgttgatgtcgatcagcacgatctctgatgcgctgtcattgtccattgcaagtgtgtaagcaatcgtagaaccaacacttccggctccgatgatagtaatttttgtactcatgtgtttctcctttgaaatgatccctgctgtactgccggggttcctgagctttctgtctttaccaagaaagcagagctttggaacgaacggcgctccgttacagaaagttcttgattgataggaaaggctgtatacagacggggtaaaacaccatccgctctgtaacgccaaaaatattataagagatagataattttttgtcaatcgcttttcttgtaaaaatgcatttataaacaaaatcctaacattgcctgaaaacagataaaaaacagcgtgttccgggcaaaataaggaattttctcaatagcgggagtgagacggtgaaaacaggatttttcaggaaagagtacgcaaatacgtggaattcaacggaaaaaagcgaatgatgagaaaaaagtttggcaattatttaacggataaataaaaaacgagaaaaagcaagaaaaagagagaaacggaaataaaatcaggagaaaagaaacgggcatggaacaggaacaaggcggttgacaaacatcgagggaaatagtaaactacatgcgtaatttaggaaaaagaaaaatctgaataaactcaggaaataaaaaataattatgcagaaaaaaggcgacaaagtttttgatctgcataaggaaaagagaaaaagcatgatcagacaattatcggtatttgttgaaaataaaccaggcagttttttaagagtcacaaaagcgcttcatgaacgcggtatcgcgcttcagggtttctgttcggtagattcaccggagttcggaatccttcggatcgtggtagaccgtccggaagaagcacagcggctgctcgatgaggaaggcttcatggcaaaatgttatgatgttattgcggttgagatcggtgagcaggatacgatcgatgcacttctgaaagcctgctgtgagagcaacatcagtgtcaactatatgtattccgcattcggcgacggatgtagccattccgtagcgattctgtattcggaatatctggacgagacagaagagatgctcagaggaaagggatttaattgtttaaataaacttgcctgaaaaaacgcggttatccgctttgatttccggcggcaacagtaagaacaatcgatagcagggcgcagtgcgctttctataaaaggtatccattatttttcatgctgctgcggggcgagaggctgacgcagacagggaaaacaaattcaaggaggaacaaactgtggattacgcaaaagaatcactgagacttcactatgagtggaaaggaaaactggaggtaactgcaagagcggcagtagataataaagaggcactgtctctggcttatacgccgggtgttgcacagccgtgtctggagatccagaaggatgtaaacaagagctatgagttgacacgccgctggaatacggttgcggttgtaacggacggaactgcagtgcttggtcttggcgatatcggaccggaggcaggtatgccggtaatggaaggaaaatgtgttcttttcaaagagttcggcggcgtagatgcgattccgctttgcgtacgcagcaaaaatgtagatgatatcgtaaatacagtagctctgctcgcaggaagcttcggtggagtaaacctggaggatatcagtgcaccgagatgcttcgagatcgagaagaagctgaaagagcgttgcgatatcccgatcttccatgatgatcagcacggtactgcagtgatcacactggcaggactgatcaacgcgctgaaattcgtaggaaaagatattcatgacatcaagatcgtaacaagcggtgcaggtgcagcaggtattgcgatcatcaaactgctcatgagcatgggccttaagaacgttatcatgactgaccgtaccggtgcgatctacaagggacgcgagggactcaacccgatcaaggaagaaatggcagagattacaaatgcaaactgcgagaagggtaccctggcagaagtgattaagggtgcagacgtatttatcggtgtatcagcaccgggcacactgaccaaagagatggtacagacgatggcaaaggatgcgatcatctttgcatgcgcaaacccgacaccggaaatcttcccggatgaggctaaggcgggcggagcagcagtcgtatcgacaggccgcagtgatttcccgaaccaggtaaacaacgtgctcgcattcccgggtatcttccgtggtgcactggatgttcgtgcatctgagatcaacgatgagatgaaggtagctgcagcttatgcgatcgcaggtctggtaagtgacgaggaactgaatgcagattacattcttccggcagcttttgattcccgcgtaaaggacgcagttgcaaatgcagtagcagaagcagcaagaaagagcggcgtagcaagaatataatagaatagcagcggagctgctattctattatgagcaagtagcgaagcgaattgcgaatatccgctttgattcaagcagcggagctgctattctattatgagcaggcagcgaagcggattgcgaatatccacttccataaacgcttgcacagcaaaacgcactggtgtataatcagccttacaaaacgtatggggctgtcacagacggcaatcgtctgtgacagccctttttgtcggtgcaaaagacaaaagcattcaaaaaaatgcagaagaaggaaaaacattgctgctgataggcagcaaatgacggaaaaacgggggaaaaaagagtgctatatataaaaaatctcaaagaggggctggaagtatttaaaacgcttgggtcggacgtgcggatgcggatcgtagaacttttatgcgagcgtggggaaatgaatatgaatgagatcgcgacggcacttgatctgacgaatggtgctctcacttcgcatatccgcagactggaagagtgtggaatcatacagaccgttacggaatgtaccggacacggcaatcagaaaatctgcagcatcaaaacagatcagatactgctgactgcggatgaggaggctgaggcgaaggaagtcggagtgtatgacacggaggtgcgtgtgagccactacagcgattgcagtatcgcgcggccgtgtggactgtgcagtggtttcagccagatcggtccggaaaatgatccgcgcatgtttcacaatccagagcgtttgcaggcgcggatgctgtggtttgcggacggctatgtggagtatcggattccgaatgtgctgaccgaaaaccagaagatgagccaggtcacattttattttgaaatttctcaggaccatattgattatacggaggaaagtctggcggatgtggcattttatctgaatggataccggatgggaacctggctgacaccgccagagttccggctggagcgcggcatctatacgccgacatggtggaacggtcaggagaagcagtccggggtacagaaaatgattgtggtaaacagcttgggaacgtaccttgagggaatgaaatgttcagatgtcggactgcgggatcttggaccgcagaccggagaagatctgcggttccggcttgcagtggaaaatcgcggaaatcacagaggcggcatcgtgctctatggggctggctttggcaactataatcaggatattcgggtgagaatccattatacgatggaaaaataaagccggaatatctggatgaaccggcaaaagtcgcaaaaatcatagtgatattctggcaataagtactaaaaaaataaaaaatgattgaaaaaacacatcgtcttgcatatactgtttaaagatatataaagtattttaaaacaagttaaagtaatggaggacgaacgatgaacgaaaatacagaactgaaatacaatgagccatggatcctgcagcgtgcagatccgttcgtataccgtcacacggatggaatgtattattttacagcttcccttccggaatacaacggcattgcacttcgcagaagcaaaacgatcgcaggcctgaaagacgcggaagaagtgatggtgtggaaaaagcatgataaaggcatcatgagtgtacatatctgggcaccggagctgcattatctgtttggcaaatggtacatttactttgcaggcggtgacatcgacgatatctgggcaatccgtccgtacgtgctggagtgcgcagatgaagacccgatcacaggtacctgggtggaaaaggggaaaatgcagcgcagtgatgacgatgaattttcttttgaagatttttcacttgatgcaacggtatttgaacaccacggagagtggtattacgtctgggcggagaaggtgagcgtcggacgcaagatttccaatctttatattgcgaagatggaaagcgcatataagctgaggacggcacaggtgctgctgacaacaccggactacgactgggagcgcatcggtttctgggtaaatgagggaccatatctcttaaagcatgatggaaaactgttcctgacctactcggcaagtgagacgggaattgactattgtgtcggcatgctgacagcagatgaggatgcagaccttcttgacccggcttcctggaaaaagtcacggtatccggtacttcgcactgacgcttcaaaacagatctacggcccgggccacaactgctttgtaaagtctgaggacggttcaaaggatctgatgatctaccatgcacgtaccgagacggagatcatcggagatccgctttacaatccaaaccgtcatgcgatggtcatggaagtgaagtgggcagaggatggcacaccggtcttttcttatgattgatcggtgatgtatattaccaggaagaccagctgtaaggacaaggcagatactgcagcagctttgggaattttgaaccgagtcaagcaagtcccctgctttaattgcgtggagcaataagcagtgggtagggacttgcttgtatcaggagtggtacaagccactcctgataagctgcgaagcagctactcggctatgagcaagtagcgaagcggattgcgaatatccgcttgactaaaatagcctgcgcagacacgctctggaacttacactggtgtgctccctgcaatcgggctgtactgcacccggaattcaatatcctggttataatttccaaatccgcggccaaagaccgtaagaccgccgatgtgtttggcactgtccggcacggccatccggaaat

SEQ ID NO: 3330 - DNA, 7306 bp, Unknown
  16S sequences of unknown bacteria
tcagaatgttgacaaaccacactttcgcgctaactactccctcatggaatattgattttcttgataaagagtatcaaatatattcctgcttgtcaacagaattcgacattttttcaactgtcagtcaatgcaatttgaactgccctttttgcatgaataactgttgtatcaaataccgggaccgagacatctgactgatgaatcagtaaaccgatctctgtgcatcccagaataacaccttctgcacccttttcctgcattttttcaataatcttctgaaatatctttctggatttctcattaatcttaccaacacacaattcttcaaatatgatcctgtttacaacatccacatcgacatcatctggaataatcacctcaattcctctgtcggacaggcgatctttataaaaatcctgtttcatcgtatatctggtacccagtagtccaacacgttttatgtggcatgtcttaagttcatcggctgtcgcatctgcaatatgtactactggtatctgtagcatagaagcaatctgcgatgtgactttatgtatggtattagaacatataagaatgaaatctgctcctgcatcttccagtttctttgcagctcttcccaagatctcgccacatttttcccattgattgctggactgatagttttcaatttcagcaaattcaacactatacagaatgatctttgctgaatgtaatccgcccagcttatttttcacttcttcatttataatttgataataatggactgtgctttcccagctcattccaccaagcaacccgattgttttcatttcacactattctcatcacataaaagaaccttgtctatttcttacctattcaccggtggcctcccgatactccgatgttcctacatctccccatgcctgtctgccagaatcgattacctctcctgtgtcgatcacgtaggcatacatatccagaattcttgcttcctgcagactatagctgccgtcgggtgctttatccgcttcgtgataaacatagagcagacatttttcattcttagacactctgtcataaaccaggaaccttaccttatcatcatcttcatagacaagcatccgcgaatttcctttggcatcctgggtagtctggaaacgagccccgtctgcatccgccatatatccagaatagatcgccacatatccatcattgatctgattatagaactctgtctgatcctgtccttctggtgcttcttctgcatcatctccacctggatagaccatatcatcataagcatggttgctgctgtctggctcttccacccaggatccggactgctgatacagaatcagttctgtgtggagacagctctggatcacttctgctgtgacatctgcaccataaacccagctgtcagatggatgtacactgaatggaagattaaatgaccagccttctggatcgctcaaggaacttttcaatacgataaaaatgcttccctgtacatgatcaaacagactggttttcagttcttcctgtataaatgcagcaatcttcgctcctgcggcatccatctgacctgcaggaatggtcaatgccgtcacttcataacttagatcagcttcctgattcatctgctccacagtcgtctgctgctttttggtcagctgtacagcgtcaccaaaataggactgtccttttttctcaatctccgatgaggtgagcagataggacagattctcttttaattctggatcagctgtgcgatccacgccccacacctgcaccttcacatccggataatcttcagatatgtagacctgccctttcctctcatccatcaccggcacaaactccgtatcatagattctggaaagactctgtgcataatgctctgtatcccaggtaaatttctgtcttgcaatcccatatacaggctccgcataatatacctcattgggcgtaccataagcggcagattctgtgattcgaagataaccatccttcatccgatattcgtcttccatctgtgccacctggataaatgcagcgcagacactcaccagtgccatgacaatcacataagtaagaaacagtccgaaccaaagccctgtctgtttcttctgatactctctccagaaaaacgatccaatcagaaacactggtaaacaccagagaaagatgcctgtcaccagttttattttcaaaagatactccattccattttgttgaagataccagtctcctgcaaaataacctgttacaatcaacagataacagattacaatggctatccggttttttcccatatatatctactcccctcttacatccaggttatattccgtgttaatagaaaacatcagacagtgcttcctgtctcattataacaaaaagtgagagattttgcttaaaaatctctcacttaatcaagccttaatcaattttttattgatataagtctatttccagtgaatcacggcttccaccgaatccgtatattgatcatcggtgatggatttataacgggatccatcgtaccagtcagtgaagccgttgtcaattttgtagatatttcctgtctcagtgtccacaatacgctcatagcccaaggtcgcatcactctgcttctggctcatgatatcctgactccggttccggttctcccaggaggacatgatgctgtcggacatctcactggccgactggctgagggactgggatgtagctgccccctgattactctgggacatggcaaaactctggaattccggcgtataattaaggctgcttaaaaccttattcaaagtaggctgccagtcctgaaaagttcccttttctgcactgaggaccgtcagattatagacggaataatatcccatccctgtacccatggcaaagggcaccacatccgctgtgaacattccttctcccgccgttccatcctgagtaaaatctgcccgaagaatggacggagaaatagcaacgctgctcattccctgagtactttcaaagctctctgtcacggaaaagtccgcaatgtgcggtgcctgaacttccgtataatcaggggtcgcgatcaatgcatctgcaatctgaggaaatatttcaaaaactccctgtgttgacacattcgtaaggacaggataacttctcagcaaatcactggaaagtgccatcattgcccgagtattctcatctgaaaataagggctccatctttagcataaagaagatttgatttactggattctccggatcaaaaacatgaattgcatgaaacataccggtgtacatggcagaagatcgcactgtccatccctgtggaatattcatactgaactccgtacagctataaggcaccaactcctgagcagacgccagcggaacgactgtccagttgtcttctattgatgcctctgtgtgggaacccgtctctgtacgcgagtctgctgtttgctcaccctcttcttcatccggcgcagtcactgctgccatgcttccctgtctctcaaagaccatctccgtctcttcatttgccagaaccaatacgccatcttctaacatataagcatccgccacgccatccgtagtaatggcactgtcatcccaggtcagatcatagactgtgccgtcataatccatagttccggtaccatcctccagaagattcaacgtcatagatgtgcccatctcttccagatcctcttttccgaccgtcattccattataggtcatgctcacaagctcccatgttcctgccgcagtatcttcgttgacactcattacagcatccgatgtattctctgctcctccacagccggtcagcaaaagtgccgcaagcagtaatgtcccggccttcttcccgtctcgtagtctcattgcaatccctcctccgtaagataatcccgtatgatattctggacttttttccatccgtccgtctcataacaagtgttatttctcaacagatttccggcctcaaaatccagcgtccacgtatttccatccgccatctggaagacaagtgtctccccggcatccatggtgcgaagctctgtctcctccccgacgttaatctgacttatagcctgtatacaggcattgatcgtcgctgcatcagtaatcttccactcattatgggtttccccttcctcattgtaggtaagtgctataggagttttcacatattctgcaatttcccccagggacatgtttggaaactccaccgtatttcccaggatgtcgtcctctccctttccatattcatccaccgtataccaggcagaagtggcggtgtgactgctctcatcatcgtccttcacaatctcataaagatgaagggttgtcgtaccgtcatcattcttcaggcattccacctccggtgccagataattattttccttcagataataagcacgggccatagccgccagttccacgctctgatagggtgccagccgggcatcctctttttctgctttttccgtctgcgtgcctgctgtctgcagttcttccttttccccgacggttccgcagctgcaaagcaggcctgctaccatcagaatgaaaagtattctgtaatgacgtctctttttcatccttcattcctcctgtgatatcgatagtaaaactgaaccaatccgattctggactttgtcccggtcttttcattgaggctggcaatatgccggtacagtgccgctctggaaatcatcagtgtctccgcaatatcctgaacattctcatcggataccagaatcacctccaacacttctttctcccgctctgtaagagaaaatgaagaggcaaacatttccagactttctttttctccaagctttatctccctgctctgtggctctgtcttttttctcctgtacaaggcattactgtagataaaaaatacaatactgatcaaaacaaataataccagcagcagaccatcccgcagcatctgattttctgactgaataagtcggatggacagtgatcctgtgacaaaagcacagatattgttcacagctcttccaagacccgaccagaacctcggacacttcatccggattgaaagacgcataaaacttacagtaaaaaatactacaaaaaatcccgctgacagataaaacacaaccagccccgcaaaaaatggtccgccattttccagtaccacgatgcagaaagcagacaaaactgtcatgcaatacatcagtatattctcatatcgatgttccagactgtcatagaacacacctgccagaagaccacttcctgcaagcaacagcctcggccactgccctacatccgcactgcccgctgcatgtctcagcgtcactgctgcatccaatgtagaaaagatacaggtgatcagtattatcagaagaatcagccagagacccgcatgctcggagctttccaatgtgctttctgatgcactttccgagtcactttctgcttgtactattccattctctgcgtttaacagcaatacggaaaacactgctgcagacacggccagaacaatagactctgccatattattttttatgagattattattaagaaactggagaaagatgccaactgcatatgatataccgatggtcttcgccagatgttcaggagctgccgccctggacagataataatgtactgcgcttcctgccatgccaatcagaataaagcagatgcagcccgccgccagaatcgtgccataagaggtatgctgccagatcacaaaaacacagattacccctgccagtgctcctgcgaatacgacaatctgccagaatttttcttttatgcaggaagcaaccgccggataaagcagaaatcccagcacactggctcccaatatatacccctgtgctgtcaccacctgttccggtccggtaaccaatgccatcatattgtcaaactgatattcaattcccagaaaaataaaattgaaaaaagcaagagccaacatcaatgtcaacactcttccatttaatctacaccacttcatctatctccactccgtttatccctgaattaccttcttttgataattctattataaacaaaagtctcaatcgaacaaggtgacattcgtctcaatcaaacatttactgtcaataatcccacttaaccttcttttcttccagatactttaacatccaatagggatttatcgccagttcatcttctacaccaaggggcatatagatacccacatgaagatgaactggaaactgtccggtcgtgccttctggtccataaccactgtctcccatatacccaagcaagtctcctgcctgcacctggtctccttctttccagtcacccacataagattccagatgtgcatagtaataataattgccattgtccgaacggattccgatccgccagcctcctttttccagccagcctgcccgctctactgtcccatctgtcatactgatcaccgggtaatatccactctcttctttttccggtatcagatcacatccctcatgttttcgcttgcctccataggttcgttctgcctgccaggtattttcaaaagaaacagcctctgtatctttcaaagtagagtccggtacaggaaaatattccagttcttcccacacctgctccaatgcctgctgataggcctcatattccacatcggaatccgaagaagacggcatctgcgccttcagccggtcttcgatccagtacagttcttcctggatcagacagttgagcaataacatcatccctatccataatgcaagcttctgcccgcaaaaagactcatatttcatggcctgccccatacattataatgaattactacatcatatggaggtatcttgcaaaacatacttaccattccggcacagggttgtacgctgggtctgaccctctggtacacttctgtcctgccttctttgcttcctttttttatcttatccgggcttctgatcagaaccggtgcatttcgttttctgaaccggatcttctcaccggttctgacacgaatctttccggtctcctcagatggctcctatgcaattcttatgggatatctgtgcggctttcccatgggtgccaaagtgattgccgaactggtggcacatcagcacatttccagagaggaaggctcctatctgatggtattctgcaataatgtgagccctgccttttttgtcaattatatctgtattgccaagcttggattcacaaaggtgccgccaatactgttctgcgtgttttatggtgttccgcttttgtatggatatatttatggccgctttttctacaaagcaccggtttccagccacaatatttcc

SEQ ID NO: 3331 - DNA, 6815 bp, Unknown
  16S sequences of unknown bacteria
ccgccgcaaccatgcccgcagctgcctccgcaggtagattttccttttttcttatcgtttaccaaacctcttactatgaagaaaacgataacgacgagagataaggcgattattattgttccgggtgtcataagctcggctcctttctgtgtagtttaggatttattacttgcttaccttaacgttagcggtgagctttgtagcttccttgtaaggcttaacgagcatataaaccatgaatgcgaggattgcaacggcgaagataagaccaacaacgtttacgtgacctgtgaagagtccgccgaactggtttaccataagagcgatgcagtatgcgaatacgcactggtatgtgatcgcgaatgctgtccacttaccattgttcatttcgcgtttgatagcacccatagctgcgaagcacggtgcgcagaggaggttgaatacgaggaaggagtagcctgttacgcctgtgaatacgcctgcgagtgtctcgtaaacattgccggaaccgccatagaggatacccattgtaccaacgatgttttccttagcaacaagacctgtgatggacgcaactgctgcctgccatgtaccccatccgagaggcttgaagatccatgcgattgctccgccgatagcagcgagtatggacgcgtcgatttcgtcttcactgagcatacggaatgtaccgtcaacaaatccgaagtaagtagtgaaccaaacgagaattgtggaaaggaggatgattgtgccggctttcttgatgaaggaccagccgcgctcccacattgaacggagtacgttgccgagtgtgggaagatggtatgcgggaagctccataacgaacggtgcgggatcgcctgcgaaaggcttggtcttcttgaggatgatgccggacacgatgatggaagccatacctacgaagtaagcggaagtggagatccacggagaaccgccgaagattgcgcctgctatcatagcaatgaacggaaccttagcgccgcaggggatgaacgttgtcgtcatgattgtcatacggcggtcacgttcgttttcaatagtacgggatgccatgataccggggataccgcagcctgtaccgataagcataggaatgaaggatttaccggagagaccgaacttacggaagatacggtcgaggacgaatgcgatacgagccatgtagccgcacgcttcaaggaatgcaaggaggaagaagaggacgagcatctgaggaacaaatccgaggactgcgccgacgccggccacgataccgtcaaggataagtccgctgagccaatctgctgcgcctgccgcttcaagaccgcttccgatgagtgcgggaataccgggaacccatacgccgaagtcagccggatcgggagcagcgaattcttccgcggaatgctctgtgaagtagtcgacagcttcgagatatgtaacgccgattgttgtctcttcgtcagcaccgtcgggaatggaggagtagtaaactgtcatgtctgtctgagcgagagtttcctcatcctcgattgttacaacacctgtagcattttctgtttcgggaacatagttcttgatttcgtcaagagcagcggatgcgtcaaagtcttcagcttcgggatcaacgtcaacgaatgcctgaacagcgttgagagcgtctgcatattcgccgtcagcgtcttcgtaagcggaagtaccgataccgaagaggtgccagccgtcaccgaacaatccgtcgttagcccagtctgtagctgcggaaccgactgttaccattgaaatgtagtatacgaggaacattacaaccgcgaaaatcggaagtccaagccaacggtttgtaacgattttgtctatcttatcggaggtggaaagctgacctgcgccgtgcttcttgtagcaagccttgataatggaggagatgtagacgtaacgctcgtttgtgataatggactcagcgtcgtcgtcaagctctttttcggcagccttgatgtcattttcaatatgaccgagagttgtggggtctatcttgagctctgcgagaaccttgtcgtctctctcgaagatcttgatagcgtaccatctctgctttgattcggggagtgaatggagagcagcttcttcgatatgtgcgatagcgtgttcaacaactccggagaaggtgtgcataggaactgtctttgtgttcttagcggcgtcgatggcagcttctgcggcttccatgatacctgtacccttcagagcggaaatttcaactatcttgcagccgagctgacgggaaagctccgcggtgtttatcttatcgccgttcttcttgacgatatccatcatgttgatagcgataactaccggaattccaagctctgtaagctgtgttgtgaggtaaaggttacgctcaaggtttgtaccgtcgatgatattgaggataacatcggggcgttctgtgatgaggtagtttcttgcgactacttcttcaagtgtgtacggggaaagtgaatagatacccggaaggtcggttactattacgccgtcgtgcttttttagcttaccttcctttttctcgactgttacgcccggccagttaccgacgaactggttcgagccggtcagtgcattgaacagggtcgttttaccgcagttcgggttacctgccaaagcaattctaatattactcatgtcgatataactccttataaaatttgctgttttaacttagctgccgctaactgatgctctgaaaaataatcggggcaggattattcaacctcgatcatttccgcgtcggcttttcttattgaaagctcgtatccgcgaactgtaacttcgatggggtctccgagaggcgcaaccttacgtacatgaacctcggtaccctttgtgatacccatgtccattatacgtctttttacagcaccctcgcctgtaagcttaacgacacggacggtatcgccgatcttagcttctttgagtgttttcataatttcgtctcctccttgtaggctcttatatttaaatcataattttgcgcgccatttcttcgcttatcgcaacgcgggtttccttcacgttcacgataaggttgccggcaagcgtgttcactatcgtaactgtaccgccgactacaaatccgaggttctcgaggtgctgttttacttcgggagaacctccgattttcttgataatattttgttctccggcatttgccagtgcaagaggcatcatattactcttccctttctccgccgtgggttatgatacagaagatttttgaagatttccgaaagcgcttcgagcttcttcaaaatacttcttaacttcgcggctgtaattagcacttgctaatcgaatcgccgtgaaattggttagcactcactaaccggataatataatactccacaaagtccctcttgtcaataactttcctcaaaaaatccacgaaatcttcatttttggcaggttgatcgaatgagttagcgtagactaatcgcaatattgtgcagttcgccaagactaactcgcggataaaatgaagcgcacaggcatatgggatttctggggaaatattccgataaatccacagccgaagcggatttcaggcattttaggcgcggcaaaggcaggagggataacgctcatcgagaatttaggcaaaaagaaaatccaccgcagaattaactacagtggactttataacctgacccgagggggaatcgaacccccgttactgccgtgaaagggcggtgtcttagcctcttgaccatcgggccttaaaaaaggatttatcagcgttagtggtgacccgagggggaatcgaacccccgttactgccgtgaaagggcggtgtcttaaccgcttgaccatcgggccgacagcactgataaataccttttatggtagcggaagttggacttgaacccacgacctaccgggtatgaaccggttgctctagccaactgagctattccgccatttttcttcgctttgagttgttcactctcggcaacggtgatattatatcataccctcctccgtttgtcaacactttttttcatttttttcaaatttttttcctgcgcttatccgagcagtccttctatcacttcaagtatgcgcagtttcaccttgaacctctcaccgccggttatcatacggtattcttcgggcgtgaatcctgtctgaatgtactcctccgaatacgaaaatcccgtgcagagcgtcggaaacagaacgcaccaccagttatgtccctctccctctcctatcactattctgagcgaggtgtattctcccgcgggcattacagcgtctccgtacactctgcgtggatattcttcttttgtaagataaaccttgacttctccgccgtacccgttttctcttgcgcattcttccgcggtcttctctattccgtctaggttttcttccactctttcgcaggcttcgctcaccgtcgtgcagtccgtcatcctctcggagatatattcgagcgcggcgtcacgtaccatcagcttcagcgactgtgcttcttccgtgtccgactccgctataacgtgaaaccgcagaacatcgtcgtatatcgcgctctcacccctcgtaggaaacgcgcataccacggtgaaggcaacaagaaacgacgcgcaaagtgcagcaatatacttcataaaaatcctcccgatgcttagatttaaggcgattattcagagtaacctttaatcaccttattatcagcatagggaggcggttttattcacttattttttgaggaaatcaataaatcccatccagtcgtgacgtgagagccaatgcgtgccttctctgaggtggaagcctaagtctccctcggggaatctgtctcccgctttcggaagtctgtcgggatgaacgaagcccttgccgccgaacagctcccaggccggagaagcagccgcacatgagaggtactgcgaggtcgggtctgcccattcgtcaagagaagccgcggtaatgtacagctttctcggagcgcagcaagccaagaggaaatgctgatcgaacggcatcttttcggcgtcgtccgtgctttccgaaacgctcttcatgttctcgcagaaccaatatccgagcactgtgaatatcctcgggaatctctcgcctatcttaccgcgctctattgcgtccgccagagcatccagcgtcattcgagaagatgtaggtgaagcgttcgtcgtttgcgcctgcccacagagctgttttgccgaggcgtgagtgtcccataactccgaccctgctcttgtcaacgtagtcaagtgtgaggaggaagtcgagcgttctcgaagcggcgtatgcccacattccgattttgccgaagtcgccgccgtttctctttccgttctcgaagtagtgcgaatccatcagcttatcgaacgttcccgctgcgtcaagcgatacctgctgatactgcacctccgcgactattactccgctgtctatgacctcttcaatcgggtagtagtacttgttctcgaacgcaaggtacacgacagccggcagcttgttttccgcagttgcagttttcggcacgatgaggttaacgggaaaagtgaaactctctccgtcgggcgtcgggaaggttatgcttattctgctctcgcttgcctttccgcagcacacgtcaaacttcgcctcctccttccatgtcgtctctccctcgggcgtcggcattgtaccgtactcgtattccgcgaggatatcaagcatttcgcgccgtctctcggggaagttttcgcgcgtgacttcactaccgtcgttcattttcagaatctcgggcaagtgtcgttcttcaagcagttttgcgatttctgttttcatctgatgcttcctttctttatgtataatgttttagctatcgtcaccggaaacacctccgcagctccgccgaagtagagatttctcgcggcagagttcatcgttgctcccgtcgtgagtatatcgtcaaaaataatgtactttcctccgcgtacaacgttctctcgtatcagctcaaccattgcttccgcgtttttctcccgttcggtgggatttaatgatttctgctcaccgccgcctactctgcgcagcgtttgtgccatattgcatccgagcagctttgacattctccgcactatctcctcggactggtcgtagccgaattcgctgtatttactttccgagcgcggcgggtaggtcagaatccaatcatgaatattctcgcctgacgagtcaaacagtctcttcaccgcaccagatattatctccgcgaaaaaatcgaacagcacttccctttccttgagggcgaatatcattttctcggttatcctgtcctcgtcacggtcgcggagattcaagtaaaacgtgagcgacagcgagtttctgccgctcagccttgtcttaaatatcttctcgtcaagctcgttgcaggcgcatctgtcggcagtatttccgcaaacgggacacttcaaaaacatctcctgcctgaactttcttatgcactccctgcagaccctctcgccgtgacctacagcgcatccgcagacctcgcatgacggcgggaacagtatgtcagcgaaatagccgaaaaatcgtgcgatacccatgctccaccgcctttctttttttgaagtataccatagtttcgcgctcatttcaagcacaaacaacaaaaaaatcgccggaatttcgcccttcaccataaaaagtgaacgaaagcgaatccggcggattttataggtaacaccgcacagttctggtggtgcaattgcgctgtcagatttttcgtcaggttaaacaaactgaggaag

SEQ ID NO: 3332 - DNA, 32759 bp, Unknown
  16S sequences of unknown bacteria
tgtcaatatttaatatagatatttcgtataaaaatatcttatcgaaaaggcgagagcacaaaatatcaataagtagtataattatttcgatacgagaaaggataataaggcaatcaactatgaattataaagaaatcgagcaaagaaacatcgacgcttttagctcagcattgttaacgagaataaaagaaatttgtaaaaaagaaaaaactactttatccgagtgggcaatcaatagcggcgttaccccatcaactttatatgattttaaaaataaaaaaacgataaccttaggtttaattgtaattaaaaaattgtgtgattctatcaaaatgtctatgtcagaattttttaatttcagcttatttaatgaaatcaattttgacgaataacttaccatcgtcccaatttttcctctttttatcggtgtttgatttcgaaattatatataaaaatatcttatcgaaagggcgagagcacaaaatatcaacaagtagtataattatttcgatatggaaatggataatagaggttctatactatgaattataaagaaattcaacaaagaaatattgaggctttcagttcagctttaataacaagacttgaagaaatttgcacgcaagaaaaaattactctatccgaatgggcaatcaatagcggcgttaccccgtcaactttatatgatttcagaaacaaaaaaactataagtttaggggtaattacacttaaaaaattgtgcgattctattaaaatgcctctctcaaaatttttcgattcaactttattcgatagcataaattttgatgaataatgtttattctttttaaagctcaaaacgccgctcgattccatcgccgtcaaaaagttctttttaaatcatcaaatcaatagttgtatactaaaaagatataaggttaaatttatatggatttggatattttagtacaacgtatcggttatttcaggaacaaaaaaaacctttccgcgagagaattaagtttacttatcggaaaacatggaggatatatcaacaaattagaaagtaaagatttcaatttgcctacttccgtattattaaaaattttagaaacgttaaatgtttcctgcgaggaattttttgccgaaaactttatgacttataaaacagacaaggaactcgcaagcacttttgaaaaattgtcggcagataataagaaaatgattttagagttaatgaaaaatttaaaatagttatttagttaacacataaaagcagtacttctcaatcaatcttaaaagctttctcttaattcataaatcagcaatgctattttgaatatttataaggttaaatttatatggatttggataatttagtacagcgtatcggctatttcagaaataagaaaaatctttccgcaagagaattgagtttgcgaatagagaaaaatgaagcttatattaatcatcttgaaagcagcaagtttaatcttaaagtttctattcttttaaatattttaagtgctcttgaaatatcttgcgccgagttctttgccgataattatgccgactatgagcaggacaaagaaattctcgatttgcttaacgctttgcccgccgaaaggaaaaagtcgtttatcgatttaatgaaaaacactaaataataaaatcccgtgcggagcgatatactccgcacgggattttttaaaacaaaaaactatatcttctgtacgtatgcattcgcgccgcaggtttcctccgccgtcacgcaatccccgaaaggactgaacaatctttcaccgaaacgcaaaccaatgggagaattgtcccgataccgtttttccgtcaacaggtaatcggcaaaaaaacgaacgatcctccccgctcggacttcctccatgggacgtatcgacagcggaaaggtatgtataccgcaggcgagatctttcagcacggcaaaaggtccctcaaagtcagcgacttttcccgaacgctcctctgcgagcaaccgcaccccctcgggcatatacaggcgcaaactccctatccgtccctttttcacctcgacagcgacggcggaatttttaagatcgaacgtataagcaaactcgcagtcctcggaaatccactctccgcccgtcgtgaaatacgcggcgtattcgcccgatttttcggcaagcacagaatgctcccgaacgcaattcaatccgtccgcaaagcgcatggaacaacaaaaattcgcttcatagagctgtatgcgaagttcgtcgttgttttcccatagacacgtttcgcaccccgcgccgccgtttttgcgctgtgcggagcgaaaagcgttgagatagacgcgatttccaaagcgcagatattcctcctttttcgtcgctttatataagtccagcgcgagaatgagggaatcgacgaacgcgcacggctccgtccaggtctgcggacggcgaaaccaattgaaattggcgtaattgaccgtggtcccctcggaagcgtacagggcgaaattcttttccgcgctttgaagatagcttcgcttgcccgtcagttccgccaggcgaagtacgccgcgggtgcccgacagcatggcgtgcgtctgaaatttacaaccgcagtaatcaaaagaaagaaatttatcggccatcgtttccgccagggataaaaattcgggatttttgacgacgccgcataaatccgtcagtccgtccaaagaaataaacgcgcagccgacgtcggaagaaagttcccacccttccgtggagcgcttgacgatatgccccccgacgcccccgacaatgcgctctccgacgggatacttttcgataaacttttttaagggaagaaacatcttttcccctatccctgccaaaagattatagattcttttttcgcccgtgatgcgatagtatgcgcaaagaccgcgaacaaaccagctgtttcccgaaagttgctgttcgttgacgctttcgccgttcgctttgttcccgaaatatccgtcctcgttcacttcgcggggcagcgcgtcgatgatctcctttacctgtctgaaaatgctctccgaagcgcgatttcccgcttcatactgcatacacaaagcgagtatcgcccgtccctgccaatcgcccggccaatctcctccgtttgaaaaaatatcgggcgcgcaatagtttttatccgtcagcctttctatattcttttctattctttcctttaattctctcgttgcaaaaatcatcgtttactccgcccgacatatgtgccgccccgcttcaagcagggcggtatcattgccgtttttggttttacgcaagtttcgtgagtttataactcatcgaagccagatagaattcacccgccgcagaaggaaggtacagactgaaataatccgcgtctttcgtcgctttccaggtgatcgtcacttttttatatcccgtctgattggcaagaatatcgacaaacgcgttattgtcgatgtttatcatcaatttatcgggacaagacacgagatacaaacagaatgtaatttcataggtacagccgatctcaatcgttccttccggtctaaacagctccatggtagaattggctgccttactaaaatgaacggcgttgttttcaaagcccgcgttatccgaaagcttcgtattatccgcaagagtaatctcgctgcatttgacagcggtgcccttattgccgagattgagcgcggaggcatccttggtccatgtttttcccacttcgtagccgttcggggacttttccgtgtcttgccgtttcgcggctccgatcgtaatatctccgatataaaggggcgcgatagagccgttataaagaccgatattcacatacttttccgagccgacaaaggtatgcgtaaaagtcgtgggacccgttacggcgggcatggatttcgcccccgactgcgcgcccgatccgtccgtcataaagatatgccatccgctcgcgttcttggaatataccttaaaggaaatcgtatactcgtaagtgctgtcggtgcacacgttcttcaaggcgtcgaaggtgacgatctgtgtgtttgcctcgatgatataatcggaagtgaatccgttgtccgccgtgagattgtccgcctcttcctgcgtaaggcgttcgctcgccaccaccttgctcttatccagatattgcatcgcgccgctgagcgccgtgtaattatcgtccgcgcccgtaagcgtataagatttgccgtctatgtctgcgaaagtcaaagttttaggcgtacccgtacgctccaccgtgtcgtccaccacctctttgaccgtgatggatatattatcgatggcaagcttaaaattcgcataggaataagaagaatcgcccgtatagaaaaacgttctgaaatgccaagtcttggagggatcaaacgttttgttgcccgtcagcgtcaccgtcttggtttcgcctaccgcgccgagcgcgaactgttgattttcgccgctgttatctccgtcgtaaataaaggacagatatattcccgagggagccgcgccgccgagaacctttacatccatggaaatcgtccattttcccgatttgatgtattcgtcaagagtaccgaaccagaactgcgtattcgtattccacgcacaggtggtgtagtcgataatcaaggaattgcccgcgatggaatcggcggtcgcctgaatgctggcctggggcgttccgtcttcggtagaataggagaagccctttgcaagagcgccgctataaccgttttcaaagttttcgacgtaagtctttccctctttaaggttttcgatatttcccgcccccgcttcgagcgtcgtttcgggaacgatgggcgtaaccgtcacggaaataaattcctcggtttcgttttccgcctcgtcgacagcgtaataggaaacctgatatgtacccgcggtagtggaagaaaattcatatcccgcctccgtcttgacgatcgacgcgcccttcgacgttacgcttacgtccacatccaccgcgccgtctttttcatctgccgccgtcgcagaaggcaacgtgactttttctcccgaaaccatcgtgtagctgtccttctttccgtccgcataagtaatgacgggagccgtggtatcgggctgttccgcgctgctgtcgctgctgctgtctgccgaatcggaactgctgtccgccacgctttccgaggactgcgtagaagagtcggcagtcgacgtttctcccccgcaagacgccgcggaaaccgttaaaccgcaaacgagcaaaaatgccagcaacgatttgaatttgttgagtttcatcctgattttcctccaaaataagatttctctatatgaattttatagatttctaaaatcaatcgacaaaggtaaacacaggcatttttgccgtctttgtcttatacgcctccacgaaatgaggcacgttggatacctgtatacgttttctgccgatatcgtcgcggtcgccatccataaagacgaatgccatggcgatgctttttccttcgtcgatagaagttttcgccgtttgaaagagcgagaagggcaggaatacttcgccggaatatccgtccgaacggagagccgccgccgcggaaatatgggcgcgtcccgccgcaatcgcggcattcgtcctgctttccgccaccgtatagcagggattccatgaaggcaccaccgacatctgcaacacgtcgccgtcgtttttgaaaagctggaagtccgcattgggcatatccgtcacggtcgaaaggaaaaattcggcgcagtcgccttcccagaaattggcgattgtcttgaaatcgagcttgttgtcgtaaatattgaaggcaaaataaattccctcgtccgtccatgcgatcttgcacataagcacgtcgaacacatccttatacgcgtcgtgaaggatctcgtcccccgtcgtcagactggcgccgtccatagcgatctcgctgccgatattttcccattcggaaatatccccgtctaccgtgatcgtgccgccggcaagcttggaaaccatggtattgggcacgtcgccgtcgatctcctgatatttaagattaacgttatttgttaaggcgatgtcctccgttttagtcgttccggagggaatgatacccgaaaaactctccgagtcgttggtattataattgtaattgccctctatcgccagcgccgcgcaattttccagctcgatacagcattcggtgaggatgctcgcatatacgcgagccgtattatagaagagattgttcttgacggcggaatctcccacgcctctgaaactgattcccgcatttcccgtattggagatataattgttcgtcacttctatcctcgtcaccgtacccgacggggcgacgagcgcgcccgaaccgatggcaaacgcggaaatgtcgccgcgcagcccttcgcccagcagatagccgttattgatgagcttattgttgcgtatgacgatatctttgggcagcgtgcactcgttgtactgatccatcgccgaagcgatctgcatggaaccgtgtccgacgttgaggaaagcgttattttcgatcagcgcaccgcgtacctgcacgagaatgccgcggttgcgtttattgcggacaatgttgtttttgaaagtaaattccgcgactttggaaacgttggtcatcatagcgttgctccaatccacgctgcccgagatccgctgtttcaccgtaagctgcatcgcgcccgtatcccctgaaacttccgtaaccgtgaacgaaccgagtctttcgaacgtggcgctgtcgtaaaattccaccgtatcccccacttccgtcatggggctggcgcccgtctttttgctgacgttaaaagtacgcgcctgcgcatcgtaactgccgagcgtataccagtatcccgatttgatgttcaatgcgtcgtcgtgcgtattctcgatgatacaatttgtaatcttcacttcgcccaaacagttggaaatatgatatccgtcggccgtggaggtcatccgcctgtcttcgtccttcaagacaatatcgaggcgattggcataaaaatttttcgtgccgctcaccgtcacccccatgccgggacaggaataaagatccacatcctcgacgaatacgttttcgcaaccggaaaaggtcacgcccgcacggttatacatagtaaacgccaaagaaacgggcgcgttttttgcgggagccttgaacgaggaacggtaactgtctttaaaagtaagagtgatctcgccattgccgttgaatttccaactttcaaatatcccttcgcccgaaatcgccacaataccgtcctcttcgggcgcgcccgtaaatcggttaaactcgatgactgaacaaagctgggaatacagcgcgggatttgccagatatgcgtcgaccgtggagcgcatggattgaggaatactcatcgtgacggacaacgtttccgtatcggaagaaacgacgatgcccacaatggaaggcaaaactttatagtcgatatccaaaccgttgatatgcaaatctttgcaagaagaaacggaaagcgcgcttatccagccgaccgtactgcaatccattaaaaactgtgtgttttcgccgccttcgaggtaaagcccgtcaaaccccgacagcgtgactgcggaggtcaggacaatatccctggaaggaaatttgatcttgactttttcgccctctttattctcggtctttgccgaagagagcgcctgcgtcatcttctcgttgtccgtccccgaaaaggattcaaagtcgatcaggcaattcgttttgaattctccgtccgcttttcccgcatataacgtttcctttgtttcttccgacttcacgcctaccgaggaggcctccgacaggccgtaattttccgtcaccgcggaacttgcgtacggggtgtcgtcgagcagcttcacggcttccgcgatcgtctgtttttcttccgaagaggagctttgcgtctgcgaggaagaggaatcggacgaagaagacgagttgtcgttccgttttgcacaggaagcgaaacttcccgccaagaggctgatcccaagcattaaacaaattattttagaattctttttcatcttttctcctgccttatttattcgccgcctccgcgttatgcacaccgtttccggaaagcacgattcccgtggaatcgctttcctctataaacttccatacgcctttcgcggcagaaaagtatacgaaattgtccgtcagagaaatattttccgattttgccacgtttgcaaggtaatatttttttacggacgccgatcggtcgttataaaacagattattttttgccgtacaatcgcccgcaccgacaaaagacagtccatactcgaaatcgccgttgaaaaaattattttctatcgtaattcccgtgatggtgcccggtttgatctctccgccgaatcggctgacaaagatgtccgccgtgcttccttccgcgcaattattgataaatttgcagttttccacggtcacgttgcggggaatcagcccttcgttgaaatatccgtcgaaagaactatgcagactgacggaaccgtgaatcacattgtaaaaagtacagtttcggatgctcgaattctgcgtctgacaaaggatgccgcgattgcgcttgttgcgaaacacgcaattgtccacagtcaacgcgggggtacgggtgagatttcccacaaggtaaccttcttccacttctttgacccgcttattgacggtaatttcatataccaggccgtaaccgctcaccgaagtcaccgtatacgtctgtacgacttccatagcgcgattgtatatctcgataatgtcgcccgcctccgtcgggaagttggaggcagcgtcgggcgcgttgcacgtgatcacatttcccgaaacggaagaaacggtcttataaaaagtacatacgtttatcgcgtcgtcgtgcgaatattcataaatactgttggaaacgacgatttcgccgtagcagtcattcgtatgcaatccgtctgccgttgccgtcatcagtttgttgcttccttcccgcaacacgaggttggtacggttgagatagatatttttcgaagaatagagtccgaacgtcattcccaccgaagaatacacgttgcaactctccatataaaaatcactgcaatccgaggcgtagacggtataaaactcgtacatggtatatcccaccgataccgttttcccgatttcggggcgtttataatacccggccccgaacgtcagagtaagccggttggtcgcctcgtcgtaagaaccgtcgggaatcatttgaacctgatcccctgtggaattataacgcagcattccgtctttatcgggaatccaatctcccgttcgctcgtcgcgcacaaattccatatagttgccgtacttgattttgcccccgttataacgataattcgtcaaatcaaagccctcgttaatgaggacggtgacgctgcgcgccgtatcgtccgcggcgaccaccgtgcccgtcaccgtcgaactcgtcgcataatcgaagtcgatatcgttaaaatgtatatcctcgcattcggacaacttgacggcttccgtccattccgtcatcataaattccgtagttttttcacccgtaaaatacacgccgctgagtccgtttaaaacaagggtagaagaaaaccgatacacgcctgcggggaaatatatttttttaagtccctccgttcctttgagagatttgagcagtgcgttcaaaagggcggaattatcggcgttggaaggaagaatccctctgtccgcaacattgtataccgccgcgaacgcgctctccgacggaacgggatatctcgtttctttcattttttcctcgtccgcaccgacgacagagggatcggaaagtcctgattgctgcgaggttttcaaatttttcctataataatcggcgcttaactgtcggcaaagcgtatccaagtccatctcctctctgtcatcgggctgtgaactgtcgccgcttccgctgtcgaaggaattgccgtgcgaagaagaactatcgttcaaagaatcgtcccttcccttttgtccgcaggaagtcgctgcaaacgctatcacaaccgcgagtatacagataaaaatttttccttttcccatctcctttttccccttttcgtcaatgcgtctttttatatgcctgatatgccttgtcgtaaatctctgccaatttgtccacattataagccgacaaatcgttcaaataggaattccagtccttattcaaatctttcttgccggtgataaagttatattccatattcttgatataagcgtccactcctgacgtgattaactccacgtcgttatagtcggtactggaaagcttaatttcctgcgggaactgttctttgagataaggcatatagcgctcgctgagtcgattcagctgcgtaatggttttatcgttcattttgccgacgaaatcgtatttccaatacagcgccgaggcagtgcccacattcggcgtgatcgtcgcgcgatattcttcctgggtcccggtccagtcgtcgggaacgtggaatgtccaggaagtttgtccttcgtcgtcccaagtccagtctatcccttccttgccataggcgatcagctgacagccgagatcggaatataaaatgtcgagaagccgggcgatttcacggacgtaaggcgtccccgtgggaatcaccgcgcccgtcggctggaaatagctgaacccccattgcaagggtttttcgttataataatcgctcgtgagagggccgaacgttgtatattcgtccgcgcgatcttctccgacgataatataagccgcagccgcacagaacgaccctaaacgcgaagcgtcgccgtccagcccctttaccgccatctgtgcgtccgtcttgatggaaaacgtgctttggtcgagcaagccttccccatacatgacgctcattgtttcgagatattttttatacgcttccgtctgaggaacatacgccacgccgctgccgtcgttttccagctccgcgccgttggtcacgtagccgtacgacgcgagaatgaaattgcgtaaatattcaagttcctttgccgtaacaggaatttcatcgtcctttttgccgttatggttggcatcgtattttttaaagaggcggagaatatccacgtattcctccaccgtggcgatatcgtccgcatcgggaatcgccgcgccgtccggcatcgtaacgccgtcttcgcgcagattttctatccactgctgattgatatacatcttgaacgtcaaatccctcggcacatcgttgacggaaagcgtcgaatacatatatccgtcttcgagcatagcgacctctttggcgctcgtggaagtttcaatgttgaaattggcgtcaagcaattgtttatacacgggcatatagttatcgataagatttcccgccttgacgccgcccgcttcgaggttgtcatcgttgaacgccacgagcgcgccgtattgggaataaataacctgttcggaaatggagttattaaacaggaacaaatcgggcagatttttcttgtcctcccatgccgccgagcgcacactggtatacgccgacgtatccacttccgtaaaatcaaattttaaattagtcagttcggaaaggatcttgaacatttccatgctttcgtaagggggatttaagctcccgcgcggcacaaaaatattcaaagtcaccgcctctttcacgatctgatagggattttccgccgtcccttcgggcaggaaattgtccggatcgtaaggaacgctctttcctccgcaagcagaaagcgccgccgtgcagaagatcagaccgctcattagaagcaccgctacatttttcttctttttcatgtctttgtattcctcctttttgttttttaatcagcctttcaatccgccgatcatgagtcccgtttcaaaatatttattgaagaagggatagatgacgatgagaggaacgctggaaacgacgattgtcacatatttgagcacttcactggtaagcccttgctcgccgatgccgatatcaccggacgaggaagcgtcgttcgccacaagaatacgctgaatcacccgttggaggggaaacaaatcgtcattggtgatatagagcagagaattgaaatacgcgttccaatagccgacgatagcatacaggagcatgacggcgatgatcgcacggcagagcggaagaacgatcgtgagaaaaatacgaatatttccgcatccgtcgagcatggcggcttcctgcatctcccaagggagggactgcatgaacgtgcgtatgacgatgacgttgaacacactgacgcatcccggaatgatcatcgcccagacagtgtttaacatattcagtccctttaccacgatataggtgggaatcatgcccccgctgacgaacatcgtcagggaaaaatagaaactgaaagcgctcctccccttcatatccctgcgggagagcggatatgccgcggtgaattgaagcaccagctgtatgatcgttcccataaacacataaaaaagcgtgtttctgaatcccgttaaaatcgcattgtttgataaaattttggcataattttccagagtaaattctctgggaatcaaaaataccgcgcctttgttgaccattttcgccgacgagaacgaatttgccaatacgtacaaaagcggcaggcacgttacgaacgcaaacgcgagcattaataggagcacgatataattgaatcttttatccgagcctttattttctaccatcgtttttcctcaccacaaagaagtttggctgacctttttggaaattacgttcgcaacgacgagcaagacgatattaatggcggaattgaacagtccgattgccgttgcatacgagtactgcggcacttttgccagcatggaaactctatatacgtaagtggaaatgatctcgcttctgcttaaatttccgctcgtctgcatcaaatatactttttcgaagccgacgttgagcatattcccgatgctcatgatcagcatgatgatcatcatcggaagaatggtgggcacattgatatgcagaatacgctgtatccttcccgctccgtccaaaaccgccgcctcgtgcaactctttgtccacgttggacaaagtgccgaagtagacgatggaccaccaccccaatccctgccaaagaccgctgaacacataaatcgtcgaaaaccaagcgtcgctttccataatattggaaggcgtgcctccgaatgccgtgatgatcttattgaacacgcccgattccaaatcggaaaaagaaaacagcataccgacgagcacgaccgtggaaataaaatagggcgcataagaaatgatctgaacagattttttcgcccaattccagcggatttcattgatgaataacgccaaaatcacgggaagaacggtattgagtacgatcgaataaacgctgagttcgagcgtatttccgacgattgtccaaaagttaggcaatttcacgaaattgataaaatgtttaaaaccaaagtttcccgtccagggactgccaaagatcccctgataagaggtataatccttaaagccgatgatcgtacccaaaatgggaaggtaatgaaatatcagcacatagacagacgtgggcaaaattaaaagatagagggtccagtttttccatttcattcccgatcccttctttcgcgcggacacaaggcgcgcccgggtatccgcgttttcgttcttttcggcgcttacgttctcccgaatcattcgcggtttttcctcctttttcgtgtttttttacttttttctcttatagtatagtatttattacttacaatttcaatacaaatagttgccgcatagatatagttttttatctttttttcgcctttttcaactttttttcgctaataacatttactttttatccaaaatatgttacactgacagtgaaaagataaacagcggcacaggggatttatgaaaagttataaatttctcaaacatcatatcgtcttcgaatacctcgattccgattcaacgttgagtcttaatccgctggtaatcggatatgaaagatgcgaaagcaccaagggagtcatcggtcctcttacaaggacgagatatgtttttcaatacgtcttcaagggcaaagggaccttgaccgtcgcaaacaagacctataaaatagggaaagacacgctcttttttctgccggtagaaaacgtatcttatgctccgaataaaagcgacccgtgggaatatctgtggatagaatttacgggcttgcacgcgagcaatcttttgaaaaccgcaaagctgtccgcacagaatcccatttttcgtcccaaagaccccgatgaatttttcggcgtatttgcggatatgatcgaagattgcgtgacgaacaaacagcgaaaatattatcagtacgcgtgcgcggcgagtctgatgaaaattttttattttatcatcaaacagcaaaacgaaggcgcctcgactgcaaaaggaaaagaggagaataaaattctccccatcgttcagtacatcgaagcacactattttgaaaacgacctttcgttgaaaaaaatcagcgaaaaattctttttttcacccccctatctctcgcgtattttcaaaaaagtgatgaatatttccccttccaaatatatcatagaattacgaatcaaaaaagcgcaggaaatgttgcaaagcaactgttttaagatttccactatcgcttatgcctgcggatattcctctccctattatttctctttggaattcaagcgcgccgtcggcatctccccctccaaatatcagccggtggccatagaatgaacgaaagaatggttttcttcgccgtttctatatttttcatttattttttctgttttcccgcctgaaatttctcaaaatatcctaacgcagcaaaacacccctctctttccgctttgaagcgtacggaaagagaggggtgtttttacctgttgcttttaatcggcaatatcgaagacggcgccgtaaagtcgataggtaaaaatattttcattgtcccacgagttatgccccgtcgatacgacgacgccgatcctgccgctgtcgggaatatagccgcgcccgtcgcggacgatggcaggattgtgattgcgctcaaaacccgtcgtattcggtcctacatagcccgcgatattccaggtataactgcccgattgcagcgccgcgctgaccgcttccatatccgcaaggccgtctacataggcaagtacgcaatgagaattgacaagtgtcttcgtcacgtccgcgggatttcgctcgttcgtgaccccgaacacgtaaagccttcccctgacgggatcaaacgcgaaatccacgattccggcgctgcacttgattccctgcgaattgacgatgccgttatgcatcagatcggacgtaaatttgcgttcgggatgatcgagatcggaaaaatcccagcgttggattcccgcagtgccccttgaactcgactgataggtgagaatcacctccccttttccgtctacgctcgtaagagtcggcattcccgtcccccattgttcgggattgatatcgtcagtcttattgtcgtaccagggtacgatgggattcagatcgtcaagtttcgtccagggccccgctgccgattttgcaacggcaagcccggtttcattgcggttataatcgtccgtcacgcaccccagatatgccatcaggtaagtatacgtttctcctttataggcaaattctcctttgatgacggcgggatcgcaggtatggcgcgcatcccaggtgcctgccgtaggggagagcgcgatgctctgttcgctgaaaagccacttgccgtcctcttgtttgacacccttgcggtagcctatatagtccacgatcactccgtcgtccaaattagtacagtaccaaatgtgcaggacttcccttccgtcttccgtatccgcgatgacggcggggcagtaattataaaatttagtttcggacatatcctccccgaacaggattccttcaaaatccaccgactgagggacgtcgtccttcgtttccttctgcaagacgattttgacggtttcctcgaaatcgaccatgtccgtagtcattgtgccgtccgaatgcacccgatattcataggtttcgtccttaaatttttcagtgacgaccgacccgttgtacgtataaacagaccgtcgggattggagcagccctaaatagctgatcttcaccgtcatcccgccgttttcctcaaattctaccgtatagagctgaaaatcggagagcacgctttttccgttcttttccgcagacagaaggacatactttccctctatcgtttctcctttcggcgatccgcacgccgccgtcaaacacaaaaatagggagaaaagaacggcaaaccatctttttatattttttttcataaaaacgattactccttacgactttttgcccgctatctgacttcaaatacatatccgtacagacggtaagtatgaagcgcaggccattgtcccttcgccgtccagtcgggatagtcgtcagccgcatcgctgaccgtatagacgatggggatttcaaaggggttgacaacggcgccgtatgcatccgttacaatgcccatgttgtgattgcggaaatgccccgtcttctgcgcggtgacggtgtcgcacacattccacgtatgcgtcgcgaacagcgcatcaaagcccgtatcgccgagttcgacgtacaaaagggtgttgctgcccgagatccaatccacgccgccgtctgcgggataaggaaagtcctccttcaaacagtacagccgttttaaaaacggatcgtaagcaaagtccgcgttattgatgcagtccgtctgtcccgaggcgttgacgacgcctttatcgtacagtctaccttcgcggacgagcttagccttcgaaatatcggacaaatcccactcctctacatatacgtaagtgccgctcttcactcccttggtgtaaaagagcaatattttccccgcattatccgagctgatcacgcagggctgaccgtatccccagctggatttatcataatccgcagaagtatagaagtccgcgatagggttgagttcgtctgccttgatatacggtccctcgggattttttgccaacgcgatgcccacttcgttgcaggtgcagtcatacgttttacagccgagatacgccatcagataggaatacttttctcctttcatggtgaaattccccttgaccacggacggatcgcaggtgtgtacgtcatcccacgagcctgccgtcggagaaaggacgagctgtttttccccgaactcccatctgccctccgcgttgagcgcgcccttccgatacgccacgtaatcggtcacttgaccgctgtctttattgctgcaataccatacgtgcatgacgtcgtttccttccatcatcacgctcgggcaatagttatagaaattttcgtctttggattctccgaaaagttcttcgaaaaaggaaacgcccgtttgcgcggtttgaagcgtaaattcagcatcgtacgcatacgacatgactaccgtctgtttattgactttgccagaatacgtcatcctgcccgtgttctcctcgtactcgtacttataagttttgactccgaaaaggatatttaccgaacttccctctacggaataggtgccctccgtttctgttctgcccgaataatcgatttcgtacgccgtggcgacgcctccttcgagtcgaatacagttatagaggaaagaagcggtgatgtcttttcccgcgacggtcttattcgtcagcgtataccagccctccttaccgatttccgttttttccgagcccgtcgaaacgctcccggtatccgtcgatgtggatgcgcctcttcctgtccccccgcagccgctcacggcgccgcaggagaaagcccccgccaaaacggcggcaagtatacgtcttttttttcgatagagatttgccattttccttttctccgaaatgttcgccgtatccgggaaggaaatgcccgatacgcttcgggcttttccttcccttttttatcaggcggaaatatttactttaaacgctgccagattctgcgtaaacatccaattcgcgttgtctgcctcgatctcgcaatggttatagacgacttccaagcagtcctcgccgttgacctgtccgtaagcgtcggaaacgatacagccgctgtaaattctttcatattgttcctcggtgtccagcatcgtccagaccttgatgctcttccagccgtcgagaatttctgccgtataaagttcttcttccgcgatggacgcgacttcgatgcgctcggcgtaattgggattgagcgctgcggagggcgaataatccttgaccgcaaagaatttttccttttccgcgtcgtaagcaaaatcggaattagggaacatcattgccgcgtcgccgcctgaaaggttcccgtttgtgggcacctgtaccgttcccgaaacgagatcgacgtctgtctttgcctcctcggaatagatcgcgcccacatccgccgcatcgatatccacaaaccgggcgaaatgtccataggtatccgcataagtatagaaaacgcgaatcttgctctccttattcaaattgataagcgaaggggcgtaacagccgacggaagaagatccgtaaatcgtgccgtcgaactcgataaagggtatcgaagcggctttcgtccaggtacccgcgatatcctgcgccagcgcgaaaccgatctgatactgtgtgtcgttggttttgtccgtagcgcagtacgccatcagccagttataactgacgccgttgagccgataagcgcccttgacgacggatgcagagccgatataggcgtcccacttattctcttccccttcgagaacaattgtttcgtcaccgtaagcccaatcctttttctcttcgccgtatgccgcgctcctcacgccgatggcgttatcctcttcgcccgattcgccgttggtggtatacacaatataccgcgtttcgccgtcgtcgaagatatccgcatccttgatatagtgcccgacggccgcctggggaagcccgtacacgacgggctcgggcgcgccggaagagttcgccacagaacttgaatcggaaccgggcgccgagcttgccgcgctgtcgccgttgccgccgcacgcggtaaaggcgacggaacagatcgcaatcacggcaatcgcagcaaataattttttatttttcattttcgtatcctcctgtatcgtcaatcgctcagcgcgagaagttcggggatcgtcgttcccgaaacgtaagaggaaacgaacgaaggggtcgtactataaccgccgaacttatttaccgaaaaagatttgttgagataggtagccgcatgaatcgtgactgccaaataactgaccgtggagcctgcccccatcatttcggtgatgccgttattgctccaactcgcccgcgcaaaagaggtgaacgggatccatacccacccttcaaagccgacgggaagggtagcggtaggacgggtcatatagatggtcgtcttgcccgtgttaaggtcgtaaagatagtagcgatacccctgctgaatgttgaaacgatcgctcacgccgttgactttgcagtccgtttcaaggttaaaggaaacctcggtgtcgctgtcgttttttgcccagaaagacacgcccttcctctccgcccagctgaaattggcgccgtcggagagggtaatcgccgtataggcgtcccctgccgcgttgtttcccgtcgcagtgagcttcatggcggagtcgccgtaagaatcctcaaccatttccactgtgccgtaagagccgccgtcccaaatagagaaatcggaagccgccttgccggttcccgtcacgtcaatggtaacgtccccgagcatttctctgtccactgtgccgaaggataaagtccctctgttgtccgccttatcgctgttgacgacgaatttatcgttctgcgcgctcgtcagtgtaagaatcttagtataggcagatcctttttcgccgggtatgcccgtataataaccgatttcgccgatcgttacggcaaaatcccagttatacttggaattggtggtgaggataagcttttctaccgcctcgatattaaattcaccgaaattcaaagcgagagaatccataggaatcaccagtgagcccgtttttcccgcagccacgttgacggaatgatagagcacggaaccgaccaaataactcgcctttttgcccgcgtcgaggaaaaggatctcctttccgtccgtacaggtgtcgtatcttcccgttcccgcttgcaagccgaaagtaagccccggcgcacccttatcggcgcgatactgaatcatcagataggacgcatcggaaagatccaccgtttcccgatcaaaactcacggagagagtctgccagttatcctccgcatctcctttcgcggtgcccgtccaggtacccgcattgtcgaacgcgtactcgcccgtacggaagggataggcggtaaattcgggatattcaggttcgggcgcttccttatccgagggcatttccatgcagtaagagcctacgatggaatcggtataatatttgctcttttcccgttccgctttggaagtatccacgatgctcgtatacgagcccccgtcggaagggtcgcccgtatagtagccgaccgagccgatcgtcatcacatagcccgaattatacagcgtattcgccgtaaagtaccacgcggaaaccgtttcgagcgtcttggtgccctcccattgccaaatcatttgatccaaaggcatcagcagcatcccgcaatccccgcttttgaaggggattgcgtcaaagaccgtttcccgcgtttccacctctccgttttccccgacaaaataaacggtgctatttccttccgcgcccgcgactccgccgtgcgcgatataacgattgctgccggaaagaagcccggcggtcagattaggatttcccgcgtctacgcggagttgtaccgccacgtaatccgcggatgtgagatctgccgtcgccgcgtccgtggaaatctgtacgaattcccaatgtccgttcgcattggcggcattatacgccgcagcctcttctgccgtaggcatggtgaacgtaggcgcgtatcggaacgcgtccgcccccgtcgtatacggatacgtcattcctcccgacgcgtcaaaagcaacggcagtcaatccccccatagatgttcccgtaaaggatacggcaagagccgccgcaagcgttacggaaagcactgtcttttttactttcataaatagcctccctttttacgcactccgtgcgttttttccgattcaattttccagaagattcgtcctaagcagacgataaaatttttcgttgtccacatctaccgcgacgttgacgggcacatagcctgcggcgggctccttcgaaacgagcgtgactccccgcctattggtcgtatccaccttcacgtacttcttttcgaatttgcacacatcttcttccagcgtcgccaccgcgagcggatcgtgcatgacgctcttttcaaaggaaaaataggcaaaccaacgatccagccagagagtgagaagacgattgcaaggagtttccgagtcccgaaattccccgagcaggtctttatccagcacgcagcgaagggtcacgtccagccccaccatatacaggggaacgcccgagcaaaaaacgatgtccgccgcttccgggtcgcataaaatattccattcgggttcacacttcgtaaaccagccacccatcgccactatcgaatccacacttttcaatgccgcgggatttttttccattgcccgcgcgatgttggtcatcgccgcaagagatacgacgatgagttcgtccccatatttttctgcgcattcgacgagaaaatccaccgcgccctgcgtgacgggaaaagaagaatattccggctgccattgacagatatgctgtttttcaagaaatcgatcgccgtccttttgaaaggggtggaaaggttctttataggggaatctttcgcccgcgtagacgggcacgtctttcccgatgacggaaagcaatttctccgtctgttgcgccctgtccgcagtattgcggaatacggtggtaatgccgacgatctccgtctttttcagcgtggcggcgagagcgagcgcaaacgcgtcgtcaatatcgtccccgatatctgtatcgataacaacttttttcatataggcgtttccttcgtcaataagttctgtaaagagtgagatccccgttgggcttggtcctgtcgagcggagaaacgtacccttcgcgataggcgggccaagcgactgtaatccccagcttttccttggctttttgatatgccgcggactgcatctcgatgacaaaatccagattcctcttctccattgccgccaccgtagaattataatattgcaccgcctcgtcgcgatcgctcgccttgatgatatagagaagatattgggaaatcatgctctcgatgcgggtataggaagtattataatcgtcgaagcgctcgttcgtcgcatccacgacaaaatgagtcgcgttgtaatcgtaggcataaatcgtcagaggacgtttgagattggtgcggtaaagctcgctctccgttttaccgttgttcgttttcggctgtatattgtcataatattgataattgatgagaagatcaaaagtcatcatcccgaattttgcggtcgtctgactcttgtccgcttttgtgtccaaataggtctgcgtatagacgatctccttctgcgtatcgtctttccacgtccatgtttcgccctctacgccgaggctgatcagccgctgtccttcgtcgctggaaaggtagtcgaaaagcttgacgacgagatcggggcgtttacaattggtggagatcatattgaagagatagccgtagcctctgatatccgccaaaacgggtgcgtcgccctcttcgttggtgatatacatactcacgtattcgtagccgtcgtcctttgccgtgacgtagtgcatctgataatcctgcggagtaacgagcgtggcaaacgctttcccgcccgcaataaccgatccgacaccgtcatacgtctgcgtgaaattggattcggaaataagattgttgccgtttaccttcgtccgatacaggtcgtttatataatacaggacgtcggcatacccctcctgcgtgaagcgatagagatagttgccttcctcgtcctcgaagggaacggcgaaaaactgcgcgagccattcgagagaggtacagcccgaactcgtgaattgactgagctgcaaggcggtggtgatctgtccttttcccgttccgtaatagttttgcatcgcccattccgcagcggctttgaagccttcgggcgtggtgatatagccctgccattcgactttttttgtcgcgccggaagcggaggtgtagcttacatagccgtccgcgcctttgagatttttttccacatgactctgccatgcgtcaaaaatatcctttctgaccatcataccgccgttcggctgcaacttttcatcgggcacgtcttcgtagctgtaatagtgattgggaagaccgtacgttttgccgttgccgtaagaccaccaatcgaacacatcctcgggaaaatgttggtagagcgtgggcgcccatttatccgcgagagtatttatgtcgtaaacatacccttgttgcgcgaggctggcgatcgttttcgagctcgacgtgggaacggaaacgacgtcgggaagcccgctggaaataagcgtcgccagcttggagccgtcgtccgtaacaggcgtcatgaacttcaccgtgatgccggtcttttctttgatcttgcgtattacgtcgttttccgcaggaatcgcccagctggaaacgtccacataccactctatcgtcgtttccttgcccgcgtccaaatactcccagctgtttttgtcggcgggcgtttcttcgtaatcgggatacgtgagctccgccatattgtactcgtcgtagctgacgttgtgcgatccgccgccgcacgccgtgcctgccgccagcagaacacaaaccccgaatgaaatcagttgtttcccgatttttttcatagattactcctttatgcttttcgtttttattctatacgaaagggaaaacaggtttaccctttcagcgatcctatcatgatgccggaagcgaaattctttctgatcagagggaaaagacagaggacgggaataatagagaggataatcgtcgcgttggacacggtggcggcggagagccgttccaattgttccgccgtcatcccttccgtggcggtcgattccttaatgactctgtaaagatagtattgcagcgtctgcaaattttcgttgttcgtatacagcatcgtatcgaaataactgttccagtgcccgaccgcaagccagagaatgacggtagccaaaacgggcttattcatcggcatataaatattccaccagattctcagttcccccgcgccgtctatgttcgccgcgtcgtgaatctcgttggaaatcgccgcaaagccgctttggacaacgatcatattatagacggaatagagtcccggaacgatgtatacccagaaagtgtcgaacagccccgtcatacgaatgatcagatagtacgggataagtccgccgccgaaaaacatggtgaaaatatttatccaataaaagacgcgcttgaatttgagattgggcctgctcatcgcatatcccaccgcagccgtgaagataagcgccgtcgccgtgcccagcaccgtccgcagcgcggtgatgagatagctgtgccaaagcgcccgacggacgaacaccactttgtagttttcaaaggtcaaaaggcgaggcagaaaatacacgccgcccttcgaatagtccgctccctgattgaaggagcctatcaggacgtaccaaatggggtaaagacagcacaggcaaaacagtcccatcaaaatcgcgttaacgacgtcaaacggatagacatggctatttagtctgcttttgcgggcaaggacgggaaacgccttccggctctccctgcccgcatagatcaggaacgcgacggcaaacagggacaacgccgccaggatacagaagacggcgaacaacgccttcaccgccgcgtaggtgccctttgtcgcctcgtcgatctccgcgtgggaaacataggcaaacaagagaaaaccgatcaaggaaaccgctgcgagcggcgagattatttttttcatcgcccgatagcgcgagggtgaaatattcatgagagaatgtaagcctttcatatcaatagatcccctttcccgtcacttttttgcagataaaattgctcgaaatcaacaagacgagcgaaacgatcgatttcatgagtcccaccgccgaagtgtaactccaacgataccacggatctttggtaccgtatttatagatgaaagtgtccaatacttcgctctttgaaatattgctgcggttttggaagacgagaagatggtcaatgccgttattgagaatgccgctgaccgacaaaatgaaaaagagcgtgatggtcggcgcgatagagggcagggtgatatagcgaatcttgtgccagcgatttgcgccgtctatcttcgctgcttcgtaaagttcctgcggaatcgccgcgatcgccgcgacatagatgatcgagccccatcccatgcctttgataagcgacgtagtgatgatgattccccaaaaataatcgggatcgccgaggacgttcaccttctctttgaggatacccgcctgataaagcagggtattgaaaatatttgtatcgtaatcgagaagattgataaagatgccgccgaatgccgcccaggagatgaagtacgggaaaaacgtaaccgtctgcaccgtctttttgaatttatcgctcaaaagttcagccgtcaaaacggcgaagatgatcggacagggaaaattgatacacagttgcagaatgttcagccccagcgtattcaccatgatgtttttaaagtcgggttcactcaaaaactcgcggaaattatcgaatcccacccaatcggaatattggatgacgcgcatcacatcgagctgtccgtcgccgtctttaaaagcgaggacgagtccgaacataggcgcataggcaaatacagcgaggaacgcgacgcttaaaagtgcaagacaaaaaagagtgacgtcgttgcccgtccaccgtccttttctcttttttcctttcgacgatgccgccccgctcttcgatgcgatcacatctgtcgatacggttttttcttccatattatttcacacctctcccctggaattttttatacaaaggtccgtgttttccatccgtcgtatcttttgtcacagaactgacgttatgtttaaatcgagcagaaaaatatccgcgcaagtacatatttgctcctttattatagaattacattttgcgtttgtaaacctaaaaatcatatagacatatccgaaaaacatagatttttatttttttaattttcgcttgacaatataaatttttgtctttataataaaattacggaggaaaatcatgctggaaatcaagtatatcaatttcatcgattatcatgctccgaccaccgtaaaataccatgtgcatgactgctacgagctcgtctactatcattccggctcgggaacggtgctgtacgacgagtataataagcagaacgtcagccgttccattcgcgcttccaagttgaacagcagcgacgattttctcaaagaacgcatcctttatctcaataaatcgcattcagaaacggagaagcgggatactttcacggcgaatacctattatatctttcccgccgagcttccccattccgagattcacgaaacgacgccttcccttaccgcgatcggatttacgaccactgatcacgagttcaagagagtaaaatattccgacgatttttcgacagtccatgccctgcttacccgtatgcgaagcgaatacgtaaaaaagcactatcatttcatcgaagtcatcaggcaccttctatcgatcattttgatcgaaacggaacggaaggatatttccaataaagaagatcccttagaatacgcaaaaaattatatcgagcaatattacatgactgatatcgacctaaacaatctttcctccgtctgcggatattgtcccgattactttcgcatgattttcagacagaaatacggcattccgcccaaacaatatattttaaacaaccgcctgcattttgcgaaatcgcaactgtccaacacgtcgctttccatagaagaaatttcttctaattgcggattcgcgagctataaacaattttccgacttttttaagaaaaagacgggaaccagtcccacgctctaccgcgctgtttcggcctcagccgaaaaagactaaacctcgttacgccgcaaaaaagttttttatttgaggcgttttttcctttcgtttgacggaaatcaaaagtgctttttttaaataggcatgagcagctgtctttcgcggaaattttttccctttcaccttttttctttcgccacgaaaccaaaattcccggtaaaattgtgaaaaatttattttcggatacagcccttccctgacagtcccctctccctgcgtttcagttaggactttttcctttttctcatcggtcaaccttttttccaccacgcgatcgtaggcgtggttttcgtgcatgaaaagagccgtctgtcgaatgcagacggctcttttcagataaactgttttaaagattgattttttccgcgacgatatatttaggtcggctctgcacctcgcgatataccatcgaaatatagatattagaaagcccgtgacaaactaacgcgatgcttcccgacaacgcgacaaagggaaaaagccatgcgaccaggccgccgaaataaatcttacagcaagcgagaacgatgaatacgataaagcaggcgacgcttaaaaaaccgcccaaaattccgagctttaaaggaagcgtcaagggataatcggaattgggaaaaacgccgctctcggcaagtttcaccatctttttcaaggtatagtgcgtttcacccgccacgcgttcggggcgatcgaattcgacgatcgtctgcgtaaagcccacccacgtgacctgcgcccgcaggagtctgtcgtgctcgccgagggaaagaacggcgtccaccacctttctgtcgtacagtttgaaatcccccacgtccgcgggcatatccaaagaagtgattttcctcatgaagcgataaaagaaagcggcggtggcttttttaaataccgtttccccctttctcttgcgcctcttgccgtgaacgacgtcgtagccctctttccacttttcgatcatttgcagcgcgacttcgggcgggtcctgcaagtcggcgtccatggcgatcaccgcgtcccctttcgcctccgcaaagccgcataagagcgccgcctgctgaccgaaattgcgcgaaaagctgcatactttcacacggctatccttagcggcaagttctttcaaaatctccttcgtcgcatccctgctgccgtcgtttacaaaaataatctcaaattcttcctgcaacgattccatcatgggcaccaccgcttcgtaaaagagcggcagagatttttcctcgttgtatgccggcaccaccagcgaatatttaggcataaattcttctcccgaaatttcttgtaattcattatactctctttcttcccgtttgtcaatcgtccgccgagcagttcgcacatctgccgataatttttcacaaaaagattgcgtttttttgccgcctatgatataatcaaaatagattcatctagcgcaaaaacattattcggcaacttttcgcaccctttgctccgcgcttcgaggaaacacgcccattcgctttccacgcgccctatcttgcggaaacttgtccaaaaatccatttattctcgtttacgcaaacgcgtgaacgcacttaaaaaattacggaggggaatactatgcaaagtaaaaagatgtggcagaccttcgcggcgacaattgtctttctgctcctttcgtcccttgtggcgtggggagtttcccgtttctcctattcatggaaaatttttttcgggatcggttttggcatcatgctgattgccatcgttcccctatttttttatcaaaggcaacccaaggcgcccctgctgacgctttttctcaacattttctcctgcggttttctcgtcggatcctactttctcggcagtcatctccgcctttcccttcccaccgccgttttttccgcgcttgcctccgccgcttcctatgtcctcctcatgcttcttgcggatattcccgtgctcaaaaggagccgcgtctatctcatcgtcgtttacattctgtggtgcgcggcgctgtttacggcgggcggaattttgtggacgcaaaggggcggcgaaaactttgccgcctttaccctcttctccgtcgttacggctttatttgccctcggttctcttctgccctcggaaaatacggacgaacttctgatttccctggcgctgccttcttccttcgcggcgggaatcatcgccgtaatcgttcttttggtgctcttacaagcggacgattgcagctgcgattgctgtgacgggggcgattgcacagactgctgcgactgttcgcccgatttcggacaaagaagaccaaaacacaccacgatgagcgatttgagcggccccgccaatccgtaagattagctttcaccgttctctcttctccaaacgtcctaaaaacgcgttctcttattcggctcccgcttttccgatcaaagccgctcgcagttcaagcgccggtaaatagaattttccccacgcctataaagacaaaaacggcggaagcgcaattgcgtttccgtcgtttttcctttcagctgcttttcagtccgatcgctcagccgagcttttcgagaagcttcaaatcgatgcccttttcgccgatcttgatgatctctaccttgactttatcgccgatattgaggacgtcctccacctggttgacccgttcggaggagagtttggaaatatgcaccataccgtccttgccgggagcaaattcgacgaacgcgcccacgcgggacaaaatccgcacgacgacgcctacgaacatatcccccacttcgggatcgtgcgcgatcgactggacgatcgctttggcgcgctctgccgcggaaacgtcgccgtagcaggcgatgcacaccgtgccgtcctcttcgatgtcgatcttcgtgcccgtctgctcgatgattttattgatgactttgccctgcttgccgaccacgtcgccgatcttctcgggactgattttaaaggagatgatcttgggcgcgtactcggaaagatgatcggcgacttcgggaatgcacgcgagcatcttattcaaaatgaatcttctgccttcctgcgcctgcgcgatcgcgtcgagcatgatctgttcggaaatgcccttgatcttgatgtccatctgaatggccgtgatgcccttttcggtgcccgccactttgaagtccatatcgccgaggaaatcttcaagtccctgaatatccgtcatgatgacgtatttgcccgtttcgggatccttgataagtcccatggcgcagcccgcgacgggagcggaaataggcacgcccgcatccatcagcgccatcgtggagccgcatacggaagccatcgacgacgaaccgttggaggacaaaatatccgaaaccacgcggatcgcgtacgggaactcctcttcggagggaatgacgggaatgagagcgcgttccgccaaagcgccgtgaccgatttcgcggcggccggggcttctcagcgccttcgcttcgcccgtacagtagccggggaagttatactggtgcatatagcgcttttcttcttcctcgtcgaggccttccattctctgcgcctcgtccagcatcccgagcgtacaggtggtgagcgcctgcgtctgacctctcgtgaacacggcggagccatgcacgcggggaagcacgccgtgctcgcaccagatgggacggacttctttgagtccgcggccgtcgggacgaacgcccttgtcgaagatctttgcgcggacgatcgccttcgtgatataataaacggagtctttaatctctcgcgtctgttcgggatagatttccgcgaaatgttcgagcacgtccgcttccacttccgcctgtctttcttccctctcctgtctgtcgaaagtatcgagcgcccaaacgagtttgtcgtaagcgtaagccttcacagcggcgtcgaggtcctcgggaatatggtaaagttccatttcctttttgggtttgccgacttctttttggatctccccgacgaaagcgcagaccttcttgatctcttcgtggccgtacatgatcgcgccgaccatttccgcgtccgtcacttccttggcgcccgcttcgatcatcaaaatggcgtctttggtgcccgcgagggagaggtgaatggtgctcttttccttctccgcgaggccgggattaatcacgtattttccgtccacacaaccgacgatgacagagccggtggggcccgcccagggaatgtcggagatggacagcgcgatggaggaaccgatcatggcgatgggctcgggcgcgacgtcgggatcgacggaaagcgcggtggcgaccaccaccacgtcgttgaagattcccttggggaacaggggacggataggacggtcgatgaggcggctgacgaggatcgccttatcggacgccctgccctctctctttttgaaaccgccggggattttgccgacggcgaacattttttcctcgtagtcgacggacagagggaagaaatccatgccttctctcggcttttccgccatacataccgtgacgtttaccaccgtgtccccacaccgcacgaggcaggcgccgttggcctgttccgcgtatttgccgacttccacggtaagttctctgccggcatagtccgttttgaatactctgtaattgtcgagtgatgccattttgtaaaaattctccttaactgattctttttttgttcttgtcctcctgcgccgcccggcggcaagaggggtagccgacgtccgtaccttcgggcttgtcctttgccatctttaaaaaagcggcgcccggaacgaacatcgacaaaaaagggcggattaaaacaacccgccctttcgtgccgcttactttctcaaattcaacgcttctacgatcgctctgtatctcatgatgtctttttctttgagataatccagaagaccgcggcgcttgccgaccattttcaaaagacctcttctcgaatggttatcctgtttgtgggagagaaggtgctgattgagatggttgatgcgctcggtcaaaagcgcgatctgaacctcaggggaacccgtgtccccttcgtgcgtggcaaattttgcgatgatttcttttttgtccatttgcgtttatcctcctatggaacgttatcgcgtacctctaagccgaacgtggagaatcgttccgcttggcggccgttattattattttagcatattccttttcgaatgtaaatcaaatttgcccgaaaaaagcgtttttcttttggattatttcgtcgatttttccgatatacgtctttaaatccttctgag

SEQ ID NO: 3333 - DNA, 32759 bp, Unknown
  16S sequences of unknown bacteria
ccgttcatcattcccgttccaacaacttacctatgagacccctccattggctttcccctattgagttcattgtccaatatgtttgacaaacctacaaaccgccgttcttttcctttttgccccatctttcccttgccaatcgctcttttccttcctataatagagtgactctgcgccgcccggcgcagccaaatccatctcggaggcgacagacatgaaactgcgttctcaggaagtccgcgccctcgcgccggaaaacgatcctctgaaaatcggcatgggctggtcggcggacgatctgtccaagccccaaattttgatcgaaagcaccttcggcgacagccatcccggcagcgcccatctggatcagtttgtccgggaatccgcccgcgcggtcaacgagcacggtggaaaagccgcccgttattttgccacagatatgtgtgatggcatcgctcagggccatgacggcatcaattattccctgccccaccgggaagccatggtcgatctggtcgaggcgcaggccaacgccagcgtctacgacggcggcgtgttcatcgccagctgcgataaatccgtccccgccatgttgatgagcatcggccgtctgaaggacatgagcgccatcgtcgtcaccggcggcgtgatggaggctcatacactgccgaaggaatacaccgtgaacgaccctgcctgcaagatcaacgaactgctgacgctggaacagatcggcaagttcgacgcctgggaaaagaccggcgtgatcccggagaagcagctggactactataagcatcacgcctgtcccagctgcggcgcgtgttcctttatgggcaccgcctccaccatgcagatcatggcggaagcgctgggtctgatgctccccggcacggccctcatgcccgccaccgcccccgagctgaaacaggccgcttacgacgcgggcgcgcagctcatgaagctggtggaaagcggccttcgggcaaaggatatcgtcacccaaaagagctttgaaaacgccatcatggtgcacgcggccatttccggctccaccaacgccaccatgcacttgcccgccatcgttcacgagttcggcttcgagctggacgcggacgctttcgaccgaatgcatcggggcgctcattacctgctgaatatccgcccctccggcgattggcccgcccagtatttctattatgccggcggcgtgccccgggtcatggaggaaatcaagtccatgctccatctggacgttctcaccgttaccggcaaaacgctgggcgaaaatctggaaaacctgaaacgcggcggcttctatgagcactgcgacgagcttctgcaaaagaaggctcatgagctgggcctgtccattgcccggacggatatcattcattccttcgaccatcccaagggcaccgacggcagcatcgccattctcaagggcaatctggcccccgagggcagcgtcatcaagcacaccgcctgcccgaagaatatgtttcaggccaccctgctggcccgtcccttcgacagtgaggaagaatgcatccacgccgtgctgaacggtcaggtgaagcccggcgacgcgatcttcatccgctacgaaggcccccgcggcagcggaatgccggagatgttctataccggcgaggccatctgtgcggatcccaagcttgcctccagcgtggcactcatcaccgacggccgcttctccggggccagccgcggcccggtcatcggtcacgtcagcccggaagccgccgcgggcggtcccatcgcgctggtggaggagggcgacctcatccgcatcgacgttcccgcccgggaacttgccatcgtaggggtaaacggccagcccaaaacgcccgaggaaatggagcagattctccaggaacgccgggcccgctggcagcccaagccgcccaaatacacccgcggtttgctgaagctctactcccagcacgccgtcagccccatgaagggcgcttatatggaatgagcccgtcttttaggcagaaaaccctttgccatagtgtctctcaagatcgcaacttcttccgatttgcgctgcaatgcggtatgctcttcgttttttcgaattcctgaaaaggctactgcagttcggagcgtgcgaccaaggaaggcctaaggatgactagcctcagaccgtgcagccaagcgcaagctcagcgcagggcttggccatcgtacactgtggggcagaccacaatagtttctggcgaaaaagctcgcctagggtaatcttttgataagctgcaaaaacccggatgaccgatcggtcatccgggtttttgcagtgagcctcctgacggagccttgccggcattaccggcgagtagtccgggtcttcttgggcagcggtttcacttcccacagatacttgctcatcacgtagccgaagcgcttcccatacttcacgtaagcccatccgtcgtccaggtattcccgaacgatgatcttcgtgccgtagggaatgttgccgatcttgttgccggtattgctcttgggcgtactccgcagattcagggacttcccgtctttcgtatacacatagcgtgtatccgccagcgcaatcagcggcagcagcgtcgtcgcaacaatcacgacaatgcacaggaacgcaagcgtctttttcatccgaagcctctcctttcgcaaaccggatttcccgcagggaaaagaacaaaccccgcatggcgaatgttttgcttcataatattaacatatttttacaaaaaagtcatcactttatcgaaagatttgtttcgtttctaattccttttgtaaaataaaaacaatattatttcaactatcgtcctccgcaaagaatccccaattcatttcgaatcacaaaggaatcccaactcttcgtttccacaaagaaaccgctccatctgccaaaagcagcttggggcggtttctctttatgcgtttttcagcaccgcttcatcacttcggcgaagaagcagatggtgtccttgagctgggccacggggatgcgctcgttggcgttgtggatcagtccccgctgctccttggacatgggcatgccgctgaagcggtacacatgctcgctgatggggccgtagtggcggctgtcactgcccgccagcatcagatagggcgagaccagcacaccgggataggcggcgctgatggcgctcttcaaccggttccacggctcatcgccggtctgggagaccgtgctgggttcgccgccggagacgagcttcacctcgacggacggatcgtccacgatggtcttcagccgggcgatggccgcctcgatggtgtccccgctgatgagccgcaggttgatgcccgcgtgagcagtggagggcagcacgttaaaggctttggagccctgagccatggtcagggcacaggtggtgcgcaccagcgcgttcagctcgcctccagacctgcggcacaccagatccagcagcggcccgaagcaccacaggttggcgaacagcagcttgtagccaaagctggattcccgacccagaatatcgaacatctcccgggcgggaggggtcagggtaaagggcatggcgtgatcctgaatgcggctcagcgcccggcccagaatgcccagcgcctgacggctggccggagcgctggcatgaccgcccttgccggacgcggtcatgtccacgctgacggtccccttttccgccgttccgatcagcgccgcgctcttgctgacgccggggaataccccatccacgatggcgccgccctcgtccagcacaaactccgggtgaatgccgcgctttttcagttcttccacaatggcgggcgcgtcgccgccgaaaatttcctcatcgccgccaaaggcgaaatacacgtcgttttccggcacgaagccctgcccaatcagcatttcagcggcttccatcacgccgtgcagggttcccttggtgtccagcgtgccacggccccaaagctccccgtccttcaccaccgcgccgaagggcggctcctgccattcgttttcgttcaccggcaccacgtcatagtgcgccatcagcacggaaggcttcgcactgctcttgcccttccagtggtacagcattccccgccggcccaggatttcccgggggcaggttttcgtcaccgccggataggcctcggccagcaatttctggaaatctgtaaaggcctgcgggtcttccagcttttcatccgggtagctggccgttttcagccgaatcatatcctgaaagcgttccaacgcccgcttttcatctaccgggaaattctccgcttccgtcttttccatgggatagggcttgaattgcagggcccgaaccacgatcactgccagccagagcaccagcagccccagaaggagccataccagtgtcatttgtttccactctccttttccgttccgatcatgcctttccgatacagaagccgcgctgcgccgatggcgatcaacgcgcccacgggcaccagcacgctgacgctgctgctcaggctgggcaccagcaggaacagcaccaccataaacagcatgggagccgccgcgatcttcgggttcttggatacgaacaccacgcccagcgcgccgaacagggacggcaaaatgttgtcaaaggcgggcttcagcaccggggattccagcaccggctccagcagccgcagaccgaacacgccgatggcgatcgccaccaccgtcacaatagagctggacgcaatggcgatggtagagatcacctcgccctcctccgtcccggccttgaccttggccgcctgcatggcgttcagggcacagggcactttcaggttggtcaggttgcccgtcacgaagcccagataggttccgccggtgcccagcatgggcacgtaggtcagcacctcgataatgcccaccagccagtacatgggcgctacgcccagcagggccttcagcaccgccgtcagcggcggccacgcattgtaatacacgcagatggccagtggaacggccagcatcatcataagaagcagcgccgtccagacgcgcccgtaggtatattgtttctcctcatagggagacagctgcttgtccattctctttcctctttccctccctcttaagccatcagcgccgtaatgggaatgctcagcgccatcgcgcccaacatgcacaggggcagggcgtactgctccagccacgtccatttcagcacccggatcagaatgccgcacacgcccatcagcagcgccgagaccagcgccaccacgatggggataaagcccggcacgccgtcccgcacattggcgaacagaagccccagaaacgcggagatcatccccagaaacagcgcgtccatcaaaatcccgcgccacttttcatccttgccgcccaggctgttcatgcccttctgcagctttttcagtccgaacaggatcaggacgatgcccgcaataatgcccagcgtcatcgtccacgcgatcactgcgaaggtctgggcgctggtaatggtttccgtcaccccggcaccgacggcgttggcggcgatggtggctgcgggcagttcgtaggtcacagcgcccagaatactcagccgcagccacgggaagggcaggccgagaaaacgattcagcgtcagtacgccgatcaggatggacacggccggtgccagcgagaacaatccgctggacaggatcgtcttgcgaatgatccccttggacaggttcagctcccgggcgcgccgcacggccttcaccagaaagaagaccgattccgccagcactgcagcgatcacgatgccggacaaccagaacagaaacgggtcattgacggagaacggcatattctcccacctcccaggataagttcaggatcaatacttccgcattgtagcattcctgcaagtccgcgtcaatggcgggtttcagcgttcaatggtgtcgtcctcgaagcattcccgcatcagcccggagcggcccatcactctcccctgcccttccagatgggacgcatcgcccagcccgcagcagcggaagatgatctttcccttggtcctttcctccgttaccagcgtcgtcaccgaagcggtgggcataaagaacgcctgccacagcaccgccggagagatcatcatcagatgggacagaatcgccatgctgatgccgaaatggcagaacagggcgatggttttgtgattgttttcgcctgtatacaggtttccctgacgaatcagcccgtagcgggccaacagctcgtccaccccgacgacagtctcgtcgtagacctccgccacatcgccggtgcgaaggagcccatcctcccgccactgggtgggatgcagcagcttctcctgcgccgtccagtactggggcatcaggttccacggacagcggcgcatgccggtgtacggctcgtcgaacccgccccagaactccctcaaccacggcagtgtctcgccggtgcgccccagcgctttcagcgtgacgccggcggtgtcctgcgcccgtcccagcggcgaaagataaaagtcgtcaatagcggccgactgcagccgccgggccagcagttccgcctccacccagccctgctccgtcagcgtgtcgtgctcataatcggggtctccgtgccggatcagcaaaattttcattgttctttcccctttccgctgccttgcatttttaccactatatcacatttttcccgcgccaccaacttttttcgcccatggaaaaaccctcctgcgaacttttccatccgcaggagggtctctttcctgatttcttttccgtcaggcgtcgatggaatcgtggaactgcatcggcaccttccgtccatacacccgcatggagcgcatggccatgcccggcaggctcttcaggatgcgcacccggaaggcgtagccccgcatcttgcccagcgggatgatccgcttgtggccgatgctctgtccctgagccagcggcacccagcgatccagtccgtccttggtgcaccagtaggcgggccagcgggtctccaccacccactccagcacgtgctggccttcggtctggtcctccatcagctcgatatattccgcgtccaccgggccgtcgaaccagacctccatccgttcgccatccagcagcgtttccgtcatgcccgcgtgaacgcccagttcccggttcaccagctcgcccaggctgcggaaggagtctacctgatcctcactgatcaggccgtcggtgtccgggatgcagccgatgagcaggttggcgttccggcccacgctggtcaggtaccgctggaacaggtactcggcgctgtaggtcttgtccgcgtccatggcatgatacatccagccacccttgtaggcgtgcatcacgtcccgcaccggcatgtccacctccacgggagcccagacagggtccatggggtcgccgggagagtcgggggtcacgttgtcccgctccggctccgtctgatagtgggcgcaggaccagcactccggcacggccacgccctgttcgctgccgctccaccgcagcacgttcgtgatgcccgggcagccgccgaagcagatcaggttgggggcgattcgcttgagcaggccgggaatatccgggccgcccttttcgggccggagaatgccgccgtcaaaccagatctcaaacagggggccgtagcccgtgatcagctcctccagctgccgcagcagcaggtcgttcagtttttcccgatccagcgtcccgtcctcccgggtgcaaaggtcgctcagatagcgtccgcccagactgtaatacaggcccggcttgatgccgtacttatggcaggactgcacaaattcccccactacgtcccggggaacggcggaattgcccacatgataatcatgcaccttggtgggccagaggcagaagcccgttccgtgcttggccgtcagcagagcgtaccgcgcccctgcggccttggccgtgcgcagccattgatccgtgtccagctttttgggattccagcactgaatatccgggatggggtcgccgaatttccattccggtgcaaagacctccatatcaaaatggaaaaagacccccagttcgctctcgtgccattccagcatttccgccgtcggttttgccagcgtcatcgtgtttgtcctcctgtttgcattgggattcagcttctcttcttctaaaaatagaaagaagcccagccgaaaaagttccggctaggcattcgatacggatcgtcaatttccctgtttggtgttcagcacttcctgccagagagtgttgtacaccgtcagccaggtcgcgtccagatcgttgaaatattcgcagttggctacagtctcgtcggaggggttcatgacgggattggaagcgtagtcctcgcccatcagctcgatggccgcgtcgttggggcagcagtagccgatggcttcgcagttgcgcacggccacttcagggctgcacagatagttgatgaacttttcggcgttctccttgttcttggccgccgcagggatcactgcgcagtccacccacacgttgctgccctcgtccggcacggagtaggccagcttgtcgttgagctcgatggcgtattccgcatcgccggagtagaccaccgccagcgcagcctccccggccaccatcttatccttgaactcgtccagaccgtaggccttcaccatgccggactgcttctgctggatcagcaggtcggcggcggcgcgcagctgggtgtagtcggtggagttcatgctgtagccctgcatcttcagcgcgatgcccatggcgtcgcggatgctgttcatcatcagcacctgccccttgtacttctcgttccagagcacgttccaggtcttcacgtcctccgcgtccaccatctcggtgttgtacaggatgcccagagtgccccactgatagggcacggaatgggcgttgccctcgtcgtagctggggtttttcaggctttccttgatgttctggaaattgggaatgttgtcatagttgatctcggccaaaaggcccttgttggccagacgctccacgcagtattcggacgggaacaccacgtcgaaagcgccgggattggcttccacctgcaccagcatatcctcattggtggtaaagcgcatgtagttgacgtgaatgccggtttcggcttcaaagtcctgcagcacggactcgtcgatatagtcttcccagttgaacacgttcaccacttcctgcgccagagcacaggcgggaagcagcagggcgatacagagcagaaaggcaaccatttttttcatgtgggattcctcctatcatattttttgacagggcaatctctgtctaaggaaaagccgtccggcccttcctaagccattgggcgcgccgcgcccggggagttttatgccttggtctcggcggtcctgcggttgacgatcaacagcagaatcagcaaaaccacgaacatcagggaggaaagggcatagtacacggggctgatgcccagcttggtggccgaatagatcagcgtagacagattctgcaccagcgggctggtggtgaaatagctgatggtgaaatcgtccagcgacagggtgaaggccagcagcgcgccggtgacgatgccctgacggcactcgggcacaatgacgtgggtcagcgcgtagccgggcgtagcgcccagatccagcgccgcctcataggtgtgcttgttcatctgcttgagcttcggcatgacggacagcaccacatagggcacgtcgaaggtgatgtgggccagcaccatggtgaaatagcctcggtctaccttggcgaagataaacagcagcatcagagagataccggtcacgatgtccggcatggtgttgggcaaattggtgatggtcatcatgatggcttgaggccgcttcttcatgctgtaaatgccgatggcggccagcgtgcccagcaccgtggcgatcaccgtggcgatcaccgcgatagacaccgtcacccacagggcgttcatgatggacgcattctggaacagttcgccgtaccagcggaaggagaagccctcccacttggcccggctcttgcccgcgttgaaggactggcagatcagcaccacgatgggcacgtacaggaacaccagaatgatccccaggtaaaacttcttgaaaaagttcttcatgcgatgccgcctccttccccgttaggatccgccttgcgcaggatggacagggagatcaggatcagcaccatcatgatcagggaaagggcactgcccagattccagtcgcctgcggtcaggaacgtggtctcgatcaggtcgccgaacatctgggtggagccgccgcccagcacccggggaatgaagaacgtggtcacagacggcatgaacaccatcgtgatcccgctgatcacgccggggatgctcagcggcatcgtcaccttcagcagggtcttggcttcattgcagccaagatccatggcggcctcgcccagcttggggtccatcttgctcaagctggtgtagatggggaataccatgaagggcaggaagttgtacaccatgcccagcagcaccgccccctgattgtacatcagctgcaccctgcccacgccgatccattccagaaaggcattgatcaggccgttatcctccaaaaggctcatccacgcgatggtgcgcagcaggaagttcatccacatggggatgatgaacagcaccaccagcgtggagcccagcttcatgtgccggtcagccatgaacagtgccgccgggtagcccagcagcagggaaaaggccgtgcacaggaacgccatccacagggaatagaccagcgtgtccacattgacggagccccggggaatggtggcggccacctcgtccccggccacggcccgcatgttttcccgcatgatgtggttgctgtcccagaacgcccggaagttatccagcgtcagctggccgctgccgtcggtcagagcgtaataggcgatcagcacacagggaagcagcgtaaacaggatcatccacagaatatagggcgaagcgaacagcgaacgcttcacgccgtggttgcgcttcacgctcacggtcagaagccccagaaacagcatcagccccgcgcccatcagcgcgtaggcccaccagggcagcgatacgttatacatccgcgatcgcctcctcgtccaccggcggctccggcatgggatgcatgatatgaatgttgtagggcacgatggtcaggcccacccgggagccctggggctgcatgatggtggagtgaaccttgaacaccgtttcgcctgtgtcgatcatcatttcgtagtgaacgcccttgaacagcacgctctgcaccacgccggtcagctggccgatgtcctcgcctacgatcatgatgtcctccgggcggatgaccacgtccaccggcgcgttctcgccgaagccggagtccacgcaggggaagttgaagccgcagaaatgcaccagctcgtcctcgatcatggtgccccgcaggatgttgctttcgccgataaagttggccacgaaagcgttggccggctcgtcatacacgctcttggggtcgccgatctgcaggatgtggccgtcccgcatgaccacgatggtgtcgctcatggtcagggcttcttcctgatcgtgggtcacatagataaaggtgatgcccagctgctgctgcatactcttgagttccagctgcatctccttgcgcagcttcaagtccagcgcgcccagcggctcgtccaaaagcagcacctccggctcgttcaccagcgcccgggcaatggcgatgcgctgctgctggccgccggagagctgatccacgccccgcttgccgtatcccttcaggttgaccagctccagcatccggtccaccttcatgtcgatctccttgcgacccattttcttgatcttcaggccgaaggcgatgttatcccgcacgttcaggtggggaaacagcgcgtatttctggaacacggtgttcacccggcgcttatagggcggcacggcggtgatgtccttgccctcgaaaaacacggtacccgtggtggggtattcaaacccgccgatgatccgcagggtggtggttttgccgcagccggaagggcccagcagcgtcagaaactcctttttgcggatgtaaaggtcaatatcgctcaaaacggtggttccgtcgaactccttggatacgtttttcagttcaatgaggtgttcctgttccatcatgacggtacagctcctttagcaggctcaagctcagaagcttggcggagtagagatccaaagaatgacggcggggtgagcgccggtgttttccagataatgggtcgtgttggggtgcaggcagaagctgaagcccttccgcacccggtaggtgcgtttgcccgccaccagatttacctgaccgtgaagcacatagccgaactcctcgctttccagcggcggaagctcgttgcttcgggcgccgggctgcagctccagcaggatgggctccatgctgttgcgctgagcgtcgggcaccagccaggtgattttcttgtcctcttcttccttttcgaacatgtcctgcggggcgtagaccaccttttccgccgaatcgtcggagaaaaactccttcaggctggagcccaggcattccagcatgtccgtcagggtggcgatggacggcgaggccagatcccgttccacctgcgaaataaagcccttgctcagctcgcagcggtcggccagttcttcctgcgtcaggttgcgctggatcctcagttccttcagcttctccccaatgttcaccgaggctcatctctttccgatgggtgttgttttcgtccgtgagtttagaaatagtaaactcgcaaaacagtatgtatttaatcacaaagcaggggggatgtcaatagaatttgtcgttttttgcgcggaaaattcgaaggctcaaacacgcaaaaaccgtcctgccttcagccgtgtttcggcccggacaggacggttttttgtttctacctattagattacatcacgccgcggaagcccttgccgatgatctccgtggtgttcgtgatgaggataaagcaggaaggatccacactcttggcgtacaggcgcagcttaatggcctgcgcgcggttcaccaccgtcaggatgacggtcttgttctcatgggtgtacgcgccctcgccctgcatgtccgtcgcgccccggtgcaggtccttcacaataaagtcgatgatctgctccggcttgctggtgatgatctggaagcacttatgcacggcaatattttccagcaccatatccacaatgacggatttcagcgccagtcccagcatgctgaacatgcccgtttcaatgccgaaggcaatgccggacaccaccgtaatggtaaagtccacaaacagcaggcactggccaatattgatgttggtcttgctcttgaggatcatggccacgatgtccgtgccgccgctggaagcctgcatgttgaacatgatggcgctgccgatggcggggaaggtgacggcgaagatcagctccagcaggggctgattggtcagaggcgcgtccatggggcaaatgtattccagcccccagatcacgcaggacatcagcagactcacataagtggtgcggaagccgaaggaacgtccgaataccagaaaacccagcagcagcaggctctggttgatgatgaacacaaacgcgcccgccgacaggttcggggcgtaatggcccagaataatggaaataccgctgacgccgccggtggagaaatgattggggaatttgaagaaataaatccctacgcacatcagcagcgtggccagcgtcagcatggtatagtcccgcgcgatctgggcgggcgtttgtttttccttctgcatcgttttttctctctccttaacgtatccgggcggttacaggctgaattccacgcgcacggcgcggcccacgaagttcagttccggcagggcgcagctctcgcctgcgtattcccggtcgtagctctgcagaagcacgttcatcgcgtccagcttcttcaccttgcgcaggaagcggtggccgtccttttccaccagcatgatggccccgtcaatggggctgccggcgggcacgatcaggcaaagatcctcccgcatgatgcggaagccccgcatggtatcgtcgggaacctgaaaatagaataccttctccggcgcggaaccctcgatgcggccgtccataatgggcagcagccggtgatccacttccttcatgacggcgttgtacaccggcacccgcttcagcacgctgctgagcgcgtccagccacacgccgccggtgatgttcttgctctcctcctcgctttgggagctgtagaccttctccgcctcccgggcgcggggagcgggcttcggcgcggctttgggcgcggcggtctgcaaatcgacggtggcggcgatgtcgtccaggctgaacccggcctcgttctgttcgctcagccccatctttttcaaaatgcggcgggcctgatcgtccgcgatgatgcgggtgcccgcttccacatccttcaaatagccctcgctcacgccgcccagcttggccacctgcttcagtgtcatgttccggcgcaggcgctcggtatgcagcaaatctcccaaacggctcatagagatgatcctcccataaaaaacagaataaaaacaaaagccttttggagtataccacatccctgcggcgaatggacagggaaaaaatgaaaaattgctctctttttcaggtcattcttcgggcgcttcgtcaaaaaatcacaaaatattagcgcgaggactttttacaaacagaaaaatgtgatatactatacctgtatgtgtccacattacacattatgttggaacaggaggaaccaattcgatgcaatactccaaggaagttgaagaaatggtatgcgtcgccaagggcccgaaccacggccccgcgcccattcccgaagaaggcaagtgggtgcaggcgaaggagatcaaggacatctccggcctgacccacggtatcggctggtgcgcccctcagcagggcgcctgcaaactgaccctgaacgtcaagaacggcgtcattgaagaagcgctggtggagaccatcggctgctccggtatgacccattccgccgctatggccagtgaaattctgcccggcaaaaccattctggaagcgctgaacaccgacctggtgtgcgacgctatcaacaccgccatgcgcgagctgttcctgcagatcgtctacggccgcactcagtccgccttctccgacgacggtctggttatcggcgcgggtctggaagacctgggcaagggcctgcgcagccaggtcggcaccatgtacggcaccaagctgaagggcacccgttatctggaaatggccgaaggctatgtgctcaagctggcgctggacaaggacgatcaggtctgcggctaccagttcctgtctctgggcaagatgatggacgccatcaagaagggcatgtcccccaacgaagcctacgagaagaacgtcggcacctacggccggttcaaggcggaagacggcgcggtcaagtggatcgacccgcgcaagcagtaataggaggtgtgcagaaatggctttgtttgaaggttttgaacgtcgcatgcctcagctccagcctgtgcttgaaaagtatggcttcaaggattttgatgagctgaaggctttcaacaattccaagggcgttgacgcctacaagatcgtggagggcatccagcccatcgctttcgaaaacgccaagtgggcttatgaactgggcgcggccatcgcgctgaagaaggatgtcaagaccgccgccgaggctgccaagtgcatcggcgagggcctgcaggctttctgcatccccggttccgtcgccgaccagcgtcaggtgggtctgggccacggcaatctgggcgccatgctgctggacgagaagaccgagtgcttcgcgttcctggccggccacgagtcctttgccgccgccgaaggcgccatcggcatcgcccgcaacgccaacaaggtccgcaagactcccctgcgcgtcatcctgaacggtctgggcaaggacgccgccatgattatcagccgcatcaacggcttcacctatgtgcagaccaagtatgactacctgtctgccgacgtgaaggaagaccacgctctgaccatcgtcaacgagaccaagtactccgacggtgagcgctccaaggttcgctgctacggcgcggacgatgtgcgtgagggcgttgccatcatgtggcacgagggcgtggacgtttccatcaccggcaactccaccaaccccacccgcttccagcaccccgtggccggcacctacaagaaggaatgctgggaagccggcaagcagtacttctccgtggcctccggcggcggcacgggccgcacgctgcatcccgacaacatggccgccggccccgcctcttacggcatgaccgacaccatgggccgtatgcactctgacactcagttcgccggttcttcctccgttcccgctcacgtggaaatgatgggcctgatcggcatgggcaacaaccccatggtcggcgcgaccgtggctgtggccgtggctgtagaggaagcacagaagtaatttcttcgtgtatttttcacaaaaacatggtcatttaagcaccgtaaattgtgaaaaatgacgagcggttttcgttcactcctacagtactcctacattactcctacaggtcaactcctacaggtaaaaaccaaaaaaaaaaaaacgactccctcgtggcttacgctgcgagggagtttttgttttgccatttatcttattttgcagatttcgtccatcagccaggtggggtcgcggcgggtgtagaccttctcggtgatgtccgtgatctggtgaccgaccatgtacttgatggcgtattcgtcaacattgtacttcttggccatggtgtgcttttaccagtaaaattcgccccacccgatcaggtccagcccgtacagcgtaccaatcccgttcaggcgcacataagccacgccgtccatgggaataacgccctccttgtcgatggtcgtcagcaggtttccgttcgcgtcaaacgcatcgaccgtggtcaggcaatcgaccttcagctgcgcggctgaaacgtccttccccttgtagtcgcgcaggtagagcatcgcctgagacaagtccacatacagatcggaataacgcacggagcgtccggacagccgcgcaacgttttcaaggcgattaaaagtcggatacagcgtcacctgctgaacgccccgcagatcgaccggcgcgtccatatccccgtagtcgaacagggcgctgttctccttcagccatggataaaatccgtccaatacatcctcgccatagctggccttcagggcgctgacttccctttcgacccgcttcccctttgtggcttgatccagcgccgtcatccatgccgtgtcgtttccatacacccgatccagataggccatgaaccgcagtccctcgctgtagcccggattgccggaatagggatagggttctttcatccaatgggatagttcctctgtatacagcgtttcttcgtcttccagtgcaacgttatagagaatctgttgagacgggccgaccgcataggccagcgccgggtcgttttcttccagccattttgccgtttgataggcggtatattccgcaaagccttccgccatcagccggctttcccaatcctccgaagcctcgtgataaaagtaattcagggtatggctcatttcatgtaaaatggcatagctgccattggccagcaaatccgccgggtaaaggtcgatctggttctgatacgcaacggggacgtagaattccccctcctccgacgtttcgtttgcgcggcaccgcacctcgatcttccgcgcataggctccgtcttcaaagcgaatgccgctgaccgtctccatggcgcggtatatcccttcccaccgttccatcaggtcgcccggcacgtacacgcccgcgtcgatcgacacatggaagtgttcgctgaaaagctcgatcggctcgctggtgatggttccctggggaaacgtcacagcctgttccgcaaaggccggtatcaccatgcacagcaggaggagcgccgttagaaagaccgctgtttttttcttcatttttaggtttcctttcaatgcatatttgtggaaggccgtctttttatgtcgttttcggtcgatttaccagcagtataatgccgcgttcttttcctgtcaagtccctcctatgggcgcgctttccttagctcccctgccgttcgcgccgtgggggcgtttaccctattttcttttcgccatccgaagcagggaagccccgtccgccagattgaccgtcaaaaatttgccactgtagaacgccgcccagttgttgaacacgcagggcagcttcttcgccgcctgcaagctgtccacataacgcagggtcagcggctcccccgcttcctcgcaatatttccgcagcttttcaatggtctgcgggataaacggacactgatcgttgtagtagaccgtcagctcccgttcttcaatttccattttaaatacgttgggcgcgaaccggggataggttccgtcaaaggaaagagccagcagttcgtaaccgtttgaggtagtgtccaccgtttcaaagccgaaatgccggaaaaacgactgatcggtcagccatgccttctgcttggccgcccccagcatacacacgccggatcttccttgggcccgcgcatccgccagacaggattccagcagcgccttgccgtaacccttgccccggttctccccctccgtccacaggcaataaatatagaggtatttttccccaaaaatgggcacccacgccttttccaacggcgcatattccatgaacaccgtcgcccggccttccaactttcgaaagacgtgcccttccttcagccgttccgccagccattgccgcttggcttccacaccgggatgagcttttttcatgcggacaatgcagcacagcgtttcatccgccagattttccggggtcagatcaacaaacatacgaaatcctcccaaagaaccctttgggaggattatagcacaacagttgttattcaacaagagagatccggcatcagggtcatgcggagcgtggtgcatccgtagggctgcagccgcaccgtttccgtcccgataggttccggactttccggcttttccgcgcatacgccgggctgaccgggacaggtgccccatgcgattcggttcatccgagtcaccagctgcagcggcggctgttcccgggaaaagggctgatctcccagcggattttccaccagttggaagtctttttccgcaaaggcgtaaccccagtcctgttccgacaggatgatccagtcgcagtacggcgctttgcgggtgacgccgtggctttcgtattcccacggatagtgcttcgccgccagcggcagggcgaataccagcggcccccgctccacataagccattccgtccgcttcaggaaccaccctcgcggcaaaatgcagctttacttccacgctgtcgccgtcctgccagagccgttccgtccgccagatttcccccggctgaacgggctgtccgtccgcttcggcactttcagcgaaggccgggatgcgaacggccagttcgaaacggacgggacgttcgcagcggacgatataccgcagactgtcccggaagggatattccgtttccagcgtgacccgcgccttttcgccgccgcgttccagctgaacagaggaaggaaccagcactgccgacaggagtcccttttctgtttccatgaaggcggacagtgccagcttgggccagccctgcgaaaaattcgcggtacagcagccataattcggttccaacccaaagagattggactgactgccgttggtgccaaacacgggcgttccctgctgaatggagcaggagacctgattcagctgctgatcgtactggtgtgaccacatgtccgcagagatcgtggcgggcagggaattgaacgccagccgctccagcagatcgagccaaaagggctcgccggtgatggaggccagcagctcgcaggaatacatttcctccaccacagcgcaaagctcggtgccgcggatggggcttttccccgccagacattcgtcgccctgaatgtgtcccatgggcgttccgtggtactttcgcagctgctcgtacatttttcgggcgaacgcaccgggttcctgcccggaaaggccggagaatacggcttcgcttttcagcgccatcatcaggttgacgatgtgagtctgctgccgccacacgccccgggggtctggctgctgatccttccagcaggcgaacacccgctcgtaggacaggccctgcgacacgatcgtcacggccagctcgatcatccacggttctggccgctgctcgtacagccattgcagggggatcagggcttcaaaccagcggctttggccccagttgaacagggtgcagtgggtcagatggccttccagatttttcatggcccgataaacggtctccgccgccctattgtctccgctgcattggccgtagaccatcaatgctttgcaaatgatgaacaccgcccacacgtcataggctgcgcgttcctcttgggtgcaggggcagagccagccgtccgcctgctgcgcgtccataatcgcctccacgtatttcttcgcccgggcgatcagtgcttcgtcccgcagaagataggccagcggcacgaagccgtccagccagtagggcacccgttcccagccctcggccttgccgccgatccacgcggaatcccgaatatcgggccaaatttcatccaggtggccggacagcccctccgcctggatttccagctgacgtttcagccaaccttccgggcggagattttccggcttcacaaaacggtataccgacgaataaatctgttccatggttttcgcccctctttctgcaatgaatgataccgccaaaatgcgccgttgaccattctcaatgccgcccatttccttgcaaaaattgaacaaatcgcttataatgtccgtgaggtgcatcccatgagcgaatatctgagttccgaaaaattgccccagtttcttttttcccacgaccgtgcgtttcagcccggcgaaaagcacgtcacccgcgtctgcccggaggacgtgctcctgctgatgttttccggcgttcttcgttttacggaggacggcgtgccggtggaggtgcgcggcggcgagtactacatccagaagcgcgggctttcccagcaggggcaggtgccgtccgactgtcccgtctattattacgtgcattttttggggcattggagcagcgagggcggcatccgcaaacgcggcccccttcctgcggaggcgcaggccctcacccgccgtctcgccgaggccgatcagctgggtgcgccgcttttggagcgcaccagcctgttttaccagcttctcacccttttgtgtcacagccgccctcaaacccctgcggaacggctggcggaaagcgccctgcagcagttgcagtaccacttgaaggacggcgcgtctctcgcccaaatcgccgccgagctgcacgtcagcgagagctatctaatccgcattttccgccgccggtatcagaccacgccccaccgctgcctgacgcttcttcgtctggaacaggctcagcggctgatgcgctactccgacctttcgctggaggccatttcgctggaatgcgggttccgcagctacgccaacttctacaaagccttctgcgccgaaaagggcgaaaatcccgccgccgtgctgaagcggctgcgataaaccttttcccgcaatcgtgctgggcccttcccctatttttctcaacgaaaaaggccgcatccgttttccggcgcggcctttcggcgttctgcgcagtttattcctgcgctttcaggaaatccatgcagatgcgggcttcttccagtcccgagggttggcaggtctccgactccacgatcagccggtcgcccagctccacggccttacggtagaccgccgccgcaggggcttcccccatgcccagcggccttccgctgccgtccaccagtccgtccttgatgtggatgatgcggacgcgttccttcagccgctccatcatttccagcggatcgcgcccgcccacgaaggcccagtaggtgtcgatctccaagtccagccgggtgcgttcttccagctgctcccaaatgcaggagccgtcggcgttgggcttaaactcgtgagcgtgattgtgatagcccagccgaatgccctcgtccgccagtcgcgcctgcaccttttctgtttgggcaacaaaatcgtccagcttttgctgattgtccagatcggcccacggaagaacgatcagccggttgcccagcgttttatgatatcgaatggtctctccgatcacatcatctgccagttcctgcatccccgtgtgggtggaggagacctccatgccgcattccaacagcttgtcccgcacggcttccgccgaatagccgaagaaaccggcgaactccgcgtagtgataccccaacgccgctaccttttccagcgtgcccagcaagtctttttccgccgcgtcccgcacggaatacatctgcaatccgtatttcatgttggttttcctttccgattttgctcaatattccagctcgatctccgaaccggtcagtttcttatgcaccacgatcttcttgtcgatgcgctcccgaagctcgggcatatgggagatcacgccgatcatccgatcgccgtccgccagcgaggacagcagcgccatggcgttgcgcagggcgttttcgtccagcgtgccgaagccctcgtcgatgaacatggcttccagccgcacaccgccgctctcgctctgcaccacgtcggacagacccagcgccagtgacagggaggccagaaagctctcgccgccggacagggtggacacgtcccgccactggcccgtggcccgatccagcacgtccagatccagcccggactggctgcggcgatccttcgcttcttccttcagccgcagcacaaacatgccgtcggtcatctgggtcagccgcttgttggccgccgctaccacctgcttgaaataatactgctgcacgtaggtctcgaaggtgatcttgaccttctgactcagctgcccgctcatggcccggtacaggtcgtccagcaccgcccattcctcggcgtgggctttcttctgctccgccgcccggcggatggcctttcccgcctcctgatgcagcgtcagccgccggtcgcagccccggcttcgctcctgcgcctgccggtactgctccgtcatggccttctgctgctgcagcagggcttcgatatcggcccgtgcgctgtccttcagctgcttttcccgctcctgaacccggtcgttcagcgatttctttttttcttcatagcggcgaatggccccgtccagccgttccgtttcttccgcgggcaggcaggcggcgcggtaagccgtttcgtcctcgaagccctgctgcgccagccctgcggcaaactctctgtccagccggtcggcttccttttccagctcgcctgtctttttcaggcaggcttccagcaggacggcggccttttccagacggctctggcactggctccgccgggtttccgtccgctccgccgcttcccgaattttccgggcggctgcgtccgcttcgttcattcgctgacggacgctctgttccgtgtcctcgtcgccgattccttcctcctgcagggtcttttgcagggtctccaatgcagcccgagctgcggcggtctggctggaaattttatgcagctgttcttccagccgcttgcggtgatcgtccgccgcctgaaactgctcctgtgtcgccccgccttcctgcaggacggcgggggcgggatggtgggtcgcgccgcatacggggcagggctcgccctcccggagttcccgggccaacaatccgctctggctgcggtagtaagcctgccgcacggccagatattcctgctcggccctgttgctgtcctccaaggcctttgtctgcaaacgatccagccgttccatctccgccgtgtccttctgccgcttttccagaaatttcaggcagctttccagccgtttgaccagccggacgttttcctccgccagcggaagctgctcccgtgcctgcttcgccgcccgttccagtgtgggaagactggcttcctgcgcctgtttttcctgcgtcagccggacggcctgcgccttttccgcgtccagactttgccggtttcgttgccgcagctgatcggtcggacccagcagttgagcactgcgagccgccgccagcgcggcctttcgctcctctacggcgctttgtttttgcagaagcccggccaactcctgtttccactgttccagctcgtcaaagcgctggttccgattgcgtccgtcggcgatggcggcggtcagggctttcagctggccgtccagcgtgtcgcaccggccgtccgcttcttttttcagactggtttcataggcgtacagcccccgcagcgcttccaacagctgatcggcgtactttgcgtccgtctggtactgtttcagcctttcccggtcgggaaattccggctccgggctgatcttgcccgcttcggtcacgatgcgcaggtccagttccctctgcatctgcgcggcggcggcgcatttttccttggccttcttttgcagatcggcgtaaagcgaggtgttgaacagctgctggaacagctttttgcggtcatcggacttggcgttgaggatcttcagaaaatccccttgagcgatcatcaccgtctgggcgaactgatcctgactcaggccgatcagttcctgcgctttggccttcacctcgtccgtccccgtccagcattcgccggtgtccagttccgtcagctcagcggcggccttctgttccaccagatcgtccccccggcggctctggcgcaggtagggcggattccgtttcaggcgataggtgtgctgacggtgctgaaataccagctccacataggtatccgtgtcccgggcggcatagtccgaccgaaaggatttggacgcgcggcgttccctgcccccggaaccctcgccgtaaaaagcgaagctgatagcgtcgaaaatggtggtcttgcccgcgcccgtgtcgccggtgatgagaaaaatgccattttcgcaaagcttggtaaagtcgatcgttgtcgttttcgcgtaggggccgaaggccgaaagggtcaatttcagcggcttcatcgaatctctccctccagttccttccgcagactgcgcagaatctccatatgccgggggccgggcgggcagtcgttattctgcagccggtaaaaatccgagaataattcttccgggcttttgttctccatggcttcccgggccagcacgtcgatatccgtcttggttttggaattgaccacggaaaacttcatcatgttgggaaatacagtgctcaccgtcacccgtgcgtccgggggcggcagctcgtcacgcagcgtgacccacacatagtcctccgaatagggcatggccatcacttcgtccagcattccctccaccagccgcatatcgtgaggggcgttcagcggcacgatatggacgctgacctcccctttttcccccatttccaccaccgtcaccgattttttctggttcacctcggagaaggaatacttcatcagggagcccgcatagcgcagggtctcccgggcacactgctgcggcttgtggatgtggcccagcgccacataatcaaaatcggcaaacaccgccgcgtcgatgttgtccagcccgcctacggtcttttcctcggagtcggaggtctccgcgccggtgatgaactggtggcacaccagcacgttccgcttggccgtatccaccggcgaatggcgcagcaccgcctgcaccgcgtcctgataggtctcgatcttctcatcgggatagaaccggcgcaactgtatgggcttcaaaaacggcagcagactgaccaccagttccccgtgctcgtcctgtagcgtcacctgctgcaaatggccgtcaaaggcctcgctgacgtacacgcccgagtttttcaaaagcgacgaaaaataggaaatccgctgggcggagtcgtggttgccgctaatcacgaacactgcaagtcccatttccttcagccgggtgataaactggtcgaacgcggccatggcttcgctctggggcgaggctttctggtatacgtccccggcgatcagcaccgcgtcggcccgctcacttcgggcgatctcctccacctgacacagcagccgaacctgatcctccaaaaatgaaaagtcgttcaggcgtttgcccagatgcaggtccgccagatgcagaaatttcatcgtctgtttctcctttgtatcccattttttaatgcttcacggactgcctttttcctctgtcagcctcttcattgtatcccatcggcccttccctggcaagacgcaaaataggcttctggctgttccctaaaccggtttttcgtgttacaatgcttcgggcgtatgcccagggaggttttcttcatgattcatgtcagccagcccatgaccactgtgccggagcatttttccacgcccctgcaggagctggtctaccgtaccctgacccggctctccattccctttcagcgggtggaaaacgaccccgccatcaccatggaggattgtcaggccatcgacgaccgcctgcaaatgcagaccgtcaagaccctgtttttgtgcaaccgtcagcagaccgccttttacctcttcgtcaccccgggggacaagccctttcgcacgaaggatttcagctctgcgctgggtatctcccgcgtttccttcgcctcgccggaacagctggagcggctcatgggcacagtggtcggctccgccacggtgttcagtgcgcttctggcttcggcccgggaggtgcgcgtggtcttcgaccgggcgctggcggacagcgaatggtacggctgcaccgacggcaccaccaccggctacatgaagctgcgcacacgggatgtgatcgaccggctgctcccctacaccgcccatacgctggaatgggtggaggtgtaaacgcacggcacttttcgccgacttcatcccattcgaatgccatttttacctgaaaggaacgaaggctcatgacccctgagatcgaaatttcccaagcggcgctgaacagcctgtcaaactgtctgctggtggacatgcgggacgccgaaagcgtggcctacggggttatccccggggcggttccgctgccgccggaacggctggaagccgaggtgcccgtccgctgcgccggaaggcccgtggtgctgtactgtgcccggggccagttcagcgtggacgcggcggaagacctgcgccgtctgggcgtggaggcctacagtctggagggcggctacgcgggctggctgctgtatcgaatgcagcgggagcaggagaccagtctgcagcagcagatcgaggagggcatccgcaaaacgtggcacaagcggcttttctccaaatttgccaaggccatccgcacctacgatctggtcaagcccggcgaccgtatcgccgtgtgtatttccggcggcaaggactccatgctcatggccaagctgtttcaggagctttaccggcaccacaaattccccttcgaactgaaatttctggtcatggaccccgggtacaacgagaccaaccgcaaggtgatcgagcacaacgcccggcttttgggcattcccatcaccatctttgagacggatattttcgacatcgtctacaaggaagaaaagaacccctgctacctgtgcgcccggatgcgccgggggtatctgtacagcaaggcgcgggaactgggctgcaacaagatcgcgctgggccatcattacgacgacgtgatcgagaccatcctcatggggatgctctacggcgcgcaggtgcagaccatgatgcccaagctgcacagcaccaactttcccggcatggagctgatccgccccatgtacctgatccgggaggcggatatcaaggcgtggcgcgaccgtaacgatctgcacttcatccagtgcgcctgtcacttcaccgacacctgcaccacctgcgaccccaacggccgcaccgtgtccaagcgcatggagatcaaacagctcatcgcccagttgaaaaaggtcaatccctccgtggaggccaacattttccgcagcatggaaaacgtgaacctgaacacggtcatttcctacaaacagggcgatcaggtgcattcgttcctcgaccggtatgacgaaattcaggggaaggaataagacggtctcctcctcaaaaacattgatacgcaaacggcgcggcctttccggtcgcgccgtttgattttcgttattccaatgccgcattattttttccagtgattcagatatggcacgaccgcttccatatgggcgcggacctgctctgcgggccagctttcgttggccatgtgttctacgcagaaatcaatgagctgctctttgctttcgtatttgaattccccatcggtatagcaccacttgcaatattcctcgttgaaggaaccgtccgtttctttgctgatggtggaatcgtcaagcggcatcccgcagcattggcagatcagctttcgcggggagccaagcagcgtattgatcgaaacgtcaaaaacctttgacagcagcttcagcttttccacattgggcatcgtttccccgttttcccagcgggacaccgcctgccttgtcacaaacactttttctgccagttcgtcctgcgacattccctttcggttcctcagctggcacaggatctcctttgtatccatttgaaacccctcctcgatgcaagggtaacacaggatcgttttccagacaagcaactggcagttgctgcggcctgtcattccttcaggattccggggaaatttcctttcagaaaatgtctgtactccggatgctccgaagcgttctcatactcttctcgaatggtcttttcattccattccttcgctttctccgacagctcttcataccgaacgacggaaagcaggccttcgcgttccgcctgcaggatcgcctcataggcgtccggaatgaattccgagcccgccacatcgaccggcacgctgcttgcggccgcatccgggattggaacggcaaaaccggcctccgaaatggtctcggcccgatagatataaccggacacgccctgataggtactgatcagcgcgttggggtagtattcctccagccgctggcgcccgtccctgttaaagccatacggcccccatttctggtagatcccctcatacaaaaagccggtctccttacaatacttctcaacggcgttgctcaagtacaccaatacattttctctttttttcgaaaagtagaccagcgagatcccatgattggaaacacgcggtttcagttgggtgatcccgccgaacggcgatgcgtgatagtacattgcttctcctcctgagcgtattttttacggtccgggtcgatgaacgaaataagcctctttcatgcgttccctccgctctttcctaaaccggaagaaagcagccccgtctgaatcggcaaccgctatgccagatattccggatagcttttcgtaaattgctcgtttgctttcagcagttgttcgtaatgctcgttatacagcggactgagctttctcatggcggggataaacgtatcgtcatatccattggccgcgcagatctgtttcatcgtttccatcagccggcaggcagacgaattctgatattcctccgtttgccggtatttttggtaatcatccaatacctttttatgattcctgacaaactcgtccagattctgaagggcatactcctgttcctgcaaaacgcgccggagcctctcggtttcctcttctccggagccttcttccatacaggcatccagatattcccgcagatcatccggcaaacggatctccggaacccgatcaaagaattcgatgatctgatgaaaggcttttttctgttcctccgtctccacctttcccgtcagatatctggaaaaatggagacggatgattttcccataataccccggaaacagctcgcccaatttttggataatgatcgtattggaactgagcggatcaatctccggctcaagatcctcgattgcttctcctgccgccagccgcttcaaccatttctgtttggttttttcctgctccagttccagctctctttgataaaaaatgccgctgatttccccgcgatcctcaagcacacgccggatttcccggatgctcaagcctaatttccgatatagaacgacccgctttagtactttcgtatcctcttctgaaaaatctctatatccattttccagcactttcggatcgaccagcccctgctccacataatactggaccgcttttttggtgataccgcatttccttgccgcttcgttgataagcatccttctcacctccccctcattgtaaaccggcctgtaaggggacagtcaatacggaatgccaaatttccgccaattttctgcaacgggcaagcgccgcacgttttccttccgtgcggcgcgtttttcgtttctcttttaggccgcctgcgtctgggcggtatacagctcgtaataataccctttcttggccatcagctcgtcgtggctgcccgcttccaggatgcccttgttgccgatgtagaggatgcggtcgcagctcttgatggtggacagccggtgggccacaatgaagctggtgcggccctgcagcagcgtttcgatgccctgctgcagcagacgctccgtctgggtgtcgatggaggaggtggcctcgtccagaatcaggatgcgggggtcggacaaaagcgtccgggcaaaggcgatcagctgccgctggccctgactgagaccgccgccccgctcgttgaccggcgtggcgtactgctggggcatctgtgcaatgaactcgtgggcccgcacggccttggccgcggcgatgacctcctcatccgtagcgtccaaccggccgtagcggatattgtccatgatggttcctgcaaacaggaagctgtcctgcagcatgatgcccagctgggagcgcagggaatgaagcgtcgcgcccgcaatgtcctgcgtggttccgtcggcgcagtggagcagaatgcgtccgccccgcaggttgtagaaccggcacagcaggttgatcaccgtggacttgcccgccccggtgggccccaccagcgcgatgcgctccccggcccgcacatgcaggttcaggttttccagcacagtctggcccttctcatagccgaactccacgttttcgaaggtcacttcgccgtccagcgccttcaggggctccgcgtcaggaacgtccttcacctccaccggctcgtccatggtctcgaaaatgcgctccagataggcgatgttgttcacaaaggaattatagatattggccaaattggtgatgggctgccagaagcggctcacataggaagccatggcaaggatcacgccgaaggagaccatcttgccgcccagccagtaaacgcccgcgatatacagcagggagaacacgatctgcgtcaggctctccgaggacagccacacggcgttggaaacgtacatggccttcatccacgcgtcccggcaggccagcgccagccgcttcatgatggagcagttcacctcctgacgggcgaagagctgagacaccttcacgccgtcgatgctttcggccagataggcgttgtagttggagttcttgttgctctgctgctgccatgccttgcgctgccggggcttcaggatgcacacgatggcgatgaacaccggcaggccgctgaccaccaccgtggccagcgtcgcgtccatcgaatacatgaacacgatgatgacggccacgttgatgatctccagaatgctgttgatgatgccgttggaaagaatatccgacacggagttcacatagttgatgacccgcaccagaattttgccggccgggcggctgtcgtagtagctgaacggcagctcctgcaggtgatggaacagatcccggcggatgtcgaagatgatctcctgactgacgtaggccatcacccgggcccggatgacggtaaacacgatgctgacgacgatcagcccgcagtagatcagcgcccagcgcaccagcgtctgcacattcccggcgggaaccacctcgtccagcacccgggacatgatctttggcgtatacagggtgcagatggaggccagcacgctcagcgccagcgcgcctatcatctggaagcggtggcggccaatgtactgaaaggcccgtttcaggtgtttccattgaaagggagactccagcgtctcgtccacgtcaaatttgttgcgcgccattacgaagcagctccttccatcggcaggtcgttctgcagggcataggtttgccagtagtagccgtggttcttcagcagttcctcgtgggtgccctgttcggtgatgcggccgttttccagcaccagaatctggtcggcgtccttgacggcgctgatgcgctggccgatgatgatcttggtgcaggagaagggcaggtgcagaagctgctgctggatgtaatgctcggtctcgctgtccagtgcggaggtggtatcgtccatgatcaggatggacgggtgcatggccagtgcccgggcc

SEQ ID NO: 3334 - DNA, 24849 bp, Unknown
  16S sequences of unknown bacteria
acagaaaaatgatcgccgaaaaaactcccgacgcggcttttgtctgcactccgccgtactgcacggatgaaattctcatgttcgcagtccatagcggaatcagcttcatgacggagacgccggtgacaagacaaggcggaaaaggcaaagatattgcagaaaaaatccgcgaaaatgggatcaccgccgcggtatacagtgagctgtactactcacgtctcatgcgcgtcatcaggggattctgcaaaaaatatcaggtcgttcaagcagacgcagagataataaccccgccgccagcagaattctggaaaagggacggggagctctcagggggcatcctcaccgaaaagggaacggacatactgtggacagcgctgaacctgttcggagaaataaaaaacgtcagcgcagtatcaagccgcggctttgtcaccggaattgccgactacagcacggacgactgcttcagtgctgtgataacgttctcgaaaaatacgatactgaacctcaccctcggcagctacggtactgcggatgacggattaaagctgagactgtacgcatacggaaagcggcttgaattctccggcggtgagattagagtatacggcgagacatttgaccccggtaaaacgaagaaaatgctacacgcgggcgaagaaattcccgatgaagtgtgcgccgactgccttgtgtacagaaacgacgacattacacccgcgagagcttttataaatgcgcttgagagcggaaagacggactcactcgagagctacgaggacggactgcgcgtgactgagcttgtgcgtgagattaacagtaaaacggtgcgtgtctgatgaaatttcttcatacatcagatctccatatcgggttgagactgtgcgagcagcctatgaacgacgagatagcgtacctgcttgacgaaatcgcggagattgcagttcggaaaggctgtcaggctgtagtcatagcgggagacatttacgacaggtcaaatcccgcgcccgattcggtaaagctgtttgataattttgtctcgaaccttgtgaagaagggactatatgtaatcggaatcagcggaaaccacgactcggcagagcgcgtaggctgtttttccgagattctgcaaagcgcgggcgtttatttttctcctgcgtttaacggcagcacaatgacggcgacgctgactgatgagctcggagaggtgaactttatccttcttccgtttgtacgtccgtccgtgtgcgccgcgtattcgggagaggatatttccacctacaccgaggctgtgcgatatcagctgagccttgcgggatcggacaaaaccaagcgtaacgtggtagtagctcacggatatacgggaaaaactgccgaaaatgccgacgatgaagaagccggaggaacgggatttattctgcctgacgtgtttgatgggtacgattacaccgccctcggacatcttcacaccgcgcacaagtcaggtgagagcgcatggtattccggttcgcctgtccgctgttcttttgcagagacggagagcgaaaaggttgtgaatatcgtaactctcggcgaaaaaggctcggctctggtagaaaaggttccgctgcacccgatgcacgagacgcgggagctcaggggaacatacgacgagctgacctctcttgaaacaaggcgtgctgtgggagagggggactacatcaaggcggttctgacggacgaggacgacataccggacgccgtaatgaagctgcggattgtctacccgaacctgcttcttctgtcgtatgacaacaagaggacgcgcgtgggagacgacgtgataagcgaaaggctgacagactcgctgaagccggaggaagttttcgcggagctgtacgagatgcagaacggaaacgctccgacggacgaaataatgaagacagtgcgcgatatgttttcggaggtgggagagacatgagaccgctgaaactaactatgcaggcgttcggaccgtattccgctaaaatcacgctggatatggcaaagctcgacggactgtaccttatctgtggggacacaggcgcgggaaaaaccatgctctttgacgccatgacctacgcactgtacggatgcgcaagcggggagagcagaagcgacgttatgttccgcagtaaattcgcaaagcccgacgacatgacctacgcggagcttgaatttgaaaacggcggcaaaaaatacaccgtatatcgcgaggtcggcagggaaaagctgaagcgcggaggggacagaacgtttgtaaaatcaacggaagcgcatatcgtgatgcctgacggaagcattgtcagccgtccgagtgaagtaaatgaagcggtgaggggcatcatcggacttgacgaatcgcggttcagacgcacggtaatgatagcgcagggagagttcagaaagctccttctcgccgaaaccaaggacagaattgaggtgctgagacagattttcgcgaccgaggtgtttgagaatttctccgtgaaagcgaaggaaaaagcgtcggaagcgaaaaacaagcacgcctttctcgcagaaagcacggacaaatacgccgctatgcttgaaccgatatcggaaaacgtcgcaaggatggtgtcgggcggtgtgcgatatgccgacagaaaagagctgaaatgtgcgcttgaagaggagcttgaggtcgagaaaaaggtcgtcacacggctgaaagctctgggcgaggaatacgaaaagcgcaagaaagagtacctcgttaagctgaacaaagccgagagcgacaggcagaccgaagaaaagctgaccctcgccgaagataagctgaaaaagtgcgaaaacgagctgaaatccgccgagaacaacgcgaaaatggcgacagaacacagacaaaacgccgcacgtctccgcgaagaagtcataaaaaacagcgcggtggtcgaaaagctaagagagagggatacgctcctgcttgagataaaaaagctgcaaaacgggaggaaatacagcgaaaaagagtacgaaaccgccgcaaaacagctctgtgaaacagaaaaaaacatagaagaaacaagcgcaggaataaaggaaaagcgtgagaaaacctccataatcccggagagaaccgcaaaaatgcaggagcttgccgcatacgagaagcagctcgattctctttccgcaaagataagcgaatacgactccgccgagaaaatcactgcgctgtgcgaaaagcggtatctctcaaagcgggaggaaagcatgaagctctcaaaggaatacgccgccgcctcgcagtcttactttgactcgatagccggaattttagcagccgagcttaccgacggaaaggcttgtcccgtgtgtggctccattgttcatccgacacccgcaaagctcggggataacgccgtaacacgtgaacagctcgacaaaatcaaggcaaggtgggacagcgtgaacagctcccttgaagaatacgcgcgcggcctcggagaaaacaaagccgtacttgacgggatagtgaagctgatttccgaaagcgaattttttacaggagaaatttcctctacaaaagcaaaggttgacgaagccgcacgggaaaacagagcagacatcggcaaaatcaaaagcgagatagaggaattaaaaaaactcgcggactccataccgttggatgaggcaatgcttgaaacactctggagtaagctcgataagaacaaaaagctgtgcgaagataaaaaagctgagactgcgcggctgtcgcttctcgcggaggaaaagacgaagacagcgtgcgaaatgagcgaaaaactgccgaatatatcagccgatgagcttgaaaaacgcaacagagacacggcaaaacgcgcggatttacttgaaaagtcagcaaatgaagccgaaaacgccatgaaaacagctgagattgcatatgaagccgcgtcggtggaaaaagctactcttgaaagccagctcggagacagcaccgccgaaagctacgacgagttcaaggcggaatacggcaggtacgaggaaaaaagcgcgggcataatgagtgagcttatcgcgaaaaccgcggcatacgagaaaaacaaaagcgccgccgaaaaactgctcacggaacttgacaaactggacgaagccgagcgggatgtcatgctctacacggtgatatctaacactgcaaacggagcggtaagcggcaaggagaagataacaatcgaagcgttctggcagatgcggctgttcgacaggataatacggcgcgccaacgtaaggcttatgaagatgagcgacggaagatacgagcttgtgcggagaacggacataggactacagcgcaaccgcggtcttgaccttgatataaaggatcactggaacggaaaggtgcgcgacgtgaaatctctctccggcggcgagtcttttatggcgtcccttgcactctcccttgctctctcggacgaaactgaagcggaggcgggaggaatacatatcgactcgatgttcattgatgagggcttcggttcgcttgatacggaatcccttgacaacgcgctgtccgttctgtcgtctcaggcaggcggtcgctcaatcggcattatctcccatgtggacgcgctgaaagagaagattgacaaaaaaatcgtcgtgaaaaaaggacctatcacaagcacggctgaggttaaattatgatattcacaccggatttgttgactttcgtttgtccgtgtgataaaattgcaatatgtacttccgagaaaagagggtttgaagctgaaaaacaacaacagaaaaggctcgttccttgagagcgcgttcatactcaccatatcaaccgcgtttgtcaagctcgccggacttctctttacaattccgatatcgaatatgctcggcggagagggaatgggatatttctacgcggcttacgatatttacaatatgcttgccgtgcttgcgtctgcgggtcttccggtcgcggtttcaagaatgatcagcgaaactctcgttgcgggtaacacggacgaggcggagcggatatacaaggtctcgacaagaatattcacgataatcggtgcggggatagcattcgccatgttcttcggagctgacgttttcgccgccataataaaaagtcccaactcgggaatgtccataagagttctcgccgtgactgcattctgcgcgttcgtcatgtcctctctcagagggtatttccaagggcattccatcatgacgtacaccgcagtctcgcaggtcattgaggcactgtcaaagctgattctcggatgtgcgctcgcgtatgtgcttctcagaacggagcttgcgtatgtgggaggctcggcaggcgctatcatgggcgtgtctgtcggcgcggttttgtcagtgacatatctcctcatcagcaagagaagattctcgaagagcgaaaagccgtcgggtatgcctgtgcgcggcgacaaagctatcgttaaggagctgttccgcatagcaattcccgtgtccctcggcgcgtccgtcatgagccttgtcaacctcatcgacacgacagtcatcatgcgcgtgcttcaggacggactcggctacacatacgagagggcaaactggctgtacggtgtgttcggcaacgcgaagaagatattcaacttcccctcggcgttcatcatcccgttcaccgtcagcattcttcccgtactcaccgcggcatatacggcgaaggataaggaaggagtggcgaagaacctcactaactgcttcaaatacgccatgctgctcgctctccccgctggaataggtatagcaatcctcgcagaaccgataatgcacataatctattttaaaacccccgatgaagcaaacgcaggagcgccgattctcgcagtgttcggaatagcggtgatactgtacgccgtagtcacgataagcggagcaatactccagtcgttcgggcaggtgggcaagcctctcataagcctctgcgtcggaggagtgataaagtgcgtgctcaatgcgttccttgtcggtattgcgtcggtgaacatcttgggcgcgcctattgccacctgcgtctgctatgccgttatgacagtgatgaacctgtgcttccttaaaaaatacatgacaggatgccgcgctatcgtcacaaacacgctgaaaatcgcgggagcttccgttgtaatgggcgtgttcgcgtatcttgtgtgcagtccgctgtcggctatgctcagcgtaagaaaaggcggacttatcgcaataattctcgcggcggcagtttacgcgttgcttgtggtattgtttaagataatcacgataaaagaaataaaatctgttttgagaaagggcaagaaatgagatttgacatcagagaaacagcggcggaaagagttatcctctgtgctcaccgcggtatatggggcggaaatatcccctgcaacaacctgacagcgtacgacattgccgttcgtgaaggcgcggatatggtcgagatagacgtgacaaaatgcgcagacggcgagcttttcatcttccaccccggaatggagaagagacacctcggcatggacgtgcatatcgagcagatgacggcggatgaagtgagaaagctccgactttgcaactacgacggcgcaccgaccgagattggactgtcgacacttgacgaagttcttgaacatctcaaaggacgctgctacatcaacatcgacaagttcggcgacaatcccgctgagataatcgaaacggtgaagcgccacgacatgaaggagcagataatactgaaatgcgctccgaagaaggaacagcttgccgtaatcgaaaagtacgcgcccgacatccagttcctgccggtaatctcgaaggacaacggatgccacgagatgctgagccgcatgaacataaactacatcggcacggaacttctcttcacaacagaaaatgatgaaacagcgtcggaggaataccgcgaaatgctcaaaaaggcgggaaagctctgctgggtcaacacgatagtctacaactacaaggcagtccttgcggcacatcactcggacgacaccgccatggcaggagatcccgaattcggatggggatggtgcgcggacagatttgacataatccagaccgactggatatcgaactgcgacagattcctccgcgacacgggaagaagattaaggaagcctctgatttaatgttatttttgcaataaaagtccttatattttagccttttatcgcaaaaattcgatttattcagagtatcctcagaaaataataagaaaggaatatataaaatgagaaacagaaacgaaatacccgctgaactcaagtgggattttacgcacatttttaagacaaaggaagactgggaaaaggcttattccgaggtggagagcgaaatttccgcactttccgcactcaagggaacactcggcgagagcgcggattcgcttgcaaaggcatacgatactctcttcggattctatgaaaagtttgaacccgttgcggactacgctttcctgaaaaagacaatcgacggcggcgacagtgaagctcaggcaatgggataccgcgtaaatatgctcgcagtaaaggcaagctcagcggcagcattctttgatcccgagctcatggaaattcccgaggaaaagctcgcggagttcatgaagtccgataagatgaagaagtacgcccacatcgtagaggacgcaaccagactcagagcgcacgttctcgacgaaaagagcgagggcattcttgccatgatgggtaagattacaggcacgccctccgacgcttacggtatgttcaccgacgttgagatgcagctcccgaagattaaagattcaaacggcaaggaatacgagctgagcagcggcaacttcaccgtaatgcgcgagtcttccgacagagctctccgtgaaaacgcgtttgaagcaatgttcggtacatacggaaagtacatcaacaccatagcttgtctctacagcggtagcgttaagcaggacaacgtgtttgctcagattagaggctataagtccgctcgcgaggcttctcttgcaggctcaaacgttcccgaagctgtatacgacgcacttgtcgaagcaatccacgcctccattcccacaatgagcaagtacctgaagctcagaaagaaggctctcggacttgaaaagctcgacgtatacgacctgtacactcccatggtagccgatatcgagtaccccatgccctacgaaaaggcttgcgaaatcgttatcgaagctgtcgcacctctcggaaaggattatcaggatgttatccgccgcgcaataaacgaaaactggattgacgtttacgaaactcccggcaaggaatccggcgcgttttcggcaggcgtatacggcgttcatcccttcgtaaagctcaactactccgacggacttgacgacgctttcacactcgctcatgagcttggacacgctatgcactcctacctctcctccgcgacacaggactacgctaaccacgactacagacttctcgtagcagaggtagcttcaacctgcaacgaagtccttctcacaaagtatctcttaaagaccgagaccgacacaaagcgcagagcatatattctgaaccacttcctcgaaggcttccgtacaacagtgttccgccagaccctgttcgctgaatttgagcataaggcgcacgcacttgaagctgccggaactcccatcaacgcagagtgccttaacgaagtctacgccgagcttgttaagcagtactatcccgacgcagaatttcgcgacacgctgaagtatgagtggtcgtacatcccgcacttctacagagcttactacgtttaccagtacgctaccggcttctcgtccgctgttgccattgcttccggcataatagagagcggagacgcttcaaactacctcaagttcctcacaacgggcggttcggactatccgctgaacgagctgaagatagccggagttgacctcacatctcccgaggttgttgaaaacgcgatgaaggtgttcgacgaaacaatagacgagcttgacgctattctttaagcaataatacgataagcaaagaaaaaactccaatgcagtgaagtgcaaaggagtttttttgctgtcggaaagccgaatcaatatacaacagcgtcgcctgcggtgaagccttcaagtgagttttccttcacctggatgcatatgtatgtgacgtcggagtcggcggatgcggagaactgtctcttagcggcgggagcaactctcagccagtctcctgcggtgagcttgacctcttctccgtcgattacagcattgccttcgcccgagattatgccgtatatctcttcgttgtgcttgtgagaatgaacgaacggtacgcctgcacctgcgggaagacggtttatgctgacctcagcgcctgtgagtgagagcttgtcatggagctcgacgcgtgcttcgtttccgatatttgtgatagtgtagttagccattttaatggacctccgatatattttttagcaatccccttgcttgactatagtatatcagactgcacactcaaaaacaagtacgcacttttttataactgtacaaaataaaaagaatgtggtataatatattcgaggaggtgacaaacccaatgaaaacgaaagatgaacttccggcttgccctgttgctacggcggtgtctcttatcggcgggaagtggaagctgctgatactgcgcaatctcaaatcccgtccgtggagattcaacgagcttcagcgcgaccttgacggaatatcgcagaaggtgctgacggacagcctgagacagatgatagacgacggacttgcgtaccgccgggattatcacgaaatgccgccgcgagttgaatacggtctgaccgagcttggcaaggagatgctgccgattatagacgcgctcgccgacttcggtaattactataaatccgttgtcggataaaaaatacagcccccacagagagaactaatctgctctttccgtgagggctttgcctttatttcatgagtcttgagaagagaatggagaacatccagtcgcggtttatgtggtcgacatgctcaatttcaccgctgtacgcaccgaatgtgtacgaatagtcggggttcacatggggacgcggaacgatggattccgagaagctgtccggctcgataactccgcatatcgtcgagatgtcccagataacgcggctccacgatacggcaccgttcggcttgcattcggctacgttgtcgcagagatagtcgccgagctcggagtttccgcggagaaaatgctcaagctcgtagatgttcaggatgagatggctgacaactccgccgcaggggaagagcaggaaaggcacgcccgaggcgaagagtgagtttgcggcgttcacgtctccgttcaggttgaattctcctccgcagaaccactttgcgttagctccgagccagataacggcgattctgtcctttatctcgggatggagaagtacagcggacgcgacgtttgtgatagctccgatggcaactacatatgtcgtctcgtctgattccattacgtgatgtgcaatagcgtgagccgcctcgctgtctacgggagtgctttcgtcgggcattctctcggtagagccgcggtagtacggcggtactttcgttccgtgcgactttgccacaagggaagtgcagattccgatttcgcgatagcttctttccatgccgtccgcgaaagaattgctcttttcgttgtggaagggcgctgctgtgacgcatacgaggttgattctgtcctccgcgagcattgacagcgcaagagcaaactggtcgtcaatctcgttgtaggtgtcggtgtcgagaatcactcgtttcacgccgggctttttgagttcttccttgatgttcatgtagggtcctccttaatatcgtaagtcaaagtattttctcatggtttcgtttgcagtggcttttcggtcgctgaaatattcttcgagattgttcttcggagcacagtcgcgtatgagctgataggtagcctgcgcgattgtcggataagcattgccgaacgcaaaagcaaagtcaaatgccggagtgtcgagtatcatgtcgagcatattgacgctttcgttgtcgcggagtatgtgcagcatattgtagttgacgtattcgtcgtagatatatccgtatgaggcggcgttgaggtatgacagtgttatcgcggcgaactctccgttggtgtgattcttcggaacggcgaaaacggcttcggtgttggcgataagcgtgcggtattcgtcccgttcttcttccttaggcagagggagtataccccagtcagcggcggaatttgtcatccacgacataacgtagaggtagtcgatgaggaacgccgactcgcctttggagaagatgtttaccgcacccgcgctcgagtcaacaattttgttctcgtcattgtacagagtgtacaggttgtccatagtctttttggtgtttttgagggtgtagcccactacgggaacacgtcttatgcttgcgcttatgtagtcgtttccgcttgacttgaacacaaggtcggaaaggcgtgaggcggtgttttcggctgtggtggtgtagtagcttttgccggagctttcgttaaggcttttgactgattctacaagcgtgagatattcgtcccaagtccatgctccgctctcagctgaggaatatatcgcgccgacgtcagctcctgcctcggaaagcacggatttattcatgtataccgccgaaaatgacgatggtgagattgaagcgtcgcctgccacaccgtaggttgaatatccgcccgaggtcatgtcagaggacatcgcgttgaaatatggcttttctatgtcaaaaaacggcagagtgcgcatattcatgagagtgtccgccattctgaacgagcctaccgtgtatatcgggagcatcaaaaggtcggtgtagtaggagtcggaggcaatggcgttttttaattccgcaagcatggtatcgctgtcggcaacagtcgtgatgagcgttatgttcagcttttcttccacctcggcgttgcgtatcattgcgagacgggagacggtgctttcggtgttctcgggggagatgaagctcttgtcggtcgtagtgatgaagaataccgcgccgtcgtagtctctttcgggaagctcggagagatactgttcggaaagagcctttttgtcggtgtcgggagtgtatttcgtgtagctgctgtcctcttcggcgtgtgaggtttcgtttgattttgtttccgaggtctcgctttcgctttcttcctcctcggacatatcgtttactataataaagccgcaggaggtcgacgaaagcagcaaaagtgcagacaaggcagccgcggcgagttttttcagcgtcattctggtaaataaccttacatctaaaaattatctatgcaattataccatattcgagcagtgtttgcaatagcgcagtcgtttcataaaggttacatttttatggaaaaaaacagcctgccgctcatttttcggagacagcaagctgtttttactttattcggttagcttatatcgtaagacttacgccttgaaaacctcgaacatattgattctggttgtgcgtccgcgaccctgttcagcctttgtgatgtagagtcttacataacgtgcttcaacgggagcgaaggaacggttggttgtgctgtcgtggttgtccttgacttcatcggcgcacttccattcgtcgttttcgttaaccttgtactcaagtctgaagtcgcttgtgttgtagcctgcggattcctgaacgcctgcgtgcattacgaaccatccgcctatctttgtaacttcgccgatgtcagcttcgagccagtgttcgccgttttcggattcagcgcaccacttggagttttcgtcgccgttgagagcctgagcgccggtttctctttcgttgaagtcgctgcttgtcttgcagggcttgttcaggagaacgttttcaccgagcttttctgcctttacgccgacagtgatatcgtgatcgggaaccttaacaacagcttcgttttcgcattccgcgcttatgtattcgcagtcccagcccttgaagagccagccgtttgagtagctgtcggtcttaacaactgccgccttgccttcttcacgagcgagaacctcacgaacgcttccgtcaagtccgagaactgtaacgttatgtacgggagcctttgcgttgtcaactctgtcgtagaggggagcgagaggagttacgtcgtcgttgccgcgctttgtgaatgtagcagccattacaacgatgtcgctgtcgttcgggagtacaacttccttcgcgcctgttacggggatagcatacttgaagaggtaagcgaagaggtagagtctgtcgccgtccttgtcgtgagtatgagtgtagttaactgcaatctcgtctctctttacaagaggagttctgccgtttacgagctgttcccatgcaccgacgtcagccttgaagtcctggattcctacggaaacggtcttgtcgtcaacggagaactgtacagtcttgtcgccgtgtgcgcttgccgcgaggatgtagagcgtgtcatagcctgcgggaactgcaatcttctgtccttcgcaaacgagagcgttatgagcaactgcgggagcaagcttgaaggatacgccgccggcagttacgttctcggagtaaagctcggaaggaatggagataccgtctgcaaaaccgcgggaagttcttgcggagttgtatgtggtaacgcgtcttgtgtaggggagatttacgtgaacttcttcgcttgtctcagccttctttgcgggagcggcgagagtaacagcgaaggtcttaacagcgtaaggtgtgagagtgaaggagaacttgtcgccgtcgaatgctgcgggagcgatttcgtcttcatatccgtttgtttcggtaacggaggtgagctttccgaggaacttcagcgtgcagttttcgctgcccttgccggaggtttcctgaactcttatgatgattctgtcacccttttcttccttcttgacagcgcggactactacattgtcgtcgcttactgatacgagggagatttccttaccctcacctgcgtgcttggaggcggtgaacggcatcatgggctggttgagctctgcggcttccttggttgtgccgtctctgaagcccttgtgacccgcgatggaatatgtgaagatgttcagacccatatcctgccagtcctgaccggattcgttcatgaactttccgagaggtgtgtggatgagtgtgagtctgagagtgttgtcgttcggcttgtccataccgtacttgcagtcgttcatgatagatacgccgtagctgccgtcttctgctgtgaggtcagcccactgatgagtgcagtgctgatagtacgggaaggagtctgtgtttccgctttcgatagcgccgagaccgaggtcgaatacggcattggggttcgatactgtgagcgggaatgctgctctgaggttggatttgcgctggaaccagtcgactacgtttgcaacgtcaactctttcgccgccgtcacagagggagattgtctgctcgaatgtggagccttcaaactttcttgttaccttgagagatacaacagcgggaccgttgtctgcgatttcaaccttaacgttatccttgacaacagcgggttctacaagcgcgtcgtcccatacgagttcccatgaaggccagtttgtgctcttatcgggaccgatttcaagctttgcgggagatgcgagaagctcaaagtttccgtttgccttgtctacgatgcttgcgatgtcgccgtcttcgttgatggtaacgatgtatctctggttctcgagcttattagcagttacggaaatgccggtcttaacctgacattcggtttcgctttcacgaacgtcgaataccgtgcagcttacgggagctacggcagccttgaacttaactacggttctgccgttttccttaccgagctgtgcgggtacttcgtttccgtgtgagtcgaatacgcggacgaaaggagtctttacgtcgatttcagcggtaacaacgtcgtctcttgtgtatgaaacggggttgtatactacgacgggtgtgccttcaactcttgtgtcgagtgtgcctactacgccgccgactgcgtttgcaagctcagatgcgaacatattgagcgcgataacatagtcgttgtaggagaatacataagccgctgcgatggaggttcccgggaggtcgtcatggaactggtgccagaggaatgtctgccatgcggtgagaagtctttcagccggatattcggacgcgccgagccatgcggaaagaactgctgctctctctgcggagtctgcaagaagctcgttcttacggttccatctcttgttgattgtgtgtgaggtgagagcgcccgagccgtggggaatgagaagctctccgttgtatgcgggaaggttgtcaatctcttccttggtgagttcgttgaagatctggtcggtggaggaggagataaccttgtaaagtccgtttgcgttgtcctcgatggcttcgtttaccatgcgtgctgaggattccttaggagatccgccgtagtcgcctgtgccgaagtacatagctctgtagggaacgtgagcgtacttttcgttgtgttcgatatccttgaggaattcttctctcttgtttacgggagtagtgttgccgtcgttgtcgaagttgtacgtatagttgccttcaagaagggagccgacaacgtagtttccgtcgggtcctacccacttgccgaggtccatacggggcttgtccttgaccggcataggctttgttaccgagccgtcttcgttgattacgggaccgccgacgccccatacgagcttctgagtggagaatccgttcagacccatgtgagcttcgattgaaggaagagcatatctgaagccgaagcagtcagtaaggaagatgtccgtgctcttcttgccgaattccttttcgaaatagccgtttccgtagagaacctgacgcatgagggcttcggatgagggaacgttaacatccatagagtcccatgtgcttccggaaaccgtccatctgccctctgcgatgtagcctttcagcttttcgtaaaggtcgggatagtattccttagcaagcttataacggaacgcgccctcaaagttcatcttataatgagggtatttttcgataagttcaaagtttttctcaagtgtggattttacacagtcgcgaatggtgtcctgaacagtccagttccactgggtgtcaaggtgagcgttggaaaccacataaagtttcttttctttttccattattattgacctccgtaataaattactcaatattaacttataacacaatattcgggaaaaatcgttgatgttctattaacaattcatgtatattattggaatttctcgtagaataacgattttcgtcgtttttaacaatacggatattattaaaaatttcgttattttaaggcgtcaggcattttcttcgcagatttttcttgctacaaagataccgctggcggacgcgtgtgagagggagtgagtgattccgcttccgtcgcctatcatgtacagacccttgtagctgctttcaaggttttcgtcaaccgatatttccatgttgtagaacttgacttcgacgccgtagagcagtgtgtcgtcgttagcgcagccgggagcgattttgtcaagctggtatatcatctcgataatgccgtcgagaatacgcttcgggagcacaaggctgaggtctccgggagttgcggaaagggtaggagtaacgagggattcttctattctctttgcattgcttcgtctgccgcgtacaaggtcgccgaaacgctgaactataacgccgccgccgagcatattcgacagtctcgcgatgctttccgcgtatccgttgctgtccttgaagggctcggagaagtgctttgaaacgaggagcgcgaagtttgtgttgtcggtgagaagggaaggatcttcgtagctgtgtccgtttaccgtaacgatgccgtttgtgttttcggtaactacgattccgtggggattcatgcagaacgttcttaccgcgtcttcgtagtttgcggtgcggtatacgattttactttcgtaaagctcatcggtgaggtgggagaatacaactgacggtatctcaactcttacgccgatgtccacacggtttgattttgtctcaatgtcaagctccttgcagatgtgctcgacccacttgcttccgcttcttccgacagagacgatgcagtccttgcaggtgtacttgctgccgttctgacaggttatctcatatccgccgtcaactacggaaaggtcatctacgggagtttcaaagaagatgtcaaccttgtccttcagctcgttgtaaagattggtcagcacaacatagtttctgtcagtgccgaggtggcggacggaagcgtcaagaaggttcagcttgttctggatgcagagctttttgaactttgagcctgcggtagtgtagagatgtgttccctcgccgccgtggctcatgtttatctcgtcaacgtagtgcataagctcgagagccttcttcttgcctacatgctcgtaaagagttccgccgaaatcgttggtaatgttgtatttaccgtccgagaacgcgcccgctccgccgaatccgctcatgatagagcagtgcttgcatccgatgcagctttttattttttctccgtcaataggacagtgtcttttttcaaggggatgaccggactcgaatatcgcaaccttgagctcgggcttgagttttatcagctcgtacgcggagtagataccgcccggacctgctcctatgattatcacgtcataattcatttgatcaccgaggttctttcatatatttttacgcgccgacaaaacgcaattcttcgcctgcgcatacgctataattatactctatccggcagattaaatcaagataaaaccattgaaataatatgaagaaagcgtgtaatcctccaattttgccgcaaaataagacccgcgccgccgcagattaagcgaacaacacgggtcgtattattcagaacatgagcttttcggagacgtctcctccgctgactattgcagcgtatctctcgcctttttccttgacgacagctccgccggtgtagattcgccgtccgttttcatcgtgaacggggattgacatgacagcggtcggaaagtctgcgtccctgcagccctcggtgtgcggctgaacgaaatacgcgcggtgcatatgtccgcatacgagaaggtcggtgttcatctcggagagaatgcgcgtccatttttcgtaatactcaccgccgacgtcgaacgggaacttgaaatgctctacaaacggaacatggcacagagcgattcttgtcgtaactcccggtgcgttccattcgttttccgcgtcggcaagtacggactcaagataagcggtctcgcggcgtctgaagttgtcgaaataaaccgttccgccgtattcttcgtttgtgtcgtacttgtcctcaccgcagtcgagcactattccccaaaggctgccgagacggaaagtgtaaaatgtctctcttcttcctccgcggaaagctgtgggaatgtagtcggggagaagctcggcggcgtgtcctcttgtgtcgtggtttccgcgggagtagagtacgggtcttgttccgtgtactgcttctcctgcgagagcgaacgatacgtcaaagcattccaccgtgtcggaggagtcgtttatgtcgccgttgagcaccagcacatccgcgtcgcgtccgccccttgattctacgaattttctgtaggcttcgagaggagttataaccgcgccgtgtgtgtctgcgaactggaacagtgtgaaatcctctccctcgcatggaataaagctgtattcctcgcggacagtctctactcctttcggaaaatacggcggcttttccttgtactcgatgaagactacggtgtatttcttcttttcgtcgagtgcagctccgggaacgcttatcttgtggacggtgccgtatttcagaagtccgcattcctcgtcggtgtaccttgctccgtcaatctcgacccatccgagtccctttgtcttcgtgcggaatatgatttggtagtcacatccgactctgaataccgacggatcgtatagcaaatcctgtttcatgtcgttctgcctttctcttattgtattttgtcaccgtcatccgtttgcgtcggcttgtccggtaagttttctttcggtgcaaatatgggttccttgtcgaaatctatcacgggcggatcgctgtagtagtagtcgagagatacgggagcgtcctttctcttaagcctttcgtccgtcttctgcttaacgagagcgcatatgacagccgccgcgggaactccgagtatcatgcctgccactccgaagaatccgccgcctatcatgattgcgataagcacggcgagagatgtaagtcccgtggagctgccgagtatcttcggacctattatgttgccgtctatctgctgaatgacgagaatcatgaggacgaaccatatcgtcattttaggctcggcgataaagataatgaacgcgctcggaatagcaccgatgaacggaccgaagaagggaattatgttggttattccgacaatcacgctgataagaggggtgaacggcattccgataatcgacattacaatgaacgtcagcagtcctatgattatcgagtctattatcttgccgactacgaatccgccgaaggttttgtcggtgaagcgcacgagatttatcaggttcacatagtggcggcggttcatcacggctgagagaatcttttttgtttttgcggtaagtctttccttggaggcaagcaggtatatcgctactatgaatcctataagcgcgttttttacttcaataacaaagctgcccgcgtatgaaataatgtatttcgcgcctgtttcaaggtatccgtaaaagccggaaatgaagctctttatgtccgtcgatatctcgtttacgtcaaggaattctgaaaggtttttgtattgtccattgaacagtggaaattcgcggattatcttgtcggcaagattctgcgccgccgcgacatatccgttaatctggctttcaagctctacaaagctgcttcccacctgagggattacaagcacgacaaatacggcaacgatgaggacaaagagaagcatcgtcataagaaccgcaagggggcgcttcagctttttctccgccttcgagccttccttgaaccgcaggattttcttctcgcacagccgcatgaacgggagcatgatgtaagcaatgacacagccgtatatcagcggagagagcacggtaaacagcttgtcgagccatcctcccacacgtgaaaaatcggaaacaataaggtaaaaagtgacgccgcagattacggtgagaacagcataggcaaaaatctgcgcgtactttttgtttttgagaaattcgggcataaaacctcctttattaatattcgacaggcgggtctattttgtcgaaaacatcaagaagcgcgctttcctttgtcgggtgcgggtctgagaaaacgttgcggaacacggacttgtagtaccccggcttgaatctgtcggggattatcgtgacgatttctcccttgtacttgaagtattcgtttccgtttttgctttttttcagcttggtcgagaggaatgtctccattctgccctgcctgtttttgaaagcgttttctctttcgcgtgcggcttcgacatttccttccatcttgcccgcacatatgcaccccgcaccgatttttctcgggaacgacggatgctccattatatggacgtaccgtattatctgatatccgcacatcctgcatattcccgtgggagagccgaggtcgataactccaacgcagtgccagccttcgtgcggaacatcgtctcgcttccatagattttcttcgccgaggtctatgcttttcagccactccgcgttacggtatttctcgggaagctcgtatttctcgggtacgcttatctccacggtttccggctcgcgggagtcttcgtgcggaacatcatccgcaaactcaatttttatctgctcgtccgtgcttttcttgctttcgggtgctttctcagtctctttcgagagtgcgggaactttttcgggagctttttcaggtgcggtcggcagtgcgggagcattttcgacatttgccgatttttccgctgcggcttcgagagctttctttttcatctccgcgataccgcgccacttctcaaagtcgtaatccattccgacaggctttacatccgccgctttgtcgaactttatgttgtaaaccccgcgcttttcgtcgacgtctaccacctttccgtgaccgaatacgggatggtcgacttcacttccaacatccagacggttcgtttttttctcttccgcgtctgctgtgggggaattgtttttcagctccttcggtatctctccgatgcgcttgtagttttcctcgcctatctcgtagacaaatctcgacggtctttttttgttccctccgcgagacgattctcccatgtttccttcggattccgtgagatacagccttttcatagcacgcgtgagagccacaaagcacaaacgacgttcttcttccataccggcttccttgcgctcttccactgttctgccggacgggaatacgccctcggtcatgccgcagatgaagcacacgggaaactccagtccctttgacgcgtgtattgtcatgagcttgacacggtcgcgtttttcttcatccgaatcggtctccgctcttaccgcgatgtcggagagaaattcttcaagtgagtattcttctccgcgtgatctttcctcatcggtgcagcttctcttgaactccgcaaggttgtcgagcctttccatactgccgttttcgcgtatgtaccgctcgtagccggatttgtcaagcacctcggatacaatatcggcaattgtcgaagttttgtatttcgcgcgcatttcctcgatgagcatcacaaacgcctccgccgaggaacgcttgaagtccggcaggtcgatgtgccttttcagcgcttcgtagtacgacagcccttcgttttcggcaagagctttcagcttctccagcttcgtcttgccgaacatcctcttcggcttgttgattatccgctcaaagtcttcgttgtcgtcaaacgcaatgagccgcagatatgcaatgcagtcgcgtatttccatcctgtcgtagaaccgcaggcttccgtaaagctcatacggtatcgacgcggaggacagagcctgctcggcgaagcgggagagaaatcccgaacggtagagtatcgcaatgtcgcggcagctgcagccttcatccttcacaagacgctttatctcggctgaaatccacttgccctcgtccttttcgctctttgagtgcaggcaaacgacgtccgcgccttcgtttccgactgtgtagaggtctttcgggattctgtttttgttttttgctataagtgtgttcgcgcaccgcagaatattagccgtcgagcggtagttgcggtttaaaatgatggtttcgcatccgggaaaggtcttgtcaaagtccacaagtatcgccatatccgcgccgcgccactcgtaaatgttctggtccgggtctcctacgacgaaaaggttcttgtgaagggaggagagcatggatatcagccgcagctcccgctttgacgaatcctgaaactcgtccacctgaatatagtgaagcctgtcgcgccatttgtcgagaacctcgggatgggacttgaacagctcgaacgtgaagcatatcaaatcgtcaaaatcaagcccgaaaatattcttttccctttgcatatacatacggattatgttctcatcgcttgagtccccgtcctttacgccgaaattcccgctcacgaacattgaaacatattcttcgtccgactttgcctcgtgtaccttttcgagtatcttctcaaagctcgcacggtcaagcttaatttccagctcggaatatatctcttcaagtatttttttctggtctccctcgtcaagtatgcggaaattctggggataaaacagccttcccgcgtcctccctgagaactctcacgcagaatccgtggtaggtagtgatgagcgatgtgtcatatccgtcaccgacaagagcgcggacacgtcgtttcatctctcccgcagctttgttcgtgaacgtcacgcagagaatatttccgggatggattccggcggcttcgacaagatacgcatagcggtgggtcagagttttcgtctttcccgagcctgctcccgcgattatgcggacgtatccttcggtgcttgtgacggcttctatttgtttgtcgttcagtttatcgaaaatattgtccatgacgtctcactcacaagataaaatattaccttaattataccctatcgtgagtcggatttcaacgttttattatattaataatgtattaaaactcaaaatctgtctccgagcgtcgttttgtccttgaattcaaaattcttctcgtaaagcttgccgaatatgccgatgagaggtccgtttaagaatgcgcatatcacggtgccgacgtttattcccttgaagctgccgaagccgaagaagatgaacgacataagtattgcgactacgcagctcacaaggtcgtagcaggtcttgaattttgtaatgttagcgccgaattttttcgatacctcggcgacaaacatctcgtaagcagcgggcgggagctttgtgtggaacataaacgcaactccgacagagcagagcggaacgccgattatgtagaaaattatccttataattatagtgtccgcgggaatgttgccgagcagaagcatgaatccgtcaagcgcaagaccgtagaatatcgtggtgacaaacgacaggagatacctcaccttgaattttccgaggatgagcatcatgacgacgatgatacaagcctgaagcatatactcagccataccgaaagtgaagaacggcagaaattcggaaatcttcaaataaataatataagccggtgcgacgaccattgaaactccgaaattcgcaagcgccataaaagccgtgccgagcgcgagaatgaccactccgagcacatatgcagtttccgtatacataaccgtttttttcttcatagaattgcaagctcctctgtgtaaacataaataaagctcccggcatttgataaagaaatgtcgaaagctgttttttaattatactacatgtagtgcgggctgtcaatatatttttggaatattttggcctgtgatagattaaaactttagcgcgcatgattattcagactatagcggctaaaacctaccgaaacggtatttattcaattattcatgtatatttattctgtatgcattccgcattttcacctgttaatcatcggttttctacacgctttcaatatttacaacaagagccgctaataatcattcaattttgttccatttttttcaaaaatatattgatttttctgctttaatatggtaatatatttctcaagtatcaagatattgtgttcttggtattgtaaccccgtaaaaagaggtcactcctcctcttcgggtgaaaaaccatgtcgcccaacatggaaaatttattgaaagaaggacagaatatgaagaatcaattctccactcgtctgctttctttacttctcacgctgactatggtattcggacttctcgtccctgtatcagcagcggggt

SEQ ID NO: 3335 - DNA, 5718 bp, Unknown
  16S sequences of unknown bacteria
aaatgagcggatttgaggtgttttaggattgcgagagcatgaaatgcgaagcaatccgtgtatcataggggtccaaaatacctttttgaccccaacagcatataatgagaggaaggaaagctgcgggagaatgaatatggcaaaggtcattattgatgcaggacatggcggaatggatccgggagcgatacatgaaggacggatggaaaaaaacgatacactgaatctggcactggctgtgggggatattttgaagaaaaatggtgtggatgtcgtgtacacacggaccgatgatgtatacgacacaccgtttgaaaaagcacagatcgcaaaccgggatggcggagattttctgatctcgattcatcggaattccagtccggaaccggatcagtattccggtgtggagtcgcttgtgtacaataaacagggaaggaaggtacagctggcggaaaatattaacagtgaactggagaaggtgggatttcggaaccttggcgtgaaggagcgcccgaatcttatcattttaaaaaggagtaaaatgccggcggtgcttgtggaagcagggttcctgaatacagctgcagacaatgagctctttgacgagcggttcggggcgatcgcggaggcaatcgcagacggggtattgaagacactgggggaggatggactactgcagctagagcagcaggaggatgacactccggcagaaaagcggtatcgggtacagaccggggcctaccgtaactgggcgtatgcggagaacctgctccggcggctccaaagccagaacttcccggcctacattttgctggaggatggcctttacaaggtgcaggtaggggcgtaccggaagcttgataatgcggtgcagatggagaaaacactgcgggatcagggatattcgacgtttcttgcaatgtgaagataccagggtcaaaaggttatgcgtttcatgcttgcctaggaaaagatcatctgttatactgaagggcagggcaatgcaaaaaaactgcttttatatctttagtaaaggaatacgaatggataaagaacgattacaacagatcacagctccactgcttacctggtttgcagagcatgcgcgggatttgccgtggcgtatccggccgacggcgtaccgggtgtgggtgtctgagatcatgctgcagcagacgagagtcgaggcggtcaaaccgttttatgcgcgctttatggaggcgttgccggatgtgacagatctggcggcctgcccggaggatcggcttttaaagctttgggaaggacttggctattacagccgcgtccggaatatgcaaaaggcggcccggatgatctgtgaacagtatggaggtgtgatgccggttgattatgagacactgcttacgcttccggggattggcagctataccgcaggtgcgattgcttccatcgcaggaggagaggctgctccggcggtggacggcaatgtcctgcgcgtcgtaacccgcatttgtgagagtcgggcggatatcacgaagcagtccgtcaaaaaggaagtggaggcagatctgcggcaggtgatgccaaaggagcacccgggggcattcaatcaggcgatgatggagcttggagcgacggtctgcgcaccaaatggtgcgccggactgtgctgcctgtccggtacggcagctctgcctgtccggtgcggatggaagctggacagagattccggtgaaggcaccgaagaagcctcgccgcatagaggcgcgtacggtacttgtgattcgggatacggagcgggcggtcattcagaaacgaccgaagaaggggttgctggccggattgtatgagctgccgaatgcggaaggacatcttagcgcggatgaggcgctgaaggcggtacgccggatgggattttcgccgatccggatacatccgctgccggaggcgaagcatatattcagtcatattgagtggcagatgcaggggtatctggtgctggtagaagatgcagatgccagggaagcgcacacaccgcttggaaatgcacaggagctgctctttgtcgagccgtcacgtacggaacgggattatccgatcccggcggcatttgccgcgtatgtcacttcgttggatatactgcttggacaggagaagtttgatgaggcgggtgaaactactgttagaaacagattggagttggcctgtggaaggatacaaagagaaaagggagataaaaatgaaaattcttacgattgcaattccgtgctataactcggaggcatatatggaaaaatgtatcaagtcgatgcttccggcaggagaggagctggagatactcatcgtggatgacggttccacaaaggatcgcacgccacagatcgcagatgcttacgcggcccgctatccggagatcatccgggcggtacatcaggaaaacggcggtcatggtgaggcagtcaatgccggattgcgcaacgcgacaggacgctattacaaggtcgtagacagtgacgactgggtgaatacaaagtctctgatacgcattatggaaaaaatgaaggagctcgaggagtccggcggtgtggacatgctgctggcaaattttgtctatgataaggtcggtgcgaagcacaagaagctgatgcggtttaagaatgcctttccggtcaatgaggtgtttggctgggagaggatgggacatctgcatgagacgcagtatattctgatgcataatattttttatcgcacccagatgctgaaggactgtcacctggagctgccgaagcatacgttttatgtggacaatatttttgcgttccagccgttcccgtatgtggaaaagctttactatatggatgagaatctttaccattacttcatcggaagagacgatcagtctgtcaatgagaaggttatgatcggccggattgatcagcagatccgtgtgaataagatcatgattgacgtcatgggtgagcaggatttttcaacgaaggatccacatctgaaaaaatatatgctgatctacttaagtaaaatcatgatggtgacatccatgatgctgatccttgacggatccaaggaggcactcgcaaagaaggcggacatctgggcatatctgaaggagcatgacgcagaggattataagaagctgcgggccggtctgctcggtatcctcatgaaccttccgggccggttcggaagaagagcgacgatcctcggctataaggcagcacagaaatttgtgggatttaactgaacgcagataagcattcccctgcttccattgcgcaaagcaataagcaggggaatacttactttatgccacgatcacatttaatcgttccggatgtgcttcgaatgttacttcctcatgaaatccgaagatttctccgtcggtatgtacgcacagcggatggccggcttggatcaccacccgtttgcaggtgatgagatggatgccgggctttccgacatgcctgcccgaaaaggcgagcggaaggatcgagaggatccgcggcttggagagcccttcagcgatacagagcgtaaagcgatcgctgcacgggtcagcatccggtgcgaacctgaagccgccgccttcatacgggagattcatcacagctgcgaaaaatgcatgcgggtagacaagctcctgtctgtcatcaagcgtcagcttcatcggacagagccgggaggtaaagagttgcttcagagcagtgccggtgtagacaagcttgccaaggtgaaaccaattcagcatgtccttcatgccggagcggtaagctccgttgcagactgctgcgtcaaatccgatgccggagctgacacagaacgcgcttcgacatccggagggagaaatggtctgtccgatcttgagccggcgcagcttctgtggatgtaaaatctgatgcagggctgtgagcggatccttttccagcttcagcccacgtacaaagtcattgccgctgccggtcggaatacagccgagtgtcacatttataaaggaagaaagtcctccgatgacttcgttcaatgttccgtctccgccgacgactacgagcgtaaacggctgcgtaagcgcggaaagagaggcggcaatggtgcgcgcttcccctttctgacgtaaaagaaacgcttcatattcaacagagagctgatccagctctttttttattgtgttccatatcttctttccctttccgcatccggaaacaggattcacgacaaaatagtacataaatgaactcctttttattaacaaaaatacaagtatcttctatattgaaaggtttgcggcagaatgtcaagtagtaaaaaacagatggcacgtttacggtgaatttaccctcattttacatatgccacgttttacattttacattgctccgttacaataccgcatgtaacaaagagaaatagttacagggaagcgcgcaaagatagaatagaagaagcgcaggaaaaggagaacattatgaagaaatcagtagcagtagcaatggcagcacttatgacagcaagcatcggaatgacagcaatggcagcagcagagggtgacattaccgtcgtatccagagaagatggttctggtacaagaggagctttcatcgaactgtttggcgtagaggaaaaggatgcagatggcaataaagtagataacacaacagaggcagccaagatcacgaacagcacttccgtaatgctcggaaccgtagagaaggatgtcaatgcgatcggatatatctcccttggatctctgaatgataccgtaaaggcagtcaagattgacggggcagaggcaacggctgagaatattgagaatggcagctacaaggttgttcgtccgttcaacattgcaacgaccgcagaggtaagtgatgcagcagcagattttatttctttcattatgagcaaggaaggacagcaggtcatcacagacaacggttacatctccgttggcgatgaggcagagtatcaggggacagacgtagagggaaaagtcgttgtagcaggatcttcctctgtaacaccggtcatggagaagctggcagaggcttacaaagcagtgaatgacaaggtagacatcgaagtacagcagagcgattctacgactggtatgcagtccgcaatcgacggtctgtgcgacatcggaatggcatcccgtgacctgaaggacagtgagacagaagcaggcctgaccgctaccgttatcgcaaaggatggtattgcagttatcgtaaataacgatgcaggtatcgatgaactcacaagtgagcaggtaaaggatatttacaccggcaacatcactacctgggaagaactgaaataattcagtcaatgacaaacctgtaaaaagatgtcctgcggttgcgcggggcatttttctacggacctgagaggaaccgatatttatgagacaaagaattgtggaaaaattgatgcacgtcctgttttttatcgcagcgtgcgcgtcagtactggcagttgtgctgatctgtctctttttgttccggaatggaattccggcaattggagagatcggcattacaaaatttctgcttgggcagaaatggaagccgtccaataatctgtacggcattctcccgttcattctcggcagtatttatgtgacggccggatcgattgtggtaggtgtgccgacggcgcttttgctggctgtgtttcttgccttctactgcccgaagaagctgtatccgatcttcaagacgac

SEQ ID NO: 3336 - DNA, 19913 bp, Unknown
  16S sequences of unknown bacteria
ccagacggtgcagggtgggcgcgcggttgagcatgacgggatggtccgtgatgacctcttcgaggacgtcccagacgacggatgcgccgcgatcgaccatgcgcttggcagccttgatgtttgccgcatgctcgagctcgaccaggcgcttcatcacgaacggcttgaacagctcgagggccatctgcttgggaacgccgcactggtagatcttgagctgcggtccgacgcagatgacggaacggccggagtagtcgacgcgcttgccgagcaggttctggcggaagcggccctgcttgcccttgagcatgtcggcgagcgacttgagcgggcggttgccggggccgacgaccggacggccgcgacggccgttgtcgaacagggcgtcaactgcttcttgcagcatgcgcttctcgttgttgacgatgatctcgggggccgacaggtcgagcagcttcttcaggcggttgttgcggttgatgacgcggcggtacaggtcgtttaagtcggaggtcgcgaagcggccaccgtcgagctgtaccatcgggcgcaggtcgggcgggatgaccgggatgacgtcgaggatcatgtcatgcggctcgttgtcgctgcgcaggaaggcctcgacgaccttcaggcgcttgacggccttcgcgcgcttctggcccttgccggtcttgatggtctcgcggagctcttcggcagtcgcctcgaggtcgacggcatcgagcaggtcgcggacggattccgcgcccatgccgccgcggaagtagtcgcggtagttcgtgcgcatctcgcgatagagcgcctcgtcggcgatgagcatcttcggctcgatcttgaggaacatgtcgagcgcctcggaacgcaggtccttgcgctcctcgaagtcgtcacgcaggtcctcgatctcgcgctcgacctcgtcgggcgtcatgagatcgtcttcgtcgtactcgcgctcgccctcttcgttgaggtactcggtgctctggtggcgcgtgagctcgatcaggcggtcgcgctcggcgtcgagctcttcgagctgagcggccagctcttccttgagctcctctgcgtcttcctcgcgcgcttcctcgtcaacccaggtgatgatgttgctcgcgaagtacaggaccttctccaggtccttcggggagatgtcgagcaggtagcccaggcgcgacggggagcccttgaagtaccagatgtggctgaccggagcggcgagctcgatgtggcccatgcgctcgcggcgcaccttggagcgcgtgacctcgacgccgcagcgctcgcagacgatgcccttgaagcggatgcgcttgtacttgccgcaggcgcactcccagtccttggtggggccaaagatcttctcgcagaacaggccgtccttctcgggcttgagggtgcggtagttgatcgtctcgggcttcttcacttcgccgtgggaccaggagcggatcgtctcggcactggcaaggccaatgtggaactcgtcgaagttgtttacatcgaatacagacgtcattccttactcctccccctcgatgtcgttaatcgtttcgttcacgtcttcttcctcgttgttgagctgagcgaggccatcggccagggcgtcgagcgcgtcgactgcctcctcgctgggctcctcgccttcagcgggaagctgcaagatatcggtatcctcgttggcgtcgtcgggacgcgcgtcggtgttgtggccgacgagctcgacgtcgaggcacaggcccttcatttccttctccagaaccttgaaggactcggggacctcggatgcggggatgttctcgcccttgacgatcgcctcgtacgccttgacgcggccggccgtatcgtcggacttgatggtcatcatctcctgcaggacgtttgccgcaccgtacgcgtacagtgcccaaacctccatctcgccgaagcgctggccgccgaactgcgccttgccgcccagcggctgctgggtgatgaggctgtaggggcccgtcgagcgagcgtggatcttgtcgtcgaccatgtggttcagcttgagcatgtaggtctggccgacggtgatgggctcgcggaacttctcgcccgtgcggccgtcgtacaggtcggtcttgccgtgctcggacacctgcgccacgaacggcaggtagaacttgtcgccatacttcttctgagccttggcgatgcggttcttgttgcccttcaagatgacgtcggagatctcttcctcggtcgcgccgtcgaagattggcgtcgacacgaagaacgggccttcgaccggctcgtcgccctcgtcgttccaaccgttgagcgcggcccagcccagatggttctcgagcagctgaccgacgttcatacgggacggaacgcccagggggttcaagatgacgtcgaccggcgtgccgtctgccatgtagggcatgtcctcgaccggcaggacacgcgagatgacgcccttgttgccgtggcgaccagacagcttgtcgccttgctggaccttgcgcttctgcgcgacgtagatgcggacgagctcgttgacgcccggggccagctcgtcgccggcctcgcgcgagaactgcgagatgccgataacgcggcccgaagcgccgtggggcatcttcagggacgtgtcgcggacctcgcgggccttctcgccgaagatggcgcgcagcaggcgctcctcggccgtgagctcggtttcgcccttcggcgtgaccttgccgaccaggacatcgcccgggtgcacttcggcgccgatgcggatgacgccgtcgatatcgaggttggcgagcatgtcctcggacaggttcggaatctcgcgcgtgatctcttcgggaccgagcttggtgtcacgtgcatcgagctcgtattcggagatgtggatggacgtgagcaggtcttctgcaacgacgcgttcggagatgatgatggcgtcctcgtagttgtagccttcccacggcatgtaggcaatcatgaggttctgacccaaagccagctcggcatggtcggtagacgggccgtctgccagggcgtcgcccggctggacctcgtcgccgtagcgtgcgagcggcttgtagttgatgcagccgctctggttggagcgctggaacttgggcagctcgtagacatcggtgtcgccctcgtccgtggtgacctcgatgcgggcgccgtcgacgtaggtgaccacgccggcgtgcttggccagcggcagctcgccggagtcagtggcgatgcggtgttcgaggccggtgccgacgagcggcgcctgcggacgcagcagcggcactgcctggcgctgcatgttggagcccatgagcgcgcggtttgcgtcgtcgtgctcgaggaacgggatgagcgcggttgcgacggagttcatctggcgcggggaaacgtccatgtactggacgtcctcgaccggcacctctgccgggtcgccgaagatgccgtcggagttcttcgtacggcagacggcgcgcttggccttgatgaaggtaccgtcgtcgtcgaagtgcccgaactcgcgggtgtcggggttgaacggctcgtttgcctgggcgatggagtagttctcctcctcgtcggccgtcaggtagtcgacgtcgtctgtcaccttgccgtcgacgacgcgacggtacggggtctcgatgaagccgaagtcgttgacgcgggcgtaggttgccagcgagccgatcaggccgatgttcgggccttcaggcgtctcgatcgggcacatgcggccgtagtgggacgtatggacgtcgcggacctcgaagcctgcacgctcgcgcgacaagccgcccgggccgagtgcggacagacggcgcttgtgggtgatgcctgcggcggggttcgtctggtccatgaactgggacagctgcgaggagccgaagaactccttgatggccgcgacgatcgggcggatgttgatgagcgattgcggggagatgtcctcggggtcgaacgtggacatgcgctcgcgcacgacgcgctccatgcggctgatgccgatgcggaactggtttttgatgagctcgccgaccgtgcggatacgacggttgccaaagtggtcgatatcgtcggtctgatacccgctcttgccttcggcgaggttgatgatgtagcgcatcgaggtgacgatgtcgtcgacggtcagcgtcgaggagtcgctttcgaggccgagcttcttgttgatcttgtagcggccgacatcggcgaggtcgtagcgctgcgcgttgaagaacaggccctcgagcaggctgcgcgcggaatctacggtgggcggctcgcccgggcgcaggcggcggtacagctctatgagcgcctcttccctcgtggtggtggcatctttctcgagggtacgctgtaccatctcgccgtcgccgaggagctcgatgatctcttcgcgggtctcggcaatgccgaaggcgcgcagcagcagcgtcgccggttgcttgcgcttgcggtcgatgcggatggagagcgtgtcgcgcttgtcggtctcgaactcgagccaggcgccgcgcgccgggatgaccttggcgttgtagatcatcttgtcggaggtcttgtcacgttcggaggagaagtagacgcccggggagcggacaagctgggagacgacgacgcgctcggtgccgttgatgatgaaggtgccgcggtcggtcatgagcgggaaatcgcccatgaagacgttggattcctgcatctcgcccgtctctttgttgatgaagcggatgtcgacgaacaggggtgcctgatacgagatgtcgcgcttcttgcactcctcgacggagtgcttcgggtcgccgaactcgtgctcgccgaactcgaccatcaggctcttggaggtgttctcaatcggggacatgctctggaatgcctcgtcgagcccctcggtcatgaacttcttgaacgaatcggtctgaatggagataagattggggacgtccataaccgcggggatcttcgcaaaactcagacggtcgcgatagatgttcggcttggacacagtttcggtggtcgccacttaagcgttccctccttcaaacatggttttctattgaaaacgcctatgcttttttcgaagtcataggacctagaccatatgcgcgaccatgagtaaagtcaagaattaatttgcccaacgacacccacaactctacaaagaccgcaaacggtctaaatttttcggcaagttgaaattcaaggctttattttttggaggagttgtgttgttgggcctcgcattgcctcgaacagacgacgagggggagcgcccctctggacgctccccctcgtctgcatcgcacggatgtgccgcatcgctcacagctctatcaggcgcgacgggcctactttgccctctgtcacctccacggtcatcacgcttgccttggaccctccgcgcggccgacaggcgctgcccgggttgagcacgcggcacgacccaatcacctcgtcgcgcgggacgtgcgtgtggccgtggattgccagctcgtaggcacccgagcgcgccgcggctatggcgtcttccgggaaatgcgcgacccagatgcgcaccccgcctatcacgggacggcactcggcgcgcacgctgctgccgtaatcgctcctatcgcagtttccgagcacggcgatggtcttcgcgatcgactcgagctcccacagcaccgactcggcgcagatgtcgcccgcgtggatgatggtgtcgacgtccgcaaacgcgtcgaacaccgcatccggcagcctgccgtgcgtgtctgagatgattcccagcttcggcatctgctacttctccttcagacgcttctcgatggcggcgttgatggtcttgaggaccttgatacgcgcgtacttcttgtcgtccgactccacgtagtgccacggggcgaagttcgtcgaggtcaggcggaacatgtcgttgatggcctgacggtactgcgggtacttctcgcggttgcgccagtcctcgtccgtgagcttccaggccttctcgggattgttcttgcgctcgttgaaacgcgcgagctgctcgtcttggctcacgttgatccagaacttgacgaccagagtccccgagcggtacatctcccactcgaagtcgttgatctcctcgaacgcgcggcgccagtcctcgtccgtgcagaacccctcgatccgctcgaccatgacgcgcccgtaccacgagcggtcgtaaatgcacacatgcccgctcttgggcaggttcttccagtagcgccacaggaaggggtgctctttttcctcgcgcgtgggggccgcgcttggaacgacgcggtaatcgcgcgcatcgagcgccgaggcgacgcgcttgatggcgccccccttgcccgcggcatcccagccctcgaacacgatcatcatcgggataccccggtggtagagcttcatctgcaaggcgctgagcttgtcctgctcctgcttgagctcctcgacgtaggtctgctcgtcgagcgcgaggctgtgcgagagctcctcgacatcgggcgcctcgagcagcgtgtagcgcgaatgcggcagcgggaaattctcgggaatcttcacggggttctcatcgcgcaggcgcttgcgctcgagcgcctcgcgcatctcgtcggcaatcgcctgcatgaaggcgatcctgcggacgcgctggttgtcggcggggatgagatgccacatgctgtcggccgcattcgtgcgctcgagcagcgtgtcgatgatcgggtagtactcgtcatagtgcttgttctgccgtatgtcggaatccgtcacgcgccacgacgtgctctcgtcttcgcacagtttgtcgatccgctccttctgggcctgcttgctcacgtggaagaagcatttgatgatgagatagccgtcgttgatgagctgcctctcgaacagatgcgcggactcggcgtacaggccgatcgtgccgcccgttcccgtcacggcaaaatcgcccgtgtcgcgcaggagcggatggggagccttgcccttcttgcccttgttcgggaaggggtagtcgtgcatgaggatcttcatggcctcgccgtaccagctcctgtcgaagatggtgatggtgccatgctgcccgacacgctcccagtagcgcgtcatgtacgggtacctacgctcctgctgtgtaggagcggccatggagtagacccgaaacgagcgcgggtcgaggtctttgacgagcttggagatggtcgaccccttgcctgacgcgccccagccatccacgcagatgacgacgggaagcttctcgctcacgcattgctgctgcaagcacatgagctcgtcggcgaggcgcttcttctcgcgctcgtagtcctctttcttgagtcttttcttcaaatcgatgctctcgagcatagccatgcctccaaagaaacgaccgaaccagttgtctgaactgaggatagcattgctcgtatggggcgttaccgcaaaagaaaaggccaccccattgggtggcctttccaaaaggaatctctgaaacgagatttacttgagggtgatgacagcgccagcagcctcgaacttctccttggcagcctctgcgtcgtccttggaagcaccctcgagaacgttgcacggagcggactcgacgagagccttggcctccttgaggcccagagaggtgacctcgcggacaaccttgatgacagcgatcttgttgtcgccaaacgactcgaggacgacgtcgaactcggtcttttcctcggcagcctcagcagcgccagcagcaggagcagcagcaacggcaacaggagcagcagcggagacgccgaactcttcctcgaggtcatggacgagctcggaaagctcgagagcggtcagacccttgataccttcaagaatttcttccttggtcatgttaaaaacctttcaatctaggcggcacgcttatgccgccctataaacatcaataccttgtgcgggcttatgcagcctgcttgtccgcgatagccttgaccacgcgagcgaaagactcgatggggccattgcagacgcgagcaagaccggtgagcggtgcctgcatcgtgctgaggagcattgcgatgagctgatctttggtgggcagctctgcaatcttgagtgcatcctcgacggaaacctgagcaccgtcgacgacgccgcccttcatctccagagcctcatgctccttcatgaaatccttgacggcctttgccggcgccgcgacgtcatcgtcgcagaagacgaaggcggtcggaccagccagaacgtctgcgcactccggaagttcgagacccttcaaagcgatgcgggccagcttgttcttgtagacatgcatggaaccgccagcctgacggatgctgcggcgaagctcctgggtctccttgacggtcagaccacgagcgtcgatgaaccacacaccagccatgttctggagcttttcggtgatctcggcaacctgctgaactttttcctgtgtaggcatgtgcacctcccttcatacaaatcgacccccgctgggtcacagtggaggtcgacatgaagaacacagccttattggcgcgttatgcacgaccacctcggcgggcggagtagctctcctttgagcctcgtatgtgagacaccggctgtctgcggtagcgggtaagcttgctaatcaaagtgcccgtcataaaacgagcgcagtgatgatagaacagtttgggctttatggcaagtaaaacttattctgccgtgtattccctggtgatgtcggtggcaaccggaatgccagggcccatcgtcgtggagaaggtgacggacttgacatagcggcccttaacagaggacggcttcacgcgaaggatctcgtcgtagagcgcgccgtagttctctgcgagtgcagtagcctcgaaggagaccttgccaatggtgacatggcagataccgtaacggtctgcgcggtactcgaccttgccgcccttgacctccttgacagccttggcgacgtcgggggtgacggtgccgagcttggggttgggcatcatgccgcgcgggccgaggatcttgccgagtcggccgaccttggacatcatgtccggcgtggcgatggcagcgtcgaagttgatgttgccagcctgaatgtcggcaacgaggtcgtcggaaccgacaacgtcagcaccggcctcctctgcctccttagccttgtcgccctcggcaaagacggcgacgcggacggtcttgccagtgccgttgggcagggagatggagccacggacctgctggtcagcctgacgggtatcgacgttcaggcggaaatggacctcgacgctctcgtcaaagttcgccgtggaaatctccttggcgagctttgcagcctccatcggggtgtagaacttgtcagcctcgaccttctcgagagctgcctggtacttcttgccgtgcttagccatgaaaaacctcctagtggtacctgcgagctacgagctctcccacgtagacgagcaatgcgctgcgcattgctgattgctagtcgagcgcaccctcttcgatgaggacgcccatggaacgggcagtgccggcgacgatcttcatcgcggcgtggatgtcgttcgcgttcaggtcgggcagcttggtctctgcgatctgctggagctgctctttggtgagcgtgccgaccttgtcagactgcgggaccgcagaaccggacttgaggtgcagcgcctctttgatgaggactgccgccggcggggtcttgcagacgaagtcgaaggtcttgtcttcgtagaccgtgatctcgaccgggatgatggtgttgcccttgtcctgcgtggcggcgttgaatgcctggcagaactgcatgatgttgacgccctgggcgccgagagcggggcctactggcggagccgggttagcctgaccagcagggatctgcagcttgataaagcctgcgacctctttattcttcttagccattgctgttccttactgtaaacgcggtacttgttgatgctctatatgaaaagcacgaaaccccgtgagaagccctcatccacatagaggcacggaggtttgcgcatttcttccaaacttagatctttgccacctggtcaaagccaagctcgacaggagtctcgcggccaaagatggagacgagaaccttgaccttgccggcctctgcgttgacctcggacaccgtgccgtcgaaatcggcaagaggtccgctgacgaccttgacgacctgcccctcggtgaggtcggtagtcgtcttcttgggacgctcgggactcacgcgcttggtgagcttgttgaactcctcgcgcgtcagcggctcgggctggccttcagaaccgacgaagccagtgacgccaggcgtgttgcgaatggcgacctgcgtgcgcgcgtccatgttggcgcgaatcaaaacatacccgggaaggaccttcttctcggaggtgacgcgacggccgccttccttgagctcggtgacctcttcggtgggaatcaagatgtcgaagatgttctcctcgagaccctgcgtttccttgaggtgctcgatgttcgtcttgaccttgttctcatacccagaataggtatgaactacgtaccattttctacccatatctgtttatgctcccaaagaagaaatccagctcagcggcaaaatgatgacattgtcgatgatggcgatgaacactccgaagaaaacgattgcgccgatgacgataaggctcgcgttgacgagctcggggcgagtcggccagacgacgcgctgcatctcggtacggaccgccttcacgtagttcttgaagcgcgtccaggtaccgggcttggcaggcttgccgtttgcgcccttggcaggcttggcctctttcttcttctcgacagcctttgcggacttgtctttggagaagaagcccttcttcttttcgtctgccttctgagaaacttcctcagacgcaagaatctgctggcttgcagcagatttggacttggtgtgctgttttctttttttgtgtttcctctgagccatctcagtccgatcgaaccagggcgaaatgtcgcctcgttaaaaaatgccaatcaaaagtttgactggcattgaaaaatttctggcaggccaggagggactcgaacccccaacatccggttttggagaccggcgctctaccaattagagctactggcctgtgcctacaaacttcgcttgatgaagcgtatcacacttagcgagtctcgcgatgaagcgtgtgatgaccacaccaacggcagtacttcttgagctcgatgcgctcaggattgttctgcttatttttcttggtcgtgtaattgcggcgcttgcactcggtgcaggccaaagtgaccaacgtgcgcatgtaaatcctcctaaagcagcaagcaggcccggcggcgataaaccgccgggcattgctgcgaattaacactcagctgagttactcgatgatctcggtaacgcggccagaaccaacggtgcggccaccctcacggattgcgaagcggaggccttcctccattgcgaccgggtgaatcagctcgcccttgatctcaacgttgtcgccaggcataaccatctcgacgccgtcaggcagggtaacggtacccgtgatgtcggtcgtgcggaagtagaactgcggacgatagttggtgaagaacggcgtgtgacggccaccctcatccttggtcaggacgtagacctggcccttgaagatcttgtgcggggtaacggaacccggcttgcacacgacctggccacgctcgatgtcctcgcgcttgatgccgcggagcagcagaccgacgttgtcgccagcctcagcctcgtcgagcagcttgcggaacatctcgacgccggtaacgacggtcttctgagtatccttgatgccgacaatctcgacctcgtcgttgaccttgcagacgccgcgctcgacacgacccgtggcgacggtgccgcggccggagatggtgaagacgtcctcgacagccatcaggaacggcttgtcgacgtcgcggtcgggagtggggatgtactcatcgatggtgtccatgagctcccagatcttctcctgccacttgggatcgccctcgagggccttgagtgcggaaccacggatgatcggggtgtcgtctccggggaagccgtactcggtgaggaggtcgcgggtctccatctcgacgaggtcaatgagctcctcgtcgtcgaccatatcgcacttgttgaggaaaacaacgatgtaaggaacgccgacctgacgggcgagcaggatgtgctcacgagtctgggccataggaccgtcggtggcagcgatgacgaggatggcaccgtccatctgagcagcgccggtgatcatgttcttgacgtagtcagcatgaccagggcagtcgacatgcgcatagtgacgcttgtcggtctcgtactcaatgtgtgcaatggagatcgtgataccgcgctcacgctcttccggggccttgtcgatgtcctcgaatgcagtgaagtctgcatgggcagtgccgtgagaaccatcgttctgagacagggtcttggaaatagcggcagtaagagtggtcttgccatggtcaacatgaccgatggtaccaatgtttacatgcggcttggtacgctcgaacttttcctttgccatcgtatcctcctaataggtacattgctttgcgtattcgccgaagcgaaacgttattgcttttattataaatacgttgatttgaattcaacgaaagattcatggtagcggcgactggactcgaaccagtgacagcacgggtatgaaccgtgtgctctaccaactgagctacaccgccaggttttggaacttgaaaagatggagcctgtgatcggatttgaaccgatggcctcttccttaccaaggaagtgctctacccctgagctacacaggcatgtagtggtgggcgcgcatggattcgaaccatggtaggcaaagccaacgggtttacagcccgtcccgattaaccgctccggcacacgcccaagtttgaaactcactaactgtatacgcttttcaagctgcgtgctcgcgctttttcaatcgtcgcgcggcggtcgagaatattaccgcgcaacttccgtaatgtcaacgaaaaaacgctctatacacgcatccgggtgtatccacatgtctgttctcgccatatcggagactcccgagtacgcgactggagccagcgacaggaatcgaacctgcaacatatggtttacaaaaccaccgcgctaccgttgcgccacgctggcttgtcgcgcaaggaagtttatcacaggctttgctggccgcgaacaaatcgcccgagcttttttgccacctcggggtcgatgcgctcggccaccgtgttctttacgtgcgagggctgcttggcctcgttgcgccagtcctgctcggaatggctgctgtccaaggcgaagcccgccgccgacatgcgcgtgactcccccgccgtagacggttgactggatggcgaagtcagaggatacgacgacgacctcgaaaccctcctcgcgcgcctcgtgggcaaggcgctcgatgaccgagtccgcactcacgccatgtggcgagaacacgacgtcgatgcccgcctttctgaccggcttgccacttgaagcggcgttgcccgccgcgtcgaacacgacggtgcagcgctcgtagcggtcctgcgccaggtaggccgcgtcgttgacgagcgcatcgcgcgcatcgttccagccctcgccgctcgcgtagtccttctgggtgctcgcgtagcgctcgttgttgcggatgacgttgtagccgtcgacgatcaggacttttcggcgctgcattgcctcatccattcgtagcacagtgcggttgtcgcctgggcgacgttgagcgactcgaccttgccgacttgcgggagcttgacgagcaggtcgcaggtcttgagcgtgagctgcgacagtcccttgccctcggagcccatgaccaagacgattcgcccgttcatgggcgcgtcccacaagacggactgcgcgtgctcgcttgccccgacaacccagtagccctcggccttgagcgagttgagcgcattggcgaggttggcctccatcgcgatcggcaggtgcgacacggctcccgcagacgtcttgtacgtcgccgtcgtgacgcgcgcggcgcgtttgttgggaatcagcacgccatcggcgccgacgacctccgcgcttcgcacgatcgcgccgaagttgcctgcatcggtgatgtggtctgccgccacgatcagggagttcttcttgccctgagcacgcgcggccaggtcggagacgctgcaataggaaaacggcgcgaggcgcgcgatgacgccttggtgggcaccgtgcgacgagcgctcgtcgagctgcgcttggctggcgcgctcgatgggcacgcccatgcgctgcgcacgcttaatggtccgggcgaagcgcttgtcggcaagcagcgcgtcggtggcgtagatcgtctgcacgggcgctcccgaatcgagcgcctcctcgagcgcatggcgcccttccagatactcactcgccatagatgacccgcgccccgtttgccgtgtcctcgatggtgaagccgagggccttcaggccatcgcgcacttggtcggcgacggcccagttcttctccttgcgcgcctgcgcgcgtgcctcgagcaaaagctcgaccgcctcgtgggggtctgccccctcgtaggaagcgacctcgtgcgcgagcgtgcacacctcgctcggccactcctgctgctcgtgcgcgagctggatgccgagtaccccgaggagcttctcgagcatctgcgcggcggcgcgcacgtcgtcgcgggcacctgcgctgagcgcggggttgtcttccagaaacgcgttggcgtgcgagacgagcgtgaagatcgcgcccagggcgcctgcggtgttgaagtcgtcgtccattgcctcgacgaacttctcctcggtctcgcgcgtgacgcgcgcaagctcggtggagtcgacttcatcggcgtctgccgcgtgctcagctgcccagacgaggttgcggtgcgccgtgcagatgcgttcgtaggacgtgcccgcatcggcgaggcgctcatcggagaagtcgagcggcgagcggtagtgggtctgcagcatgagcaggcgcagcgccatggagttgcagcggtcgagcacgtcggtgagcagcaggaagttgcccaggctcttcgacatcttctccgagttgatgttgagcatgccgccgtgcatccagtaatgggcgaacgtggtgccataggccgcctcggactgcgccacctcgttttcgtggtgcgggaagacgaggtcggagccgccgccgtggatgtcgagcggcaggccgaggtacttctcggacattgcggagcattcgaggtgccaaccggggcgtccttcgccccacggtgaggaccagtgcggctctccgggctttgccgccttccatagcgcgaaatcgagcgggtctttcttgcggtcgtcaacgtcgacgcgcgcgccgctgcgcaggtcgtcgatgttgcggcccgacagtttgccgtagtgcgcgaacgagcgaaccgagaagtagacgtcgccgtcgacctggtaggcatgcccgcgctcgatgaggcgctcgatgagcgcgatcatctcggggatctcctgcgtggcgcgcgggcgcacgtcggggtccatgaccccgaagcggtgcatggcgtcgatgaacgcatcggtgtagaacgccgcgatctgggcgggcgtcttgccctcctcgttggcgcgcttgatgatcttgtcgtcgacgtcggtgatgttttggacgaacgtcacctcgtagccgcggaaggcgaagtagcggcgcacaacgtcgaaggtgagaaacgtacgcgcattgccgatgtggatgtagttgtagacggtcgggccacacgcatacatcgcgacctttccctcttcgcggggcctgaactcctctttgcggcgcgtctgcgtgttgaaaatctgcatgcctgctccttggtgcatatcgtcatgcggcgcaaaagcgccgcgttgcaactcgtgtgttggctggtcggtatcttaacaggaaagaagcgcgacggcctgggcgctcacgccctcgcccctgccctcgtagccgaggtgctcggtcgtggtcgccttcacgccgacgctctcgacgggaatgtcgagggcgcgtgcgatgttcgcgcgcatctgctcgcgatacggtgacatcttgggcgcctgcatcatgacgaccgagtcgatgtcgtcgatggaaaagcccttcgcacgcacgaacgcacccacctcttggaggagctttatggaatcggccccctcgtaggcagggtcggtgtcgggaaacagcttgccgatgtctccttcgcgcagggcgccgagcagcgcgtccatgatcgcgtgcacgaggacgtcggcgtctgaatggccgtcgagcccgagctcgtagggtatgtggacgccgccgataatgagctttctgcctgcagcaaatgcgtgaacgtcgtatccgagtccgatcctttgcatggcgctacctctgccccacacgcgccgaaagagcggcgacgaccggcccgacgtcttcagggacggtcaccttgatgttgtcgcgcgggccctcgagcatcatgacgcgcccgccgatgcgctcgacgagcgaggagtcgtccgttccgacgaagccctcgaacatggcctccttgtaggcgcggcgggcgatctttgcccggaagacctggggcgtctgcgcgatccaaaacgccgtgcggtcgggcgtgccgacgatggagcggccgttgacgaccttgagcgtgtcgatggaaggatgccccacgaccacgccatccgcatcgaggttgcccttgagggcgttgatggcgtgcgtgatcaagtcgacggtgacgagcgggcgcgcgccgtcgtgcacggcgatgtactcgtaggtggtgggcacggcgtcgacgccgttcatgcaggattcctgccggatctcgcccgacgaggcgaacacgatgggcgtgacgaacggatacgggtcgatggcgtgcttgcaatattccgcctggcggttctcggggcagacgatgacgatgagccccacgtcgggcgtcgcgtcaaaggcttcggccgaccaggtgagaaccggtttgccgagcacctcgaacatctgcttgcccccgggattgccgaagcgctcgccctgcccgcctgcgacgatgaccgcggcggtcgaggcgcctttggacacgcgcccctcgagcgacacgctcgatgcctcgaaggtgttgatctggtggacgaactcgtcgacttctgccggcgtgagcgctgccgggcccgttgccggatcggcctcgagcgcggcgtcgtcttggggtgtgtgctgcatggctttcgtcctcccgaagattctctttatgcttcctgctcgtctactaccagctgggaaagccgcgcgatttctcggtcgaggacgtcgcgggcgttttgcatggcaagtaacgtggccttggcctgcggaaatgcactgccggactttgtgagcatctcggattcgcccccaaagaagaggctcacgacgttgcggcgctgtgagacggtgatggcgagcgtgtcggtttgcacgcacatccgcatcgcggtgcggtggcgcatgcccgtctccttcgtctcgaaatcgtccgtcggcgtgagatgcgtgttggcgcgcaggatcctgcgcgcgtgcgcgtcgagaatgatggcaccgtccatctttgcaagctcgaacagcctgttgggggtgaagggaacgtcgatgacaaaaccgccgctggaaagcttgaggacctcttccgcatcgccgatgcagatgagcgcaccggtgtctgcggcaaggatcatatcgagcgctgagcgcaggtcggttccgggagagacagccttcagagcatcttccatcgtctgaatgctatcgctcatgctgcctccatcgtgccttttcgcccactacgccgactcataataacacggtgccgcccctccacttgagaggtgcggcaccttcgaatgacatttattgttcgggcggcaacgcctgcctgagctgcgcgactagtcagccgccatgtcgccgtcggcggctcccccgccgacgctccccaatgccggggaaacgtggaaatcggtccgcggcgcttcgagcgcgagcgtcttgcgctcgcggagcttggggatctctcccgtgcccggggcgaacacgagctcgtcgccaacatagtcgaccaagatgatcgacccttccgtccatttgccctcgaggatctcttccgagatcgggtcctcgatgaggcgctggatggcgcggcgcagcgggcgggcgccaaacgcggtgtcggtgccctgcgactcgatgtacttcttggccgcctcggtgagctcgatgctcatgccctgggcgacaaggcgctggcgcaggtcgtcgaccatgaggtcgatgatcttgacgatgtcgtcgctcgtgagcgacttgaacacgatcgtgtcgtcgagcctgttgaggaactcgggcctgaacagcttcttgagctcggcgatgacggagtcgtggatgtccttgtcggacatgccgctttggttggtcgtgccaaagccgagcgggttctcgcggacgatctctcgtgcgccgacgttgctcgtcatgatgataatcgtgttgcggaagtcgaccttgcggccctgcgcgtcggtcaggtgcccctcttcgagaatctgcagcaagatgttgaagacatccggatgggccttctcgatctcgtcgaacaggacgaccgagtacgggcgctggcgaacggccttggtgagctggccgccctcgtcatagccgacatatcccggaggcgagccgatgagacgcgagaccgtgtgcttttccatgtactcggacatgtcgaacgagatgagcgcgtcttccgtcccgaacaggaactcggcgagcgccttggagagctcggtcttgccgacgccgctcggacccaggaagatgaacgagcccatgggacggcgcgggtccttcaggccggcgcggctgcggcggatagacttggacagcgcggtgaccgcctcgttctggccgatcacacgctcgtgcaacgcgtcttccatgcgcagcagcttggccgtctcggcctcggtgaggttggagacgggcacgcccgtggcaacggagaccacgtcggcgatctggtcggtatcgaccgtggcgacgttgatggccgcgtcttcacgccacttgcgctcgagctcggtgcgctccttgatcaggttcttctccttgtcgcgcagctgcgccgcggcctcgaagtcctgatgcccgatggcctcttccttcttgacgcgcaccttcttgagcttgtcggagacgacggcgatgtctttgggaaccgtcatgttcttgatgcgcatacgcgcgcccgcctcgtcgatgaggtcgattgccttgtcgggcaggaagcggtcttgcacgtagcggttggagagctcgacggcggaaacgatggcctcgtccgtgtagtggacgcggtgatgtgcctcgtacttgtccttgagcccatcgaggatctggatggactggtcgatggtcggctcttcgaccatgaccgtctggaagcggcggttgagcgccgagtccttctcgatgtgcttgcggtactcgtcggtggtcgtggcgccgatgacctggatttcgccacgagacagcggcggcttgaggatcgcggcggcgtcgatagagccctcggcgctgcctgcgccgatgatcgtgtgcatctcgtcgatgaacaagatgatgttgccgtcgtctttgacttccttgacgacgctcttcaggcgctcctcgaactcgccgcggtacttggacccggcgacga

SEQ ID NO: 3337 - DNA, 14126 bp, Unknown
  16S sequences of unknown bacteria
aagtccggttaagatatactatattcttgcaaggttagcctcgaaaggagggacatttatgttcagaacatatcagcccaaaaagctgcagagaaaaaaagaacacggttttcgcaagagaatgtcaaccagaaatgggcgtaaggttttggcgcgcagaagagccaaaggcagagcacgtctctcctactaaagagggttgaccacatgcgcatgtggtctttctttttatgtgccgtattttccggtccggctggaaaatcataccgaagacgcaacgccttttgaagtttttcaaaaggcgttttgtttcatgaaagggcggttaaggtcaggatgaagattgcaaaaatcaatcagaaccgtgattttcgccgcgcttacagcaaagggaaatatgcggcgcatccactgcttgtcacctacgcggtaaaaaaccgcacaggtgagaccagactcggcattaccacttccaaaaaagttggaaacgcagtccagcggaacagggcaaggcgaatcatcacggcggcatttatgccgttggaagaacaaatcaaaaaaggctatgatatcgttttggtcgctcgggccaaaaccccccttgcaaaatcgactcagatcgcacctgttttgcaaaaacatctgcaaaaattgggacttatgaaatatgatcaaaaaatggatgctttggatgatccggatgtaccggaaatatctgtctaaactcaaaagagtacccacctgcagattttatcccacctgttcttcctacgcgctgcaggcaatcgaacgctttggcgctttgaagggtggttttttggcgcttcggcgcatcctgcgctgtcacccttttcatcccggagggatggatccggttcctgagaatttccattggttttccgaaaagaaaaagggttaagccgctcctcctcttctacttcaggctttttcagcgcagaaagacttcttaaaatttgtaaacggaggacaaggaatgaattttatttatactgtattcggctggcctctcggctggattatgtatgtgtgctatttgattgtaaaaaactatggacttgctctgatcctgtttacccttatcaccaaagcattgcagcttcccctggcgatcaagcagcaaaagtctatgatgaaaacggccatttttaagccgcagatggatgcgctgcagcgcaaatataaaaacaacagggaaaagcttaatgaagagatgatgaagctttatgagaaggaacattataatcccatgagcggatgccttcctactctgatcagcttcccgatcctgtttggtatgatcgacgttatttataagccgattacccatatcatccggcccggctccgggatcattgaaaaagctaccgagattctcactggccttgggatgaataccggaaataccatggcctcccaaatttcggttatcaattccattcaggcagacccggctccctggagtgaactgggtgctgattttatcgccaaagcccagtcaatggatttttctttcttaggagttaatctggctgcgacccctactttaatgccaaacggtcagccgatgtcggtctatctgcctcttttgctggtgccgatcctttccggtattacttctcttttgatctccattcaatctcagcgccagaataaggctaccatgggtgacatggcaggcggcggaatgatgaaaggcatgatgtatttcatgccgctgttctctttgtggtttgctttccaggtgcctgcgggcgttggtatgtactggcttttgtccaacgtgctgaccatggtgcagaccgctattctgcataaaaaattcgatccgactgctgcgattgaagcggcaagagcagcagaggaagcagaaagagaaaaagagcgggaagaacgccggcttttaaaggaaaagaaagcccagggcaaacagctggatgaaaaagaaaatgaaaaagccatgaacgccaaagagctcaacgcaaaaaaaatcgccgaggcccgtcgtcggatggctgaaaagtatggcgacgtatacaccgaggacgaggaatagtgttttgccatttggaatggaggttttattgtgaatcgtgaagtcattgccactggcagaacagtggacgaagcattggataaagcatatgagcagctgggtatatcccgggatgaggcgcagtttgagattctcgatctgcccaaaaaaggttttttgggtctgggcgcttctcctgctaaggttcgggtatttatcgaggtttccaaagcccagtgcgcggtggattatctgcagagtatttttcaccagatggggttggatcaagtacagattgacgtaaccgaaacggaaaattgcgcgaatattactttaagtggcgacggccttggcgtactcatcgggcgtcggggtgaaacactggatgcgctgcagtatctggctggattggtcgccaaccgtttggagggcgactattaccgcattgtggtagatagcggaaattaccgggaaaaacgggaaaaaaccctggaaaacctggcgaaaaaattatcttctcaagttattcgcacaggccgcagcgttacgctggaaccgatgaatccttacgagcgccgggttatccacgcgaccattcagggaattgacggggtaacctcctcttccattggagaagagccttcccgccgggtggttatttcctccacgaatccggtgaagaaaaactatcatcgcgatcgttctgcagaaagcggcgagcgcggggaacgcagccgtgaccgtggaagccggggcggcagaggcggccggtcaggccgcggcggatatgaaaaacgtccgccacgcgaaaaatatgtgccgcaggacgtgactcccaaccggaccaaggtggaagtggaggatgacagcaaaccgctgtattccaaaattgaaatcgactgaaaatatgctgtatttgtttgcggcagtctatcaaaaaacaggagcagatgaaaggtctgctcctgttttttgctatataaaagcactgaaaaatattcgggtaccaccctttgttgggacggccataaaaatctgaatgatggactaagatagctcatattgcaaagccttcacttgtttgccgccatgataagtttcaaacgcatgaagttttatgcatataaaggcacggattgaaaggaaaggggcattctgcttctttttatagcagccgtaacaatagccccagttttatttgcgtttttgaaaccaatagacaaataaaccaacggctgccacaactgtaattcccacgccaacccagaaccaaacagaagggccgccgctgacaaaaatagcagttggcccatcagcgcctccgattaccccgatattcagagaaaaaaataaatccattgcaatatctcctttacagatccgtctgttcttccaattccggtaccagttccaaagaataatcgtcaaattcctgtcccaaggccgtatagatttcgtcgtatatttcatgcagaagcgtcatggatactacatcgcttttaggtttaaaataaatggaaatccacatccgccggccagtgagcaccacatcataaaaagtaccggtatattgaaaatcgtcgagaatatgatgagaaatttcctttactttataaacgatgtcttccttgggggcaagcagaaagatgctgcgaaaagcgtcggcaatcatttttaccggctggggcagcatgaatagcgcaatgacgatcgctacaatctggtcaaaatagggcgcaatttttttcgctggcgtttctgataaaaaaacctgagcaaaaaacgccgccgcaattcccatgctgcacagaaaatctactttccagccgtaaatttccgcttctactgtaggagatgcggtctttttatgaaagtgccgcatcaaaagcagcaccaaaaggctgaaaaacgccagaataaactcaaaagcggaaatttggccatgattcaaatgacggccgccctgcagtaaaatctggatgttgttggtaattagccctatggtgacggaaatgagcataaaacctttgacaatgataaacaccgattcaaactgggaatagccgtagggctttttctcgctgaccggctgataaaaaagcggagttaaaaatagggagagaccgatgacaatcagctcagccgcgtcaaataccgcatccatcaaaatagcctgggagttgctccataatgacatcaaaagctcgacaacgacgaaagccattcccgcatagagggatattttcaggataattttttcgtatttttgtttttcattcacaatttcaccttgctttacatttttttgatgaagaaggggcaaatctctttttttgtaaggcaagacgccctataaagccaatcgagaaaatgcccagagaatgaaaaacgctacgggtccttttcacccgaacgagtcaaagccggcggctttcagccatctgcctgaaagtcttccaatttccagctgatccgcgtacttaccagcgcatccagcaaaaggccgtcaggtgtgtactcctctgaaaaaattttgccgctttcccggatttcggcggccagtgccgctttttcatagggtaaaagcagcctcattcgaagctggctgggcggcagggcctttgccattgcctccagcaaccgattcaaaccataacccgtcctggcagagattagtaccgtcccgctgcccataatggcaggcatactttccaactggtcgcatttattcagcgccgtgaccaccggcgtaccggtacatcccagctcatccagcaaacggcgggtcacttcaatctgatcgtccgcttccggactggaaatgtcgcacacatgcagcagaagatctgcgtccgccgcttcttccagagtcgattggaacgcttctaccagttggtgcggcagccggcgcaccaatcctactgtatcaatgagcatgatggttctcccgtctggcaaagtcagtgcccgggcagtaggatccagggtggcaaacaatttatcttctgccaaaacgcctgcattggtgagcgtgttgagcagggtagatttccctacattggtgtagccgacgatggccaccgttatcacgccatcttttttgcggcgcgcccgccgggtgctgcgctgccgttccagatcccgcagctgttcttccagcgattcaatccgccgccggatgtgccgccggtcgctttccaatttgctttcgccgggtcccctggtgccaatgccgccgcccaagcgcgacagggcggttccttgccccatcagccgaggtagccggtatttctgttgcgccagctctacctgtagcttaccttcccggctgcgggcccgctgggcaaaaatatccagaatcagggtggtacgatccaccacagccagatcggtagcttcttcaatattacgcagctggctggcagttagttcatgatcgaagatcaaaaggttggctcccagcgccgccgcctgatttttgatctgttcgagcatgccgctgcctacacaggtggttttatccacggcaggacgtttctgactgattttacccagcacaacagcgccggctgtttgagccagcttttccaattcgtccaaagataccgctgcgtcatattctccggtatccaccgccaccaaaatggcgcgttcttgttcttctttcatttcgatcatgatttcacgcctttctaaaggtagtataccacaaatttcgtctgtttggaaaggggaagaaagtcgttgccaaaaacagaggatgcatagtatactgaaaaaatgaaagggtggcgaataaatgattttttcagcgaaaaagagaagattgtttttgatactgccgatgttgcttttggttctaagtgcttgtcagaatttcccctggcagaggtggtgcaggacgaatcctttgcagaagagatatccacttttaacgacaaagatgttgaaaagtaaatgactctttccgacgatggattcaaagaggttttaaatgtcgtgtgtaccccctcaggaaaacactccgttggctgtaattatgggtctgcactggatagcctgtctgtctgcaatttggcaccggatgatccttgcctgttacaattcttgtgggaatgtctgaatattttacccatggatagtctccgcagcgaagagatgaaaaacgaaagacgattcttattctgttctttcttttcaagatgaacagattgatatacaagtggctgtttatcagatcaatcgaaaatatactattaccgtgcagaaagaaaatctggatccacaatggtatcacatttctgttgtgccagggggaggttatttggaaaaaaactgaaaaccatttttgaaaatttgccggatatccaaatggaacagttctgcacatcactgaaaagcggcgatgtagcacagttggcggtaatatgctaccattcggctaggacagtgcaggaatgggacgggtacgcgtttgacgaggtgactttccaaaaacttggcgatgagtacgaggtaggtttgacgagaaaatatagatcttttcaaaatactgcaacaacctatcgattgaagctgaattgcctcgatcctgaaaatacgccctttccctcagggtacagcgaatggctaatggatgtgggggatgaatcatctgattatgatggaacctatattgaggcgtataacctgaggcaggaagacgtgccggtaattggcctcccttttggcgaaacgtttgaccgggatccggtgaaaatgacggaaagcctgcggcgcttttttgatttggcggagaatccagttccgccttggcaaatggaaccgtccttgcttttagaatccttgctatatttttggatttccgattagaagtacaaaccaaccggtaccagaattggatgtcccgataggaaatggagcaggcggccctttattattttggaatggattttatcccgagcaaacagggagcaacagcttatgacccggaaaaaggaatttttcgtcaaaggcatcagggagaggcggcctcccgatttgaaaagcttgttcgctggagatgggaagaaaatacgcttgtgctttgctacgaaacttatttggatgcttcatgatacaaaagacgaatgccgccgaataccgttttgagaagcgggaagatggaaccttttatttttctgatgcaaaaaaaatagactgaaatcgaaaaaagccggaccttaaggtccggcttttttcgatttatcttccacagcagtgtttatatttcttgccgctgccgcaggggcaaggatcgttgcggcccacctttttgccgaccttaaccggctcttttttcaccgtcccgtcggaagaaccgccggaagtggtcatgggtttagccacctgctcgcggcgaggcgcctcccggctgacccgtacggtgagcatcatttttaccgtatcctctttgatagactggaccatttcgtcgaacatatcggaaccaaccatccggtattctaccaccggatcccgctgggcgtatgcctgtaaggagatgccgcgcttgagctcatccatggcgtcgatgtgatccatccatttggtatccacgttgcgcaaaagcacgacccgttccagctcccgcatcaaatcactgccgatttccgcttcccgctgcccgtagcgctcttttgcccgactaatcagcgtatctcggatatccgccttggatacatcgtccagttggcggccgtcgtagacaaagtcttcgtcggagcacagccagccgccgaaatggactttcagacccttaaggttccattcgtctttattttcgtcgtcggccaagaaaagatccaccgcgtcggaaatcgtgctctcggtcatcttgaggatggtatctttgagactgtcgccgtttaagacgctggcgcgctggccgtaaatggtttcgcgctgcttgttcatcacatcgtcgtattccagcacccgttttctggtggcaaaattgcggccctccaccttgctctgggcgctttcgatggcgtgggagagcattttgttttcgatgggggtattttcgtccaggccgatggaatccatcatgttaaagatgcgctcgccgccgaatagccgcatcagatcgtcttccagcgacaggtagaagcgggtggcgcccgggtcgccctgacggccggcgcggccgcgcagctgattgtcaatccggcgggattcgtgccgctcggtgccgatgatgtataagccgcccgcctctttgaccttttcggcctgaggggcaaattcctctttaaattttgccaaaagctgggcaaagcgggcgcgtgcgtcgagaatctgctgatcgtcggtctcgccgaagccggtggcctccaaaatcatttcctcgctcatgccctcccggcgcagctgatccttggcggcgtattccgcgttgccgcccagcacgatgtcggtaccgcggcccgccatgttggtggcgatggtcaccgcgccgaaatggccggcctgcgctacgatctgggcttctttttcgtgatacttggcgttgagcacttcatgggcaatgccgcggcggcgcagcatcttggacaaaagctccgatttttcgatggagatagtgcccaccagcaccggctgccctttttcatgacaggcggcgatatcgtcaatcacggcattaaacttgccctgctcggttttataaaccacgtcggggcggtcgtcccgctgcaccggcttgttggtgggaatctcgatcacatccagcctgtagatctcccggaactcgccttcttccgtcatagccgtaccggtcataccggccagcttgtcgtacatgcggaaatagttctggaaagtaatggtggccagcgtctgggactctttttgaatgctgaccccctctttggcctcaatggcctgatgcagtccctcgttatagcgacggcccatcatgatacgaccggtaaattcgtctacaatcagcacctggccgtctttcaccacatagtcgatatcccggcgcatggtgccgtatgctttaatggcctgattgacatggtgtagataggtggcattttccatgtccatcaggttatcgatctggaaaaaggcctcggcttttttcacgcccgctggggtaagggtggcggtgcgggctttttcgtccacaatgtagtctccatccacatcgtcgtgttcttccttggagtccagctccttgaccttgacaaagcgcatgtttttcaccagctgatcggtcatctggtacagatcggtggattttgcgccggggccggagataatcaaaggcgttctggcctcgtcgattaaaatggagtccacctcgtccacaatggcgtaatgatggccgcgctgtacctgattttccttgcgcaccgccatgttatcccgcaggtaatcaaatcccatttcgttgttggtgccgtaggtaatatcggcggcgtaggcctgccggcgctgatcggagttgaggtcgtggacgatcagccccacggaaagtcccaaaaagcggtagaccttgcccatccattccgagtcgcgcttggctaggtaatcgttcacggtgacgatgtgcacgcctttaccctccagggcgttgaggtaggcgggcagggtggccaccagcgttttgccctcgccggttttcatttcggaaatgcggccctgatgcagcactacaccgcccaaaacctgcaccgggaaagggcgcattcccagcacccggtcggcggcctcccggcagacggcaaacgcgtcgggcagaatgtcgtcgagggtttcgccggcggcaagacgcgcttttaaagccggcgtctgctcctgcagctgccggtcagacatcgccttatatttgtcttccaaagagagaacccggtcgacaatcggacggatattctttaattccctttgggaatagctaccaaaaattttttcaaaaagccccatgcaatcaaatccctcctcgcggtcgaaaaccgctttccaggccaaaagcccgatacttttttattgtatctctttctatgcggatttgtcaaacaagctagctcgtttctgtgaattttttgttaacttaccgatgaaaaaaccgatttctggccttgtcctaaccggattcgccgtgtatactgaaaaaataagtattgcgggatatttggtagatcagatcttaacatacgggctttgcgataccttaaaaaggagaaatgagaatgttgggaacttgggtcaatgtagcggcggtgttaatcggcgggtccattgggctgctgattcaaaagggcctgtcgcagcggctggccgatacgctgatgaaggggcttgcactatgtaccatcaccatcggtatttccggcgcgttggacggtagggatacgctcaagctgattttgtcggttgtcatcggcgcattgctgggcgaacttctggatctggacggaaaaatccaaagactgggagagtgggtggaacggcgtttttcaaaggggaccggcggggtttccattgctgaagggttcgtcactgccagcctgatgttctgcgtaggggctatgaccatcgtcggttctctgcaaagcggcctgaccggcgaccatcagatgctgtttaccaaatccatgctggattttgtttcatctatgatttttgcttcttctttggggctgggggtgctgttcgcagcgggttttgtgctggtgtttcagggtggcattaccttgctggcggggctggcggccccttttttgggggatgcggtcattgcggaaatgacctgcgtgggctcagtgctgatcatcgggctggggcttaacatgctggggctgaccaaactgaaggtcatgaactacctgccggccatctttcttccgattctgctttgcttattgtggtagcggaaagggcgtgttttccatccgggattgattcttccggtgaaagggttccattctgtcaacaacctgtcccaaacggcgttttaccgcatgtcggcttgaaaaaacagaagaaaaagcccggattttgaaatccgggcttttttattatggttactttttccctttttcctcccaaagccccaagatttgcttgcggtaggcggccgccgcctgttcggtcttgttgtcctgaaactggtagtatacccggtcgcggatttcgtccggcaggtactgctgaggatagtagtgccccgggtaagggtgcggatactggtaggtgaggccccgccccagctttttggcgccggaatagtggctgtccttgagataggcggggatgtctccggttttgccatttttcacatcggccatagccgcgtcaatggccaacaccccggcgttggatttgggcgcggtgcataaaaggatggtggcgtcggccaaaggaagccgcgcttccggcagccccagctgcaaagcgctgtctacacaggccttcacaatgggaatggcctggggccatgccaagccgatatcttcacaggcaatacataaaagccgccggcagggagagagaagatccccggcgaccaggagcctggccagataatgcagcgccgcattttcgtctgagccgcgcaccgacttgtgaaaggcggaaaggatgtcgtagtgggcgtcgccgtcccggtcatagcgcatggcgctgcgttggctcacctgctctactgcgtccatgccaatgcagcgccgcccgtcctgtaccggagcggacagcacgcacatctccaccgcgttgatggatttgcgcacgtcgccgccgcagcccagggcaatggcttccacgacgccgtcttccagctccagcggcgtttgctgttcctgctccaaaatggcaaaagcccgccgaaccgccgcctcgatatcggccgcatccaccggtttgaactcaaaaacagtggaacggcttaaaatcgcgttgtaaacatagaaataggggttttcagtggtggaggcaatgagggtaatctgcccgttttcaataaactccagcagcgactgctgctgctttttgttcaggtactggatttcatccaggtacaaaagcaccccacccatggcttcaaaggtgcccagtccattgataatttccttaatgtccgaaacgctggcgctggtaccgttgagtttgtgcagggtcttgccggttttttgagcgatgattctcgctactgttgtttttcccacgccggaaggcccgtaaaaaatcatattggtgatatgccccgaatccaccatccgccgcaaaacggcgccgggacccagtaggtgagcctgccccaccacgtcgtccaggctgtccggacggattcggtccgccagtggtgccgccataacaaatccccctttcctgcggaagatccgcgtatcaatgtaaatgtatcgatttttctattgtagcagttttttgccggaatgagaagaacttttgttttataacgataataatttccgctccccggcattgccggaaagcggaaattacaaacattaatgcatttgtccttttttgcggaaaatgacccaaagaacaaacattgcagcagttcccaacaggtacaagccatagagaatccgggcgccggctaacgggagcccaaacggggtgccgcactccggatggttcagcgcgtaccagacaaagcccacagccagtaaaaccagtgcgatcccactccataaaaaggcacgcccggcttttttctttttcatggagggaaacctccttttctttgtgcgcttattcgtacagagggaatttagcgcaggtctcgtttacttcggcccggatttgatcggcggcattttcaaaatcggtagccgccagatagatccaacgggcaattttctccatttcttctttgccaaagccgcgggaggttacgtaaggggttcctacccggatgccgctggtgacaaagggcttctggggatcgtcggggatagcgtttttgttcacggtaatatacacctcgtccagccggcgctccagctccttaccggtgatgttcatagagcgcagatccagcaaaagcaggtgattgtcggtgccgccgccgaccagatcaaagccctccttcgtcaggcagtgggccagatgggcggcgttttccacgatcttcttttgatattctttgaattccggtttcagcgcctcgccaaagcaaacggccttgccggcgataatgtgttccagcggaccgccctgggtgccggggaaaatcgctttgtcgatctgcttggccagcgcttcccggcagagaatcatgccgccgcgggggccgcgcaaggtcttgtgggtagtggtggtgacaacgtcggcgtaaggcaccggcgactgatgcagcccggccgctaccagaccggcgatgtgagccatatccaccatcaggtaagcgccgcaggcgtcggccacttcgcggaatttggcaaagtcgatggcgcgggcgtaagcggaagcgcctgccacaatcagtttgggtttatgctccatcgccagccgcgtcagctcatcgtagtcgatggtgccggttttggcgtctacaccataaggaacgaattgaaaataggtgccggacatgtttaccggcgagccatgggtcagatggccgccgtgggccaagttcatgcccagcaccgtgtcgccgggttggataagcgcaaaataaaccgccatgttggcctgcgcgccagagtgaggctgtacgttggcgtgctccgcgccgaagagctttttcgcccgctcaatggccagattttccaccttgtccacgcactggcagccgccatagtagcgcttgccgggataaccctcggcgtatttattggtgagaaccgatcccatggccgccatgacagccggcgagaccagattctcagaggcgatcagttcaatatttcttctttggcgggccagctcttcctgcatggcactgcccaattccgggtcatacttagccacaaagccgatggtatccagcatatctgcatacatggagatcatcctttctttttgggaaaccggcggcggaaaacgcaggcgc

SEQ ID NO: 3338 - DNA, 22851 bp, Unknown
  16S sequences of unknown bacteria
ggcagatgctctcccagctgagctatacccccacatcggctgaatcacttgtcgtgactcagcttatttataatatcatattccggattctttgtcaacccgtttatccgattttatgcaggaaatcttccagatattccggattttatttctgcatgaacgaacggatctcatccggggtgaatacatgggttgtgccgcagaagtggcagtttacctcaatgttctccccttcttctaccatccgggccagctcctcctgtcccaggctgaccagtgctctgcgcatccggtcacgggaacagtcgcagcgatactctgccgcacggctgtccaggatctccggctcaaagccctccagagcggcaaaagcgatctgctccggagtcatgccgtcggcgatcatctgcgaaacagccggcagcttgttgatgttggcttccaggcggtcgatgaccgaatcatcggcaccgggcagcagctgcaccaggaatccaccggcgctggcgacagtcaggtcgggattgaccagcacgcccaggctgcacacagtgggaacctgctcgctgaccgcatagtagtaggtgacatcctccgcaatttcgcccgaaacgatgggaacactgccgatggtcggctgtgcgaagcccaggtcccggatcacagtcagggaaccatccttgcccaccgcaccggctacatccagcttgccgtagttgttgagcgggatctccacaatgggattctccacatcgcccttgaccataccggcaccgtccgccacaacggtgaacttgccggcaggaccgccgccgctcaggcgcagggttacagaatcttcagggttcttgagcatactgcccatcatggcgccggcagtgagcagacggcccagagccgcagtaactgtggcagaagtcttgtgaatccgctctgcctctccggcgatcttagtggaatccactgcgcagcacatcacagagccgtcccgcgcaatgacacgaatcaggttatccatttaattttcctttccggttttctttgcaacataaatggcccgctgggtggtttccccagccgggtcaaagctgtcatccccatagacagtcaccagctcaaagccgttttccgccagcagggtacacaaaaaatcatggctgtatgcccgttccgcgaaactctcgctctcccggtaataacagtcattctcctcatcatagacaaaaaagtccagatcgattgtcaccagcagaccatcttccagtgtattctgccagacacagtagacctcgtcggtatcatagacgaaggtttcattccccagaacctgccggtgtttgtattcggtattcacatcaaacacgaacagtccgctcgggcgtacatactccccgaccttccggaacatcttccggacactttccggttctgtgatgtgattgatgctgtccagtgcgcagactgccgcatccaccgggctgtacaattccagctcacagagatcctggcagacaaacagcggattggtaaacggcagatccgggcgttccatctttttctgcatggcaacagacagcatatcctccgaaagctccacgccgaccacatcatatcccaagtcggccagttcaaaggatagactgcctgtcccgcaggccagatccgcaaccacgctggcactgtccatattctgtttgattatcgcatcaaaatacgccgcccgctccccataggaaatattctgggtgagctgatcgtagtatttcgcgaacgagccatatccgtgcatcgtcacttcttgatccgggagaaaacaatggtatatccatccgctccataattgagcgaacggttcacacggctgatggtcgctgtgctggctccggtctgagccacgatctcactgtataccttgccttcccgcagcattcctgctacctggaaccgctgggacaatgccttgagttccggaactgtgcagagatcatcgaagaagcggcggcattcctccacattctccaaagtcaggatcgctttatatagttcttccagggttgaagtttgtagtttcggctccaatgttataacctccagtgcagttttgttcacaagtcatagtttatcattttagtgtgcaaaagtaaatagggaaacaaccaaaaattcaagaaatatttgtttacacaaaaaattcaagggaactgtgcagtctatattgcataattcccttgaagttgttattcttccgtcaaatcctcggcatattccgcagcaatttcctcaatgattgccttgacttcctctaccccatctcccttttcggacgagaatgggatcatggtaatctgatccgcacagggaatctcggtctggagtgcttccagacgctctgccagctgtgtcttggtcagcttgtccttcttggtcaggatcagcacaaacgggaactcgttttcaatgagaaaatcgatcatctgcagatcatcctgggaaggcttatgccggatgtccaccagctggaacaccagaccgatattccgtccgctgcggaagtacccgtcaatgagcttggcccagcgctccttctcccccttggctaccttggcatagccatagccgggcaggtccgcaaagcgcacgctttccagccggaagaaattgatggtggcagtctttcccggcacagcgctgactctcgccagctgcttgcggttaaagaccttgttgatcatcgaggacttgcccacattggagcgccccgcaaaggcaatctccaccagatccgatttgggaagctggtcaaatcgaccaaaggaagtttcaaagactacattatgaaaattcatgccaatctcctatctgctcgcctgaggccgatcggtcgtttctgctttcggaacggtgatctcaaaagatttggattccgctttctggcccagatggttctcctcatgccgctttccggtgggatgcggcatggagcacagagctgtttccagtacatctgccaccgtatctgccggaacgaagcggatcgccttcttcactgcttcatccacctcatgcagatcggatacattctgccgggggattaccacggtgttgatccggttgcggtatgcagccatggtcttttcccgcagtccgccgatgggcagtacccggccccggagagtcacctcgccggtcatggcaaccttgccccgcaccggaataccggtgagcgccgataccagcgctgtggtgatggtcacgccagccgacgggccatccttgggaacagcgccttccggcacatggatgtgaatatccttgttcttatagaactcatggtcgatgccgaagcggtccgccatgctgcgcacatagctgatggcagcctgtgccgactccttcatcacatcgcccaggcttccggtaagctgcagcttgccgctgccgtccatcaccgctacttccacctgaagcatctcgccgcccacagcagtccaggccagtccgttgactacgccgacctcatccttaccggagatgtcatccggcttgaagcgcttggggccgagataggtttcgatattcttttcggtcacgctcaccttctccacatcaccggctaccagctcccgggcgctcttgcggcagatctcgccgatcttccgctccaggttccggacaccagcctcccgggtgtagctgtcgatgatggcatacagcgcaccatcggtgatatgcagccgcttggaatccagtccatgccggctgagctgcttcttgaccaggtgccgcttggcgatctggaacttctcctcccgggtgtagctcgagagttcgatcacttccatacggtccagcagcgggccgggaatggtttcggtggtgttggcagtcgccacaaacagcaccttggagaggtcatagggcacctcgatgtagtggtcacggaatgcggaattctgttctccatccagcacttccagcagggctgccgagggatcgccccggtagtcgctgcccagcttgtccacctcatccagcagcatcagcgggttgctgctgccggcctgcttgatggcagccatgatccgaccgggcatcgagccgatgtaggtcttgcggtgaccccggatgtccgactcgtcccggacgccgcccagggacatgcgcacatacttgcgtcccatggcttcggcgatggagcgggcaatagaagtcttgcccacaccgggcgggcccaccagacagatgatctgtccgctgatgtccggcgccagctgacgcactgccagcagttccagaatccgctccttgaccttctgcagaccatagtgctcccggtcgagcagtcgggccgccgccttgatgtcgatcttgtccttggtgtagacattccagggcagttccagacaggtatccagatagccccgcacaacaccggcctcctgagagctgggatggagtttgcgcagcttgcgcacctccgcagtcagcttttccttggcctcatcattgagcgagagcgcctcgatcttcttgaggtactcatccgcctcattgtcgatgttgtccccttcgcccagctcttcggcaatggcacgctgctgctcccggagatagtactcccgctggttctggtcgatctgctccttgaccttggcgtagagttcccgctccagagtgaggatattgatctccccttccagcagcgaagccagcagctgcagacgcttggcaatgctgttttcattgagcagagtctgcttcttatcaggggcgaggatcatatttccgccgatataatccaccaggtacaccgcgtcatcggtgagcatggcattggggatcagatccttggacatcttgggcgacagttcacagtatctctcatacagatccttgacggtacgcatcagggcgttcatcttatcagtggagccggtgcgcagtccgcgatagggcagttctgtgacttccgccaggaaaaagggctcgaaatcggtgacctcatccgaaatggcggcacgatacagtccttcgaccataatgcgcagcttttcgttgcgggcacgcacgacctgctggatctccgctacaacacccacccgatacagatcggaaaaagacgggtcctcctgctggacatccttctgagccacaataaaaatctttctgttgtgtttcatagcatgctcgatggcacgggccgatttttcccgggcaacatccagattgaggatcgtctgcgggaacatcaccactccgcggagcggcagaaccggcaggcaaatcggcagcatatcagttttggtatccgccataaaacacacctccatatattcgtagaatcccatgcgaaagcacattcttccgcatgattgttttattatacacgaaaacagtccgcttttcaagagcaagaccagggtaaaacaagacctctgcaggcgtacagcagaggtcttgggcatccgtatgcagctcgttacagcttggcaagcaaatcggcgatttccggcatatctccggcatttttggcacgatgcgcatataccacattcataccacggtccagcaggaacactgccggcagctggagctcattgccttcataggcaccgtgctccagacccagcttcttggctgcctggatcttgcggatggtcttgatggaagccagccccagcttgctccgggctgcccccacctgatagaggtcatagagcttgccctcgggatcgcaggctacctcgaaccgcagctcctcctcggtaatgctctcggcaatggtagccggagcgctctgcagtaccagaagaatctgggcgtccttgtccaggaacttctgatagttctcccgataggcccggatatccagctgacagatggtacaaccgtaataccgcaggaagatcaggaaggttttatctgccttctggaccttttcctccagagtggatgtctttccataaggggtctgatatgtaaagtctatggccttgtcaccgaaagaaatcagcttattctccataaaaccacgcctttccgcctaaacaggcgcattcttacaaatatcatagtatattcggctgaaactgtcaagtattgccgaaatttgcctggattccccataaaacagccagccggcaggcagtaaagaaacccgacggctggctgtgtgaaaaatcatggatggaatctgccaggggatcagcccgcagtgccgctccggtgtgaggagcgcttttcgggattcaagcgcagcttatgaggctgccgcagctgatcgtaggtgatcatcggactgcccttcccattcacaaagtccgctgtgatggtaatggactcgattgtgggatcggagggcgctgtgtacatcaggtcgccgaggatctcctccatcaccgaccgcaggccacgggcaccggtcttacgctcgattaccttatgggcgattgccgacagggcttcgtcctcaaactccagctccacatcgtccagcttgaacagggtcttgtactgctgcacaatggaattcttcggctcaaccagaatccgcttgagggcttcctcatccagcgaatccagggtggcatggatgggcagacggccgatcagctcggggatcaggccgaacttgaccagatcctggggaatgagctgcttgaggtattcatcccgggccttatccttgttggacttgagctgtgcgccaaagcccatggacgaggtcgctacccggctttcgatgatcttttcgattccctcgaacgcaccgccgcagatgaacaggatattcttggtgtcgatctggatgaattcctgctgggggtgcttgcgtccgccctggggcggtacattggcaacggtgccttccaggatcttcagcagagcctgctgtacaccttcaccgctgacatcccgggtgatggacgggttctcgctcttgcgggagatcttgtcgatctcatcaatatagatgatgccgcgctctgcccgctcgatgtcaaagtcagcagcctggatcagacggagcagaatattctccacatcctcacccacataaccggcttcggtcagggtggtggcatccgcaatggcaaagggtacattcagcacccgggccagggtctgagccaacagggtcttacccacaccggtgggtcccagcagcaggatattgctcttggcaagttctgcgtcatcgctgccgaaatagatgcgcttatagtggttgtaaaccgcaatggacagcgccttcttggcattgtcctgaccaatgacatagtcgtccaggatcttcttgatctccatcggcttggggatgtcgatggatacctcttcccggatggtccggtgcgaatgcttctgctcaagttcttccccttcatgtacaacattgtagcagagatccacacagtaattgcagatatacacgccattcggtccggcgatcatccgctctaccttatcctgggtcttgccgcagaaggaacagcggatcgggcgtgtatcgtcatacttgggcatagggtcctccattctggatactgttcacaatcagcaaacaggcgcctgccggagcagacacctgcgtgcgctttttatcggtgttcgattaccttatcgatcaggccgtactctgccgcttcctcggcggacatgaagttatcccgttcacagtcggcggtgacaacttccaccggcttgccggtattgtctgccaggatgcggttcatccgcttcttgattacttccagacgcttgagatggatcgccatatcagtgatctgtccctgagtaccggcagagggctggtggatcatgatctccgcgttgggcagtgcgaaccgcttgcccttggcacccgacgagagcaggaatgcacccatcgaagctgccataccgatacagatggtggaaacatcacatttgatgtactgcatggtatcatagattgccataccagcggttaccgaaccgccggggctgttgatatacagctggatatccttatcagggtcctggccttccagatagagcagctgagccactaccagactggcactggcatcggttacttcctcgcacagcataacgattcggtcattgagcagtcgggagaaaatatcataggaacgctctccacggttggtctgctctacgaccatcggaactaaactcatacttttgacacctccggatcatcttatggcagagcgagcgtcaaaatgcgcttattcagcgtcagcggtttcctctgccttcttctttcttgtggtcttcttcttgggagcttcttctgcaccctcagccggagcctcttctgccttcttggcagtcttcttggcagcggtcttcttggcaggcttcttctcttcctcagcctcaaccggctcagcaacagcattggccttgatcagctcgattgccttgttgactacgatatcctggctcagagcgttgagaggcatgttctcacgaacttccttctcatccatgtggtacatctcagcgatcttggcgatctccttgtccacatcctcatgagtagcggtcaggccttccagctcagcgatcttctccagagccagacggatgcgtacatgacgctcagcctgctcagcgaaggtctttctcatagcgggcagggtctcgccagtgtactggaagtaggtgttcagatccaggccctgggatctcagacggtagtcgaagtcctgaaccatctcatcgatgcgggtatcgatcatgcactggggcagatcgatcacagtgttctccagcacagcggataccagaccgttctcatagtcctcttcgcacttggcttcagctctctccatgagtcttgcccggatatcggccttcaattcatccagagtgtcaaactcgctgacatcctttacaaagtcgtcatccagctcaggcagctgcttctccttgatggagttgatgctggtcttgaatacagccggcttgccagccagatcagtagcatgatactcctcggggaaagtaacagttacatcgaagctgtcgccggtgctgtgaccaacgatctgctcctcaaagccgggaatgaagtgaccggaacccagtaccagatccacgccttcacccttgcctccttcaaaagcaacgccgtcagcaaagccctcgaagttgatgtttacggtatcgttcatctgagcgggacgatcctcaatggttaccagacgggcagcacgatcgcgcagctgagccagagtggtctccacatcagcctcatcgatcttggcttcagccttgggagccttcaggcccttgtagttcttgacctcaacctcaggctttacagtaacagtagccacgaaggtgaagccgtccttggaagcttccttgacctcaacctgagcagcctcaacgggagttacattggcctcgccgcaggcttcctcataagcctggggatacatgtcgttgacagcttcctcgatgaagtagtcgccatactgcttttccacataggctctgggagccttgcccttacggaaaccaggaatggtgatctccttggcatgcttgcggtaaaccacatccagaacgggctggaattcctcagcagtgacggtaacttccagagctaccttgttattctcaagcttgttgcacgaaacgagtttcattgatcttcgtcctcctgtaattacaacgatatacttttgcaagtataccatagatttaataagaaatccatacgattttatgaaaaaaacagcaccagaggcgatgttttgttcacgaaacggtaaaaaatgccggttttatggcagaattacgcccggtgtttcgatccggaccgggtcaaagcccagatgatccgccgagatcagccggaactcgatccccatataattgccgttgaaggcatagctgcatccggttccatggatatgtccgtaatagcagcggcggatcttgtgccggagcagtacttcgatgatctccggagagagctgctcgccatacaccggcggatagtgcaggaacaccaccttctcctccgggatgtccccggcggactgaatggaagcctccagccgtcccgcctcccgggcaatgaccttctgatcggcaggttccccctgatcaaagagccagccccggctgccgcagacgcagaccccctccaccagatagtggttgttgtgcaggatatgcagggtgtcaaagccgttttccgcgaaaaaggcgttcattttattcatggtcgcccaccagtaatcatggttgcccttgagaatgatcttctgtccgggcagggcattcacaaattcaaaatcagccttggcctccgcaaaactcatgccccaggaggtatctccggcgagcacgactgtatcttccggctggatctttgccagccagttctgccgggtccggtcaacatagttatgccagccggggaatatatccatcgacttgttgcccgacagcgaaagatgcagatcgccaattacataaagtgccataaacgcctcctgtgaagtaaatttttcttggtatgccgcaccggtttccgggtaagataaaggcgaaaggagatgattcacccatggaaaagcagaattgtacctgtcagaccgcggtgtcctgtgaagtgggaagctgcgtctacaaccgtgacaagaagacctgcactgcgccctccatcaaggtaggcccgcagtttgcaagcagcaccgctgagaccaactgttccaccttcaaggcccgctgaccatcgcctgagaaccggcagcttcctgtttcccatccgggcagcagaaagctgctacatagattcatccatcttccgcagagcatgcagcagggcatgctccatctcctggggacgcacagccccctcgaaccgcaccggaagctcctccagctgtgccaggcttgccggaaccgccaggccgctcacctcagaaagcgcccgcaggcagtcaaactcccctgccggtacctcgcagcccagtgctgtgaggacgctgtccgcaaacttgaacgggctggcagtggataccaccagtgccggagtcctgtcccctgtttcctgctggtactgttccagtgcgttcaccgctactgcggtatgggtatccatcacatagccgcaccggtcatggatctcccggatggtgtccagggtcttctgatcgtcacagctgtatgcggcaaattcctcccggatctgatccagagcctcggcagtgaccgagtactccccgccctcattcagacggtacatgcagtaggccacagctctcgcttcccgtccgaacagctcgaacagataccgctccagattggaggagatcaggatatccatggacggggtattggtgagatggaattcccgcttacggttataggtgccggtggtgaggaattcggtgagcacatcattgcggttggatgcgcagatcagccgtccgatgggcagtcccatgcgcttggcgtaatagcaggccaggatattgccgaagttgccggtgggcaccgccacattgagcttgtcccccacctggatctcgcccgaagcagccagatcagcataggcgctgaagtagtagacaatctgaggcagcagccgtccccagttgatggagttggcgctggtgagatacatcttctgctcacccaggcgttctgccagctgttccttggcaaagaggtgctttacgccggtctggcagtcatcgaagttgccttccacagcctggactgccacattggagccctgctgggttgccatctgcagccgctggatctggctgacgccgtccaccgggtaaaagaccgcaataccggtgccgtccacgtcccggaagccctccagggctgccttgccggtgtcgcccgaggttgccaccagcacgatggcccggcggtcatcgccgagattgcggcgggcggtggaaaccagacggggcagcatctgcagtgccatatccttgaaggcacaggtggggccatgccacagctccagcaggcgcagatcccctgccgcccggaccggagccggctgatcgccgtcaaaggtaccacggtaggcaccctcggtgcaggccttcagatcctcccgggaaaagtcatccagatagagcgccatgacgcgctctgcccgttcccagtaggtaaggccctccagctcccggataaaatcgagatccacctgaggaaattcctccgggacaaacagtccgccctccggggagatacccttgaggatcgcctgcgacgcagtgagttgaatggacgggtcccgtgtactgatatacttcataatgtacctccaagcatttgcaagcagttgcggtatgtaaaagggttacagatttttctcaaagaagcggcgggcattctcaaacaggatcttctgagtgatctccggggagatgccgctgtccagcagagcctgccggaagttttccacccgatccaggccgttcagataattcgggatctcggcgccgtcaaagtcggagccgcagcagaggatatcctctccgcccaggctcaggaaatgccgggcatgggccagcagatcatctatatccttcgaaatgccgtcctctttaataaagtagcggtaatagttgagccccaccagaccgccccggtcccggatggcacagaactgttcatcggtgaggttccgggagtgattgcagatggtccggctgttggaatgggtggcgataaagggcttggtcgccaccttgcagaggtcggcaaaaccctcgtcattgaggtgggatacatccaccaggatgcccagctcctccatccggcgcaccgcctcgatgccaaagggagtcaggcccttgtgggtatccgagccgctgcccagctcattttccccgttccaggtgagcgtgagcatccgcacgccgcagttccgaagctcgtcgagcatttccagctgtccgcccagagcggcgccgccttccacagtcagaatggcagcgaactttccatcgtcaaacgcctgcatgatctcctgataatcagaagcctggacaatgcggtcggcgttcttcaccatctcggcccggaagaaccggacattctcccggaaaaactccaccgccttttcgccccggagctcatccgggacaaagatggcaaatgcctggccccaccggctcccagccggcagacgctccaggctgatatgcagatcattgcggcgcagctccagatttttggaactgcagacagtaatggtatcacagtgcaaatcaaagagatccattgacatcaaacgctcctttccagtaggcctgttccagaatgctccagctgccgtccgccggctgtgcgacgatctccatcacatcgaaccggggctgatagccggaatactccggatgctccatggtatagtacagggcagtttctatgagtttgcggcgcttggctgaccccacggcctctgccggacgcaccagatagtccgggctgcgggtcttgacctccacaaaggcaagatcctccccatccagtatgatgaggtcgatctccccgtgtccgaagcgccagccccgttccaggacggtacatccggactcctgcagccagcgggccgcatggtcctcgccgaaccgccctaaggcattcatgaccgccctccggtgaacttcttcaggaaactgcggcggtgaaccggcgaaatgccgtattcggtcagccgttcgtaatgctccttggtgggatagcccttgtgctttttgaaatcatattccggatactgctgatccagttccagcatatagcggtcccgggacaccttcgccagaatggaagccgccgcaatggcctgggactgtccgtcccccttgatgaccgtttcggtgggaagtcccagcctggggtcctggttgccgtccaccagcaccagttccggcacctgggagagtccctccaccgcccggtgcattgccaggaaggtggcgccgagaatattgagctcgtcgatctccgcttcactggcggaggcaacacagtaagccagtgcctcctgccggattacatcataaagggcttcccgcttcttttccgagagcttcttggagtcgttgagcccggggatctccttgtccgccggcaggatcactgccgccgcgaataccggaccagccagcgggccgcgtccggcttcatccacgccgcagagcagctggatgcctttggcatgatattcccggtccaatgtcagttctgccatcttctctctccttatcgccgcagatcccggatgcctctctcccggaatccgccgttttcccatacccagacgcttccaaagcccactgtttccagcagttccagcgcctcgtcaaaccagaaccgcagcgccgctgtctcatgggcgtcggcattgacggttatgcgggcatgctttgcgcacagctcccgcagcagaaaatccgccggataaggcgtactgcggtacttccggaagatcccgccggtgttgagttcaaacaccgcactggtatccaggcagcggtgaaggctttccagtgccgcctgccggtactgccggctctcctcgtcaaacaggcgtccgcctgcgttgttctttataataaggtcaaaatgtccgatgatgtccggacggtactgctcggcattttccgctgtgatctcgtagaaccgccggaccatggcaaggccatcgccgccgaaggcttcgtcccggcaggcttcggcataggaagccgggccgtcgatgatgtaccgcttgccggtgtccgggctctggatctcatgcaccgaaccgatgatatagtcaaacgcctcccggtgccgcaccggatagtaccagtcgtgttcgatgcctacggcgatccgcattctgccggcgaactgttcgcccagctgccggagcatagccgcataggccagctcgtcccggatgccgaagtcggcaaagtccacataggtatgcccggaaaagcccaggtcggtgaaccccagtttccaggctgcttccgccatctcctccggggtattcttgccgtcacaccaggtggtgtggttgtgtgtggaactactcagcatcgtcctgctcctgttccctggcagccggtgtgaacttcggcggtttttccagggtgatgcgccccagctttccgccccggaactcgtccagcagcatgatggctgcccgctcggtattcactacgccgccggactgcagcattccgcgcttgcggcccaccagctccagcaggtcaaagccatccttgccctcaatctcctcgggggtgaggttgtagcgggcgcagagcagcttgggatagttctccgccacggtctgcaggaaacgcattgccaggtgctcgatgtccaggatctcgtccttgatggagccgatataggccagcttttcaccgacctccttgtcatcgaacttgggccagaggacgccgggcatatccagcagctccacaccgccgccgatgctcacccactgctttccgcgggtgacaccgggacggtcctccaccttggcccgcttgctgccggccagcttgttgatcagcgagctcttgcccacattgggaatgcccacgatcatcatgcgcagcagcttctgggaaagtcccttggcctcccggcgcttcatcacttcatccagcacctgacgggcgccgggaatgatttcattcagtccccgaccgctcttgcagtcggtgggaatggccagaatccccttggaacggtagtattcacaccaccgggctgtgaggttgggatctgccacatcgcatttgttgagcaggatcagccggggcttctgacccagcatccggtcaatttccgggttccggctgctctggggaatccgggcgtcggtgatctccaccacaatatccaccatcttgaggttggctgccatcagacggcgggtttttgccatgtgcccggggaaccactggatggactgtgcatctatcatatctgaaactccccttaaaatatcaattctctatcctattattctaccgtaaatcccgaaacttgtatagacatttttcggataaaaacaaaaaaggagcttttaacaagctcctctttgccgtcacagaatttacttgacttccttgaccttggcagccttgcccacacggtctctcaggtagtagagcttagctctgcgaaccttaccgctgcggatcacttccacgctggcaacagcgggggaatgaatggggaatactctctcgataccaacgccgtgagcaactctgcgtacggtgaaggtctcagcgataccgccatgcttcttggcgattacagtaccctcaaaggcctggattctctctctgtcgccttccttgatcttaacgccgacacgaacagtgtcaccaacgtttacgaccggaagatccttcttcatgcagctttctgccatgagcttcagtgcgtccatttgttacatcctccttgaaatatacaagcgttcattcccgatcacggcagaggaccgcctgctttaatgtcaccgcctgtttggcggggcatcaaaccccgcagacgccattttggcccctgcggtcatagtatgctgtaatataatagcacaatccatttccggatgcaagccatttttcaaagttttctgcgaaaaatcccgcttcagagcagcttttcataggcgtagtaccacttgaggccatagacttcctccagccccagatcgatgcgtccgcagcagtgatacccacaggcctcatagaacccgatggcagtgcggttctcctcatagacatccaggcggatggcctgcagccccgcttccctgcctacttttgcggtatggcggagcagtgcccgtcctacgccccggtgccggtacgccgggtccactgccagggtgtgcaccacaaagaccggcacctcaaagggaatctgccagctggcctgccggtaggcgctgtcctgctcccgccggaggatcaccgagccggcgatctgtccgtccagccccgcaatgtagagcgcgccggcttccagcccctcctgggcatcctgccgcagcggatagacgccccgtttccaccgggagccatccagacggccctcttccgcgtcgcctgcccgtccatagagctcttcgatcccatccagatccactgcttctgcccggcgcacccggatctccatcgcccatccgctcccttctgccctgtgctggttccattataacccaaacgcgctgtttcttccagttttcaaaaagaattttccggaatctgagaaagatggaaccttttttctcctgccgcatatcatagtgataggcgcggggcaatgctgctgccgcgtaaatccacacaaaaggagcttgctatgaatattttcagaaataccggctgttcatccgggttctgccccgacagctgcggtaactcctgtcaggattgcggcaattcctgccagagctgcggcaattcctgctgcggtatgcccggctgcccctgcacacccatctgcccggataccatcaccatcggcactaccatcaccggcgccccgggcaccgaagcacaggtcaccaacagcggcacgccgcagaatcctgtcctcaactttgtgattccccagggcgctaccggccctcagggtccccaggggccgcaggggcctcagggaccgcagggtctccagggcgttcagggcgaaatgggtatgaccggtcccatgggtcccaccggcccgaccggtccccagggcccgactggtcccactggctctaccggccccatcggtcctgccggtgccggcctggaaactgtgacttccttcactcccggcttcccctatccccgtggttccatgctgttctacaatggctcgctgtatcaggctgctgtggataaccccaccggcacaccgggttcttccccggattacaacctcatcagcgttgccggccccaccgggtctgccggaccgaccggccctaccggtcccactggaccgcaggggcagcagggtctccagggcccgaccggtctgcagggtactgagggtcccactggccccactggtcctaccggccctcagggtcagcagggcgtagcaggaccgaccggccccaccggtgcagaaggtcctaccggtcccactggtccccagggacagcagggtctccagggtcctgccggttccgccggcgcccagggtgcggaaggtcctaccggccccactggccccaccggtccgcagggcgccgcaccggctgtgaatgccctctatgccaccaacaccggttcgcagaccgctgccagcaccggagatgacatcaccttcgacaccaaccaggtagaagagggcagtgacatcacccactccgccagctcggcagacttctcgctgactcagaatggtctctaccgcatcacctactcggcggtggtaaccaatacctcctccaccggcaatgtcggtctggaactgcaggaggacggcacctccatcgacggcagtgtcaaggaggccaaggtcagcaatacctccgaccctgccactgtcggcgcaaccgttctggtgaatgtcaccagtgcgccggtcaccatcaccctcaactccaccgaggacaataccactgtgaccaacgcggctatgacgatccagaaactcaactgacaatcaagctgtgatcagacggacagtccgtgtggctgtccgtcttttcgcactgtatcaaaatactgggaggcaagcggatgaaaatcgtagtttatgcaatctgtaaaaatgaaagcgggtttgtggaccgctggatggactccatgcaggaggcggaccgggtcattgtgctggataccggctccaccgatgatacggtacagaagctccgcagccggggcgccagagtctatgaggagcagttctccccctggcgctttgatacggcccggaaccgctccctggaactggtggacgatgatgccgatctctgcgtctgcaccgacctggacgagtacttcctccccggatggcgggcggaactggagcgggtatggtcgccgggagtgacccaggtgcgctacccctatgtgtggagcttccgggcagacggcagtgacggcgtgaccttctggtatgagaagatccacgcccggcacgggtacaaatggacacacccggtgcatgaggtgctgagctggatcggagaaggtacgccgggcaaaacggtggacgcaccgggcatgcgtctggagcaccaccctgaccctgccaaatcccggggacagtacctgccgctgctggagctctcggtgcgggaggacccggacgacgaccgcaacacccactatctggggcgggaatacttctactaccggcgctgggacgactgcatccgcaccctgaaaaagcatcttgccatgcccaatgccctctgggcagatgagcgggcggcctccatgcggtacattgcctcctcttacagccacaaggggcagccggatgaggcagtccggtggtatctccgggctgcagccgaagcgccccatctccgggaaccgctcaccgatctggccctggaactctactatcagaaggactggcatggcgtgctctttgccgccggtagggccctgcgcatcacaaagcgcccccgtacttatatctgtgaagctgatgcctggggcagtctgccctgggatctgatggctgtggcatactacaacatcgggcgcaacaccctggcgctggaatacgccctgcaggccctggagctggaccccgggaacgaacgcctccagaacaatgtgcgcctgctccgggagctggaggatgccgcggcacttccaccggtatttagagacagtaaccaactgcccggagaaaatgcggagtaaaattggcagtcccgctccaggagattatgctataatatcacttggatttaacgccccggacacaattttgtctgtccggcccagccagaatacaatataggaagtgcaaacctgtgatagaaaaaacaaacaagactgtaccggtttccgctgagaaaccggctgttgacgcctctgaggcactgctgttcagcatcctgctcacaatcatcggcggattctttgaaacctactcctatgtggcacgggatcatgtctttgccaatggtcagaccggcaatatgacccggctgggcatgaatctggctgccggagatttcggcggcgcattcaaatacctgatccccattgtctgcttcgctttgggtgtctacttcgccgagatggtgaaaacctactgcgaacggcacaatctcctgcactggaagcaggcgatcctgctcatcgagatcctgctcaccgtcatcaccgccctggtgcccaacgagtacaacaccgccgccaatgtgctgatcggcgtgctctgcggcctgcagatggaggcattccgccgtctgaaaacctacgcctacaactccaccatgtgtaccggcaacctgcgcagcgccaccgaagccttctatcgcttcttcgccctgcgccagccgtccgagggcagcaaggcaacccattactacgggatcatcgccatctttatcctcagtgccgcactgggcagcatcaccaccgagcatttcggcaactacgccatcctgttctgtgtcattcccctctgtgcctgtctgtggattctggcccagaaccgggataccctccggtaatctgcccgtaaattactttctccccagcaaaaaagaccgctcaggtgagcggtcttttttaattccctgcggcttctccggcctggggcagatagctggaaagcaccgtgtgcatatcctcatgcatgaaggtatccaccgaaacgccgatgagcacctggttgtagtcctccagttttacggctgccagatcctccagtgtggcatgctccacatcgatgatggcaatatccgaatagtgcaccagaaggaacgggatatagctcagcactgtctcatccgcaaagatcaccaggctgttatcgctgctggtggagctcttgagggtgatcaccggcgaaagtccgccgaggatcaggtcattcccgcccttatagccggaaagctgggctgtgaactccgggaacaatgtgtaataggtacgggcttccccgtggttgtaatgggtcacctggtattcccggcggtacttggaaaagcggtacagcagcacccggtcgggctgaatccggtccaccggaagctgctcatacagctcgccatagaagtagtcatccgaatagtcgatgtcgaactgatccagagtacgcagcggggaaatacccagccgcatgcccagctgctcatacaccagatagcccccctttgccgtgaggttatcggtggtgcggtagtagatatactcctccatgcccgagaggagcttcagataggtatccaccaccgaaaccgaaccggacatctccgtatagaccgaatcgatataactgcgctgattgaacagattgatatattcgggcaattcctgctgcttgatggcacaggcggtcggaagcagcatcacataggtgggatgctcctggaaagaggcaaggtcgatgatcgactgcttgttcttggtggcgatctcgtcatccggcggctggacattcttcatcagcatggtgtcccccaccaggattccgtcaatttcagcagaaccgccgaacagccgtgcgtccaccgccagcttgtgcagcatggaatgccccggcatattctcacaggcggcctcctccagctgggcggagacttcgccgtccaccagggcccgcagggtcagtgtcagaccatcggcgccgcccgctgaaaaacggacgcacagcaccgcaaacgccgagaagatcacagtgagaaagaagatagcggagattcgtttcgccatgggacacctcctgaatacagaatcgaatcagactcacaccagcagagctgtggtaaggatcagcagcgagccgttgaataccgcgatcacccattcagacgccaccgggaatttcttggagaggaacccggtcaggcggtctgccagactggtgaagaacagcaggctcagcaggatcacaagatagttggaagccagatagtagcttgtttcgtcggagatcatacgctgggccgagaagccaagcagcacggaaatgagatctccggtattgggaaactgcggcagaaccagcggagccaggctgaacaggaacagcccgaaggtcacggcggactgcagcagaccggggatataccggaacagccagaaatacagataccgctccgccagaaccatcaggaacaggaatccggcccagagcagaacctgcggcacgggatcaaaccagatccccaccactacaactcccgccaggaccgcaatgagctcccgggtatcggcgtggcggtaccgccggagctggcgaatccgttccgccgagccgctgacaatctccaccaccagatcatagaggggcatattgatgcgggatacgcattccaccacactcttggcctgatagggatagtagatcacccggggaacctccagcgagaagatggaacagagtccccgtgccatgtcgccataggcggagatggtgaagaagatcgccattgcagcggcaaagaccagcatccaggcggagaaaaaggtgtactcctccaccggaagcgacgccagctcctgatagaggatcacagcgccatccgcaatgatgacctttttcgccagcccgatgacaaactgcacagcaccccggctgatgagggttgccgaggagcgcagctgggaaaactgcgggacaaaccggtca

SEQ ID NO: 3339 - DNA, 2757 bp, Unknown
  16S sequences of unknown bacteria
tgtattttctgatcatcggctgcgcagggatcaactttttggtcgaactcggcctcaatctggttgccgcgcccgcactttaccgtgtgagcggactgtttataaaatcgcccgcggcggaggatacggatgaaaatccgctttccgaaccgcgcaaaatcggataaaaataatttcgggcaggttattttatgatattatgtatagacgtgggtaacacgaacataaaatacggtatattcgacggggacaagctggcggtcagtttccgcgttgcgacggatctgaaacgcacgtcggacgaatacggcaccaaacttgtcgatatgttggcggtcaaagggatccgcgccgaacagatccacggcgccatcgtatcgtccgtgattccctcgctcaactacacgatatcgcatatgtgttcgggatatctggacatagaccccattctggtggggcccggaacgaaaaccgaacacaatctccgcgtggacaacgcgcgggaagtcggcgccgaccgcatcgtcaacgacgtcgccgccatcagaaagtacggcgctcccgtggtggtcatcgatttcggcactgctacgacgttcaacatcatcaacgaaaaccgcgagttcatcggcggcgtcatcgccccggggatccgcggctcgatggattctctcgtcaacagcacggcgaaactgccgcgcgtggagatcgagatccccaagagcgtcatcggtaagaatacgacgaccaacatgcaggcgggcatcgtattcgggttcgcggggttggtggattatatcgtgcggaagatcaaaagagaaatgaagtgccccgatatgcaggtcgtggcgacggggggattcagcgagattatcgcgtcggaaatttcctgcatcgaccatgtggataaactgctcactttacagggcttgaaatacttatacgacttaaatacggagggtaagagatgaaaagcgtaggcgttgcgatactgggattgggagtcgtggggagcggcacgtataaaatactgcgcgaccacagagaattttataaagagacgcaggacgtggatatcagcgtcgagagcgttttggagatcaacaaacaaaaggcgctcgcgctgggcatcgaagagagccgcatttccgacaatatcgcggaagtcgtcagcaatcccaacgtggatatcgtcgtggaagtcatcggcggggtagaacccgcgcgcactttcgttctggcggcgctgcacagcggcaagagcgtggtgacttccaacaaggaactgttttgcaaatactggcacgagttggaacgcgccgcaaagcgcaccaacgcggggctttatttcgaggcgagttgcgtgggcggcgtgcccattatccgcacgctcatcgacgggatgcaggcgaaccatatccgcacgctcaaaggcatcatcaacggcacgaccaactacatcctcacgcgcatggcgaaggaagggctcggttatcaggaagttttgaaggacgcgcaggcgctcggctatgccgaggcaaatcccgccgcggacgtggaaggatacgacgccgcctataaactctcaattttgtccagccttgcctttcataaaaaagtgccgctcgataaaatttaccgtgaagggatcacttccgtcgaccgcaaggatatcaaatacggtgcggagttgggatatactttaaaacttctcgccatcggcaaaaacggggaggagggcatcgaggcgcgcgtgcatcccgcgttcgtcaagaacaagcacccgctcgcctccgtcaacggttcctttaacgccgtctatctgcagggcgacagcgtgggcgacatcatgctctacggcaggggcgcgggcgatatgcctacgggcagcgccatcgtttccgacgtcatttacgccgccacgcattcggacgtaaaatattctacgttcaagaattccgcgggcgcggaaaagggcgtgcgctttgtcaacgacttccgttcgcgctattatatccgctttaccgcgcgtgataaggcgggcgtgctcgcaaaagtcgcgggtatcttcgcgaaattcaatatcagtatcgtagatctcatacaaaagggcgaagaacaggacaacgtgcccatcattctcgtcacgcacgaaacgggcgaaatgtcgctgcgccgcgcggtggaaaagatacgcgcgctcgaagacgtcgtagaagtgaacagcgtcatccgcgtcgaggactgatcgtaaaaaaacgtaagaccgcaaagatttcgctttgcggtctttttcttgaaaggagtcatatgaagggaatcgttttgctcaacgcctatacgaagtccgcaggcgcaaacaggcaggcgtcgcgcattgccgaagaattgaacgcgctcggcgtgcagacggaaatgcgactgaacggcgctttcgacgcggatattttttcttcccgcgtccgtctcgcgcaaaaacccgatttcgtggtctatctcgataaggacaaatatctttcgcgcctttgggaaaaggaaggcgtgaggctcttcaacagcgccgatggcgtggaggtgtgcgacgacaaaatgctcacctatatcgccctggcaaacggcggcgtggagatccctgatacgctacccgcgcccctctgttattatcccgacgcgcgcgtgcgagaggaatactgccgcgtcgtggaagagcgactgggctatcccctcgtcgttaaaaagagtttcggctcgtggggg

SEQ ID NO: 3340 - DNA, 14545 bp, Unknown
  16S sequences of unknown bacteria
gaatctaatggccggtgtaccgtcagtcgtctatggatttttcggacttgtcgtgatcgtcccgctaatgaatgaacttaccggacatgatggaagtacgatgctgacggcatcaattctgcttggaatcatgatcctgccgacagttaccggagtggcggagtccgcgcttcgcagcgtgccgacgagctactatgagggtgcgctggcactcggggcgacacatgaacggagtgtatttttcaccgtattcccggcagcaaaatccggaatcatggcaggagtcgtgcttggtatcggtcggtcgatcggagagacgatggcagtcatcatggtagcgggcaaccagacctggatgccgcaggggctgttcaagggactgcggacgatgacagcgaacatcgtaatcgagatgggctatgcgacggacctgcacagagaggcactgattgcaaccggagtagtgctctttgtatttatcctgctgatcaatctgcttgtgtctgcactgaagagcagggcaattgcagagtagtcaatagaaaggtttggtaaacgatggcaaatattcaaaacgatggggcaggagtgctgtctgctccgcagaacaaggaaaagagctccggatttgcacgctggataaagaagtggaacggccatccgttttcagcgctgacagagctgcttgtctggctttccgggatcgcgatgatgctgatcatgctgtttctcgtcggatttattcttgtgcgtggaatcggtcatctctcgccggagctgttctctttcacctataattcagagaatgcatccctgatgccggcactggtcaatacactgattattacggcgctttcccttctgattgcgattccgttcggcgtattcaccgccatttatctggtggaatatgcgaagaaaggaagcaggcttgtaaagctgatccggatcacggcagagacactttccggaattccttcaattatatatggtctgttcggactgctgtttttctgtacggctctgaagtggagctattgcctgctggcaggtgcacttacgctggtcattatgattcttccgctgatcatccgcacgtctgaggaagcactgctttcggtaccggatgcataccgggaggcatccttcggacttggagccggaaagctgcgcaccatttttcacgtagtattgccgacggcgatccccggcattctctccggagtcattttggcgaccggacgaattgtcggtgagacggcagcgcttctgtatacggcaggttcggttgcaaagattccgaatctgatgggctcgggccggacgctggcagttcatatgtatgtactttccagtgagggtctgtacatggatcaggcatatgcaacggctgtggtactgcttgtatttgtgctggtgctgaacggtatttccaatttacttgcgaagcagctgacaaaaggacgcaatgcttaaggttaagggagaaaagataagaatgggaaaaatagatgtaaagcatacagatttgtattacggagatttccatgcgctcaaggacatcaacctggaaatcccggcaaataagattacggcgtttatcgggccgagcggctgcggaaaatctacactgctcaaatccttaaaccggatgaatgatctggtcgagggctgcaaaattaccggagagctgctgctcgatggagaggatatttacggaacgatggatgtcaatctgcttcgaaagcgggtcggcatggtatttcagaaaccgaatccgtttccgatgagcatttacgataatattgcctacggaccgcggacgcatggcatccgcagcaaagcaaagttggatgatatcgtagagaaagcgctgcgcgatgcggcgatctgggatgaggtcaaggaccgtctgaaaaagagtgcactcggtatgtccggtggacagcagcagagactctgtattgcacgtgcactggcagtgcagccggaggtacttctgatggacgagccgacttcggctctggatccgatttctaccgcacgaatagaggatctggcggtggaactgaagaaaaaatatacgattgtcatggttacccataacatgcagcaggcatcccgtatttcagatatgacggcatttttcctgctcggcgaggtcgtggagtacgatcatacaatggcactgttttctatgccgaagaataagaaaacagaggagtatatcacggggaggttcggctgattatgagagacaattatctgaaaaagctggagcagatgcaaaaagagctgcttgagatgggcatgctctgcgaggaagcaattcagaagacctatcgtctgctagtatcggaacaggaacgcgaagagctggtaaaggcgattgatgtactggagagggagatagatgcgaaggagcgccggattgaggcggactgcattcagctgtttttacagcagcagccggtagcgtctgatctgcgtctgatttcctccgcgctgaaaatgatcacggatctggaacggatcggggatcatgcgacggatatcgctgagatcctggagaccggaagcatcaaggtgccggcaaaggatatcgatctggcaaagatggcggaaattgcaatggatatgattaaccgcagtgtggagtcttatgtgcagaaggatctggagatggcgcgcgaggtgatcgaccgggatgacgtattggatgagctgtttatcaatgtacgcaaggagatcagccggtgttcggcagagaaaatctatacaaacgaccagaccctggatcttctgatgattgcgaagtattacgagcggctcggagatcatgcgaccaatgtggcggaatgggtagagttctccctgaccggaaaacaccggagcgggaaagaggtcaatgatgtgtttgcggtgctgcagtaaagcaaaaatgaaataaggaattcagtctgagagatcccatgggatctctctttattattttactcagattttacataagcttactttcaattttacaggggtttcgtataatccaatcgtaacaaatgtaaaaaccacgtaaagcgcagcagagactgcgcgaaggagaaaaagtgtatggatatttttaattttctgaccatgcttggcgggctggcattgttcctgtacggaatgaatgtcatgggggatggcctcacgagagcgtccggaggacgtctggagaagattctggagaagctgacctccagcacgattcgcggcgtgttgctcggcgcggctgtgacggcggtgattcagtcctcgtcagcgacgaccgttatggtagtcggatttgtaaactctggtattatgacactgcagcgtgccgtgggcatcattatgggtgccaatatcggtacgacaattacatcatggattctcagcctgtccgggctgcaaggagacagcttctggataaagatgctcaagccgtcttcattttccccgatcctagcgatcattggtatctgccttctgctgttttcgaaaaaggataagaagaaggatgcaggctcgatcatgatcggctttgcggtgctgatgtttggtatggagacgatgagcggtgcggtaaagccgcttgcggatgttccggagtttacgaatatccttctgatgtttaagaatccggttctcggtatgctggcaggcgcactgctgacagcgattattcagagctcgtcggcatcggttggtattctgcaggcactgtgtgtgaccggagcggtctcttacggtgcggcgctcccgattattatgggacagaatatcggtacgtgtgtgacagcgctcatttccgcgatcggagcgaagaaaaatgcgaagcgtaccgcatttgtacatctgtattttaatctgatcggtacggttgtgttcatgattctgttctacacggcgaatatgtttatacatttttccttcctgcaggattctgcaaatgcagccggtatcgcagtgattcatacggcctttaatgtttttgcaactgtgatctggcttccgttccaccgggtactggagcgtctggcaatccttaccgtgcgcgatggcaaggacgaggagcgcacagcaggtgcattgcagggactgtctgcactggataaccgtttcttggagaatccggcgcttgcaatggaccagtgccgtgtcgcctgtgcacatatggcagaagtgacccgcgaggcattggatacggcgatgtcgctgctgcatgattatgatgaaacgaaggtcgcgctggtgcatgaaaatgagacgattgtggatcagtacgaagaccggctgggcacttatcttgtacaggtggcaaagaatgagatgcagacgaaggacagccatacgctttcggtactgctgcacagcatcggggacatagagcgaatctcggatcacgcggtaatcattgcaaatgcggcaaaggagatttacgataagaatttgtcattttctgaggcggccgtggaggagctggaggtcttttctgcggcggtgcgcaaggtcgttgagatcgcaatggaggcgatgaaggatgaggatctggcaatggccggaaaggtcgagccgctcgaagaggtcatcgatgatcttggagatgagatgaagaagcgtcacatcgaccgtctgcgcgagggacgctgcacgattgagcttggctttattctttcggatctgacaacaagctacaaacgaatcgcagaccactgctcgaacattgcagtctgtctgatccaggcggataatgacgagtatgagcggcactcctatctgaattctctgaaggaggaggataaccagcagttccgtgagcagtttgaggagtatggaaaggaatatgcattaccggcgcgcatcaaggggacaccgaaggtggatatgcgtgcacggatgactgcaggctgattcattcatgataagctacttgacccttatgatacacggattgcttcgcatttcatgctcccgcaatcctaaaacacctcaaatccgctcatttttctacgaaaaatggctacttttcggtgttttgcgggtcaataagtcatgcgtttcatgcaagcatgaaacgcatgaccttttgaccctggtatcatcagatgcttgcggaagggcaggaaatgaagtaggatagaggtagcaggctgcagataaggactgaggaaacggagtgaatgatatggcaatgatttatatcgtagaagatgatgagaacatccgggagatcgagatgtttgcgctgaaaaatgcgggctatgaggtgcagggctttgaatgcgcctctgatttttatgcaaggctgaaggagaaggtaccggcgctggtattgctggatatcatgcttccggatgaggatggactgagcattgtgaagaagctgcgccatgcggcagacacgcggaagcttccgattattatggcaacggcgaagacaacagagttggataaggtcaagggactggatatcggtgcggatgattatataacgaagccgtttggagtgatggagctgatctcaagagtcaaggcgctgatgcgcagaagccgtggtatggaagaggagcggatgatccgccttgggccgatctttatggatgatgagaagcgggcagtctttgtggatgaccagcagtgtgagctgacttacaaggagtatgagcttttgaagcttctgcttctgaatgcgggtatcgtggcatcccgtgacatgattcttgaccgtgtatggggcactgactttgaaggggagtcccggacgctggatatgcatatcaagacgctgaggcagaagttaggcagcgccgggccgatgataaggacagttcgaaatgtagggtatatgctgacgggtgaggacaactgagactgcggcaataagcttatgcgggagaaacggctatgaaaaagaaaatcaaccgatatatggtgctggcagtttgtctgactttgctgagtactattttgatgacagttggtgtatttcaccatatgtatcgagagcaggtgctggatgatctgaaaaattatgcggaggtaatctgcggaatgacttcctccggggaggagctgagtgagcattacatgggcaccgacccggatgtgcgggtgacggtcatcagtgcaaagggagatgtgctctatgacagccagacgggcgatgaagtgctgggcaatcatgcggaccgcccggaggtgcaggaggcggaggtgggcggctccggctatgcgatccgacattctgacacgatcgaccgggatatgtactattatgcaatgatgctggaagacggggatgtactccggatcagcaaggaagcggataatatctggagcgtattccagaaaacgctctacggaatccttggtgtcggaattctgatgtttttcatctgtatgatgctgtcccgttacctgaccaacagcattatccgtccgatcgagaagctggccggggacatcgataacatcgacggagcggatacctatattgagcttgttccgtttatcacgacgattcagaagcagcacgaggatattttaaagggtgcgaaaatgcgccaggaattcactgcgaacgtctcccacgagctgaagccaccgctgacatccatttccggctatgcagagctgatcgagaccgggctggccggggaaaatgaggtgcagcggtttgcgtctgaaattcatcgcaatgcgaagcgtctgctgacattgattaacgatatcatccgcctctcggagctggatgccgacaatatggaggtctcatttgcaccgctgaatctgtatgagctggcaaaaggctgtgtacagtccttaaagctgaatgcggcaaaacatgacattgaaatctcgtgccagggctcggactgtaccgtaaatggcaataaggatatgctcgaggaattgctctacaatctgtgcgacaatgcgatccgctacaacaaaccgggcggaagtgtccgcgtgaacatcgggatgcacggagagcatgtactgctgaccgtgaaggataccggcatcggtattccaaaggagagccaggagcgcgtctttgaacgtttctaccgtgtggataagagccgttccaagcagaccggaggcaccggacttggtcttgccattgtaaaacatatcgtggcacagcaccacgccagacttgatctgaagagccaggtcggagtcggcactgaggtgagtgtgttgttttaactagggaataccgtctgcctgccgcagatggtatttttttggaaagttttaagattccgttacttgactattaaatgagaatagtgcaatatattgtagtgaataataattccagaaaaatagattaacgcaggaggagacgcggtgcaaaaggggaacgcaggcgcctgccggacgttagaagggtaagggacataaggtgagaaagaaaaagagaagtgctgtaaaaattacgatcctcgtaattgtcgtactggtagctgtcgcgcttggcgctttcgcttattatctctatgataaagtgaacagtggcctttttttcaaggatacgaagatcaacggctatgatgtatccgggaagacatgcaaggaagtgctactgatgctgaaggacgactatgaggctccgaaggtgacgatcacagaaaaaggcgagaaggcggaagagctgtctttagaggaaatgggctatacaatcgatgagatggagttgcttggcagtattcagagctgcatgagagatcagaatatcggcctgattttcagtctgatggacggaaatgagtttgaggtggacgtgccgtttgagtatgatgatgcgacattcaagaaagctgtttcctccgcaaattttgctgcaaagcgtgtgaagagcacggatgcagagatgaagtacaatggtacggagtactatattgagccggagacctacggaaatgagtttgatgatgcggatctgcaggtcatggtaaaggatacggtcgatcagatggtggcgttggcgcgtccgcagccggatacagagatcgctctgccggagtcgttttattatctgccggatgtcacaaaggacgacgaagagatgaatacgacaatgaacatttacaattcctactgtaaggcaaagatttccctgctgttcggtgagcagaaggaggtgctggactggtcgacgatccagaactggctgacgatcaaggatggtcagggtgtgcttgatgaggaagcgatatacaattacgcatatgacctggcagcaaagtatgacacgctatactatcagcgtgagtttacgacgactgccggtaatacaattaccttcgagagcagcgattatggttatcagatcgacaaggacggtgaggcggcgcagctgctgaccgatattcagagcaatacgacagtagagcgtgagccggtctacgcagtcagcggctacaagcgcaacgggcgtgacgatttgtgcggcaactatgtcgaggtcaatctgacacagcagcacctgtggttctacatgggtggcaatctcgtcgtagagagtgatgtcgtgaccggacttccgaaggatggaagagagacggcgaccggtgtgttcccgctcgcttataaggaaagtccgtctgtcttaagcggcggtcagggaaatggagcgtggaatacagacgtccagtactggatgccgttccatgacggacaggggctgcatgatgcatggtggcgctcatcctttggcggcaatatttatcagacaaatggatcacacggctgtgtgaacctgccgcagaatgtggcgaagatcatttatgataatattgagacaaatgtgccgataattctctataaataaatatgatgatgcagaattgcggaagctgctttgcatttcatgctctcgcaatcctaaaacacctcaaatccgctcatttttccacgaaaaatggctacttttcggtgttttgcgggtcaataagtcatgctttttcatgcaagcatgaaacgcatgaccttttgactcttgtatcatcataaatatttggttctctgaaaatgaatacaagaagataaaaatgtccggtatagtcagccggatatttttattttaaccgacacatcatatctttgattttggaagaaaatgtggtataaatagataaaatcaggaaaaagggagaaagaaaatgccagtatttgatttcagcggttctaccgataaaaaacaggaaagtatctgtacttatacatcattccggtcggaggagacagaggcgacgtgggagaggccgatgctcattctggacaatgcaaagcggcagtggaagcatcattcctgcgggattttcacgaatcaggcaaagcggacttcgtttgagtttaaggaagaggatggaacgttcgaggcggacattctgcgcgtggatgcgcggtttatcagcctgctgcggtggcttggtgaaaatcatatcagtgtgcggctgtccggaaagaatacggaggaaggctatgccgtgtacaagatccgggagaccgcattcggcggcgggacgaagctctcggcagaggatggatttttacagtttatgatcgaaagattgctggcgagccatgcgccggaggacgagcaggaggaggacgagcaggaggagcttggtgacgacatgaagctgacgagcctgcagagcatcacggattttatgacctgcgcggggcggacgctcccggataatatcagactctgggcgcgccggaatctggcggtggcccgttctcatgaggtatctccggaggagcgcagacatgcacagcgcgcactctcgatcatgatgaacattcagtggaagaatcattacttcgaggcgatcgatccggacgaggcacgtcggattctcgacgaggagctctatggcatggagcgtgtgaagcagcggattatcgagacgatcattcagatcaaccggacgcacacacttccggcttacggacttctgctgatcggaccggcaggtaccggaaagtcccagatcgcctatgcggttgcaaggattctgaagctgccgtggactaccctggacatgagctcgatcaacgatccggagcagctgaccggaagctcccgtgtgtatgcaaatgcaaagccgggtattattatggaagcattttctgccgcgggagagtcaaatctcgtctttatcatcaacgagctggataaggcggcatccgggaagggcagcggcaatccggcggatgtactgctgacgcttctggacaacctcggctttaccgacaattacatggagtgcatggtgccgaccggcggcgtctatccgatcgcgacggcgaatgagaaggataaaatcagtgcaccgctcatgtcccgctttgcggtaattgatatcccggactacacggcagaagaaaagaagatcattttctcccgtttcgctctgccgaaggtgttaaaacgcatgggattgaaggaaaatgagtgtctcatcgcggcggatggcctggaagcgatcgtcgatctcttctcaaatacgagtggaattcgtgacctggagcaggcggctgagcacatcgcggcgaacgccctctatcagatcgaagtcaaccacgtcacacaggtcgtgtttgatgcgaagatggtgcgggagctgctgagctgataaaatttaaatatcacaaggagggatccgcttgcgggaggatttcttatgattttgcaagtagcgaagctaggccctgtcagcagagctgcagggatggattgtgaatgttcgctttacagtatacagggaggaaagaaaaatgggagcagtcaattatggaaaggttgtcctgatcggagcagggcacgtcggatcagcgatactggattcacttctgcgtatgaatctggcagatgagattgttgtggtgaatcgaaatgaaaaaaaggcactcggtgttgtgatggatgcaagtcatacgactgcatttgcatacagtgcgaatgcgagtatccgcgtgggaacgtatgaggactgcaaggatgcacagatcattatcaatacagcggggccgagcatacagccgggcaattccagagaccgtatggtgctgctgcagtcgaatgtgcaggtgatgcgcagcattatgacagagatcgtgcgctatacgcgggaggctgtgattatcaatgtctcgaatccgatggatattctgacctaccttgctcagacagagttcgattatccgcgccggaagatgatcggtaccggtacgctcctggacacggcccgcttcaataaaatggttgcggaccgctgcggtgtcgatgcgaagaatgtgaccgggtttgtgctcggcgagcatggcggaacgagtttcattccgtggaatgcggtcaatattgtcggcattccgttcgaccagtttgagcgtcagtttgacctttcagagccgattgacaaggaacagcttctctcggaggtgaaggtcagcggactggacatcgtggagctgaagggctatacgagctccggtatcgccttgagtgtctgccgcctgatcggcgcgatcatgcgtaatgagcatgcggtcgtcccggcatcggtcgtgctgaacggagaatacgggctgcgcggtgtagccatgagcctgccatgcgtcatttccagaaacggcattgagcgtaccttgcagattccgctggacgaggatggccaggagaagctgaagacgtgctatgagtatctgcatgaggtgattgagagcattcgataatgcggaatctgtgcagattgcggcgttttgcgggcgcctgaaagagatatccggcaagaggggaatataaagaatggcaattaaagtatatattctgaaaaaggcaatcatgaaatcatccgttgatgaatatcttgcgctgaaagcggaagcaaaagagaaaaagaagctggaaaaacagatgaatccggaaaatgcgatcgaacagaagcagaaaaaggatctccgtgcagtgtttgtctcgacttcagataccgctttgcaggcactggaaattgcgggagtttcatatgaaggagatatcgatctggaagatattgaattctgtaaggtggagtcacagcagaaatgtatttgcggaaaccttcacattccaaagctgaatgctgtgatcggtgaaaagatgcggatgtattttttcgcgaaccgtaagaacatcgtaatcattgatgacgaagaatttgcggtaaaggtaatcaagcggattattgcaagccggacaagaccgggtgagagccgtgaacgttttctgtataatttttgcatcaaatttatggatcaggatctggacaatctcgggcgatatgagaagcgcattatgaatctggaggagcgggtcacgggaggtgaactggagggagttacctccgagatcgcaatccttcggaaggagcttttgattttaagagagtattatgacgagctgcacgactttggcaagcagctggaagaaaatgaaaataatttcttttccggcaaaaatctggcttattttggcacgatttctgaccgggcagaccggctgagaggccgtaccatgtacttactggattatatcgggcaggtgcgggatacttatcagggaaaagtggcggagcatcagaatgccaacatggagtttctgaccatcatttccacaattttctttccactgactttgattaccggctggtacgggatgaattttgaaaatatgcctgagctgacacacggctatccatttgtcatcggactgagcctggtggtagttgccattattatttttattttcaagaagaggaagattctgtaatgagcaagtagcgaagctaggccctgtcagcagagctgcagggatggattgcgaatatccgcttgacccgaatcaggcaaggaaccggctttgacaaggatataacaaaagggaaggtatgatagaagagagggcggaaaaatggggaaaagagatcgatcaggcttgtggatgctccttgtattgatgtttgtgcttttattctcagtaccggtcagtgcgacgccggtatcggagcacggggcgctctcggtcagcgggaacagtcttgtggatgcgaacggaagggcggttcagctgaagggtgtgagcacgcatggtctcgcgtggtttccggagtatattaataaggaagcatttaagagccttcgagacgactggggggctaatgcagtacggctcgcgctgtacacagaagagtatggcggctattgcagcaatggcagcaaaagtcagctgaaggagaagatacaggagggtgtccgggcggcgactgatctgggcatgtatgtgatcatcgactggcatgtgctctccgaccagaatccgaataagcacaaaaatgaagcgatcgcatttttcagggaaatggccgaaaaatacaagaaccagtcaaacgttctctacgagatctgcaacgagccgaatggcggtacctcatggacgcaggtgaagtcttatgcggaggctgtgatcaaagagatccgtgccattgatgcgaacgccatcatcctgatcgggacaccgacctggagccaggatgcagatattgcggcaaagaatccgatcacgggctatcagaatctgatgtataccttccatttttatgcggcgacgcacaaggacacataccgaaagaagctggaggcggcggtcagggcggggcttccggtcttcgtcagcgagtatggtgtctgtgaggcctccggcaatggaagcgtcaatcagacggaagccgacaaatggttcacgctgctgaatcgttacgggatcagctatatggcgtggaatctgtcaaataaaaatgagtccagttcgcttctgaagagcagctgcaaaaagacatccggatggtcagcttccgatctttccgagtccggaacctatgttgtaaggcagatgaagggaaaactctccggcggcacaggcggaacatcaaatggaagcagttcaagtggagcggcatccggcacatcttctaaagcgaaatctgtcaaagcctcgaaaaaatactgtacggtatcggtgaaaaaggacggcagctggaaaaagggcaagcgctactacacgctgtaccgggtcacgatccgaaacaaaagtaaatacaacatttccagttggaagctgcgggtcaaattcaaatattccatcaagaagagcgacaagtggaacggcggctttacattcaaaaagaactatgtcacgatccgcccggtcgcatggaataaaaaaatcgcttcgaaaggaaaagatacgagcgtcggatttatcgtaagctctgcaaagaaaaagaatccggtggtgtcggtggtgtggcggtgagacggcagccataggtttgtcagatcctgccgtaaagctgtcgtgattaccggtcagtggcgcggagcactaagcggtgggtagtggaggaagctttttagttttgcaggaaaaactgaattatcctgcaagattatagatgcagat

SEQ ID NO: 3341 - DNA, 2726 bp, Unknown
  16S sequences of unknown bacteria
cgctcgtcacggcacattttttgaaatgctcggaaacttctcatttggtgattactttaaaagagaggcgattcactggtcatgggagttcctgaccgaggtggtcggactggatccggagcgtctttatccgtccgtttacctggaggacgatgaggcgtttgatatctggaacaaggaggtcggtgtcgcaaaggaccgtatcttccgttttggaaaagaggacaatttctgggagcatggcgcaggaccgtgcggaccgtgttctgaaatttactatgaccgcggagaaaagtatggctgtgggaagccgggctgtacggtaggctgtgactgcgaccgttacatggaagtctggaacaatgtatttacccagtttgagaatgatggcgagggtcactatgagctgctcaagcagaaaaatattgataccggaatgggcctggagcgcctggctgttgttgttcaggaggtagattccatttttgatgtagatacgatgcaggcactgcgtgacaaggtatgtgagttcgcgcatacgacttacaaagaggatgagacaaaggatatctccatccgtctgatcgtagaccacatccgttccgcaacattcatgatttccgatggcattatgcctacaaatgagggcagaggctacgtgctgcgccgactgatccgccgtgccgcacgccacggaagaatgcttggtatcgagggcacattcctctccaagctgagccgtaccgtcatcgaaggctccaaagacggatatccggagctcgaagagaagaaggacttcatcttcaaggtgctggcacaggaggaagagaagtttagtaagacgatcgaccagggcttaagcatcctctccggtctggagactgagatggcagcagccggtgagaagatcctgagcggtacagatgcatttatgctttacgatacgtatggattcccgcttgatctgacaaaggagattctcgaggagaaaggctacgagatcgacgaggatggtttcaaggcatgtatggaagagcagagagtcaaggcgagaaatgcacgtgccgtgacgaattacatgggcgcggatgcgaccgtatatgaccagattccggcagcgatcacttctgaatttgtcggatatgacacactgacctgtgagtcaaagatcacggtcctgacgacggagacggaactgaccgaggcgctgacggaaggcgtgcacggtacggtgatcgtagataagactccgttctatgcgacaatgggtggtcagaacggcgataagggtgagatcacctgcgcgggcggacggtttgtcgtagaggatacgattcatctgctcggcggaaagatcggccatgtcggatatatggcagagggaatgatcaaaaacggcgatactgtgaccctgacggtagatgaggcttaccgtaagaatatctgtaagaaccacagtgcgacacatctgctccagaaggcactcaagaccgtgcttggcgcacatgtagagcagaagggttctcttgtgactccggacagactccgctttgactttgcgcatttccaggcaatgactccggaagagatcgagaaggtcgaggcaattgtaaatgaagagattgcaaaggcacttccggtagagacgaaggtcatgagccttgaggaggcaaagaagaccggtgcaatggcactgtttggcgagaaatatggcgacagtgtgcgtgtcgtatgcatgggcgacttttccagagagctctgcggtggtacgcatgtggcgaatacttcagagatcgcgaccttcaagatcgtatcggaagcaggcgtcgcagcaggtgtccgcagaattgaggcactgaccggcgatggcgtattcgcttactataaagaggcagaaaaagagctcgcagaggcggcgaagcttctgaagacgactccggctggtattctggaaaagatcgcaggactgcaaaatgagatcaaggcactgcagagcgagaatgaatccttaaagagcaagctggcaaaggatgcgctgggcgacgtaatggatcaggtatgcgaagtaaacggcgtgaagttccttccggcaaaggtagagggtgtagacatgaatggcctgcgtgacctcggcgaccagctccgtgagaagatcggtgaaggcgttgtgctgatcgcatccgtgacagacggaaaagtcagcctgatggcagccgtgaccgatggggcgatgaagcagggagcacatgccggcaatctgatcaagggtatcgcagcccttgtcggcggtggcggcggcggacgtccgaacatggcccaggccggcggcaagaacccggcaggtgtcgatgcagcgcttgaaaaagcaaaagaagtactcgcaggacagattaaataggttctttcgcgaggacgtttcgcattacaggccgcagacccgttcgctttgcgaactattcgctgctaaagcagctcctgtctgtggctgataggcgtttcgcctatcccaaaatgcaaatacagccctcagcaaataaatttgctgagaactgtctctgcattttgctgctatgcgaaattggtgaaataatctatcaaaagggtattgacgaaaagaaaaaatatggtataatatgttgtagtgcagtaaaaatacccagacagttgtattatgcacaatctgcaactggagggaggttaggtgtgagacaatgtcaaatgtaatc

SEQ ID NO: 3342 - DNA, 1753 bp, Unknown
  16S sequences of unknown bacteria
aaggttctataggcctttaaaatgtcgattgatttggggcttacaatggcggccgaaagtccgttttcaagggcaagggtcaaaaaggcgccgttgacggttccccttgagggcagaccgaaggagacgttggaaacgccgagaaccgtgtggcatttgagcacatttcttatataatttaccgcctttaaggtggtggcggccgccgaggtgtcgacgctgaccgacatacacatggggtcgaaaacaatgtcttttttcgggataccgtattgctttgcggtgtcgagaattttttccgcaacggcaattcttccctcaaaggtctcgggaattccgctttcgtcaagggtgagggcaaccaccgttccgccgtattttttaacaagggggaaaacggcctccatgctttcttttttgccgttgaccgagtttatcatggcctttccgttgtatattctcagcgccctttccatggcctcggcgtttgatgtgtcgatttgcaggggaaggtcggttaccgcctgcagctcgaaaaccgtgtgctcgagaacgctgacctcgtcgatgtcgggaagtccgacgttcacgtcgagaatgtgggcgcccatgtcctgctgggagacggcctcgcccagtatataatcgatgtcgccgtcgataagcgcctgcttaaagcgctttttaccggtgggatttatgcgctctccgattatgagcggcatttccgaaagctcagcatatttgccgtaggagctgatacaggttatgtttttgtcgcttatcggggcgggggggatgttatttgcggcggcgacggttttttcgatgtattcgggggtggtgccgcagcagccgccgagaatatttactccgagctttgcaatttcggtcatttgctcggcaaagccgtcggcgtcgaggtcatagaatgtcctttcgccgtcgcttttgggaagtcctgcgttgggttttgcaaaaatcggggtagaggagtgttcaagcagctcctttatgggtcccatgagctgttcgggaccgagagaacagttcactcctatggcgtccaccgaaagaccttcaagaagagccaccatggcggaaggagatgctccggtcagcagcttgccgtcctcgccgtatgcgttggaggcgaaaatcggcaaatcgcagttttcctttgccgcaagcaccgctgccttggtttcatagctgtcgctcatggtttcggtgaatataaggtcggctccgtgagccgctccgaatttaaccgtgtcggcgaaaatctccacggcacgctcaaaatcaaggtctccgagaggctttaaaagcttgccgagagggccgatgtcgagggcaacatatttttcacccttgttttcggaaagctttgccgcttcctttgcgttttcgatggcggcggcaatgatttcctcggtcttttcgccgaatttcaaagtgttggcgccaaaggtgttggagcaaacgatgtttgtcccggcgtcgaaatagcttttgtgaatttcaatcatgtcctgcctgtgggaaaggctccaaagctcgggaagctctccgggggcaagccctttttgctgaagcagcgtgccgcagccgccgtcgagataaagtcttttgtttttcagttcttccttaaaaagcattatttttcctttctgaaagcacagtcggttttatcgcaatattcgcagccattactgccgttagggttaggggagttgtttgcaatttcatc

SEQ ID NO: 3343 - DNA, 5327 bp, Unknown
  16S sequences of unknown bacteria
tccgagggcaccgattcccgctttgataagtcccattttgtagttctccttcccgattttcgtaagaatttttgtcggatgattcgtttcttctgtgagactattataaaataatgaagctgcgttgtcaatcgctatcgccttcatccgtaagttttgttttgaagatattgacagaacggattttatttcgtataattaaaacaaatgtttcagaacgtgttgttctgaaaggttctttgagacaggagagataaaatatgccgccgaagcctaagtttacaaaagatgagatcgtcgatgcggcgcttgatattgtttcgcgtgacggtgtcgaagccatgacggcgcgtgaggtcggcgaaagactcggcagctcggcacgtcctatttttaccgtgttcggcagtatggaggagctttacggagaggtacgcaaggctgcaatgaggagatttgaatcgtattcggagaaggcggcggacgtgcagcccgtttttaagcgggtgggaatgcagatggcgctgttcggtgtggaagagccgaagctttacagacttctgttcatgcaggagcacagcgacgccgtcaccttcaacgatgtattcagtgagctcgaaacgaccgcggacatgtgcatagacgctatatgcagcgactacggattggaccgcgaagcggcgaagaagctttttgaaaacgtgtggatatacaccttcggggttggcgctttatgtgcttcgaaaatgtgcagtttttcaaaagaacgcctcagccgtatgctgacgacggaattcaaggctatgatgatgcttgtcaaatccggcgggatcgactgaggagcggttttgatgaaatacacagacaaccgccgctcggtatcggacggcggagaatatgatgaatcccggcccgatatcagcctttattacgaagaatacggggacggaagtccgctgatacttctccatggtaacggagaggatcacacttatttttcttcgcagacgcctttctttgcgaaaaaattccgcgttataactccggatacaagaggtcacggagccacgccgcgcggcgaaggggagttcactctgaaccgcttcgcggacgatttgtaccgctttatgaccgaaaagggtatcgcaaaatctcacatactcggcttttcggacggcgcaaacattgcgatgatcttcgctttgcgacacccggaaatgacagacaggcttatcctgaacggcgggaacctttcacccgacggaatacggcgcacgacgcagattccgatcgagatcggatatcggatcgcacgccgcttcgcgggaaaaagcgcagatgcgaagaaaaatgctgagcttctcggacttatggtgaatgagcctcacatattgacggagagcctttcggggatcacctcgccgacgcttgttatcgccggaacgcgtgatctcgtgaaacggagccataccgagctgatcgcatcggcaatcccggattcgcagctttgctttgttcgcggcgatcatttcgcggcaagccgcaatccttcggaattcaacgaagccgtcatgcgttttctcggcggagaggaaggtgccgggatgcatgaatttaaatatgtgacaaaacaataattattagccgaaacggtgcgtttttcaaaaaagcaccgtttttccggtgcgctcggcatgcgttataacatggtggtgaaagtccactacaggcatggcggtaggaactgttagcagatcttgaaaccgcacgcgtcgctctcgaatggcgtacgccggcgttctgcaagaacggcgaagttataacgagcgacggacgcggcgtatctccgatgctcggatttatccgcgaagggaaggactttgccgggtattgcgccgccgatcgcgtagtcgggagagcggctgcaatgctcttcgtgaaagcgggagtgcgtgcggtttttgcggatgtcatgtccgtcggcgcagagcggcttctgaaggcgcacggaattgagacgggctgcgatacgcttgccgacgggatactgaactgcgataaaaccggaccgtgcccgacggagagcgccgtttgcgatacggatgatatcgacggcggaatgctcagaataataaagaaagcggatgaaatgaaaaaattccggaaatgagcgaaaaggaccgatgaggataactcatcggtcctttggcttgggatttgtctgcgggaaatccgcgattcggaggataaagcaggtcatccgaattttacggatttcgcccattcggagatctgcgcgcggcacggctccgcgttttcgtcggataccgcaaactgcaccatccagaatgcgtcgtcggttttgtatatgtaggggaaataacggtacgtttcgtttgtgtcggcattggtgaatttgtattcgatatacgtcagatcgccgtcggactttacctccgcattgtcgagattgttgctttccttggtgagctcggcatagtcttcggcggtgcagtcccgcaattcttcaagggacgagatgtcttccttcgacacgaaaaccgcaatattctttgaggagtacgccgcaaggtagccgtctacgttctcctcggtgaaggcttcggtgagcgttatgccgaatccgtccgtcgaaaaatccttttttctgctttgcctgccggaaagcagcgcggtcgatgcggcaacgactattgcgattccgacaatgacggaaattatcatgaccgccgtgccgcgatgccccgatttctttcgccgggattcggcggaatcgttgttgtcgaatcggaatgaatttccggaggagagactgaatctgtttcgtcccgaaagaaagacgtcttcgctgcccgcgggaagggcatagcagtcgaagcagaagcttttgcttaactcgtcggcgattacgaagatcttgacatcatcttcaccgatcgggaaggtcttttcctcaccgtttttcagttctccgatcctgcggcacggcgtgccgtctatgacggtctcgccgtgctctttgtcctcggcgaaaaccttcattgttatgaggcaggcgacaaagcttttctctcttttgacggttaaatttctcattgcggagtcctttctcgataccgtgattttgaggctttgattattctaccacaaaagcctctccgccgcaatacaaaaaagcgaaaaacgttcggcgcgccgatgagctttaatgatgctgtgtgcgaaaatatccccgcaaaacccgcaccgaacaaagttcggtataccgagcgccgccgcgcttacgggatttttgccctgccgtcctcttttcgcctgacgatggttcatatttgccgatacgaagtgcggcaagttgcccaatttacggaatttccgaaagccgaaaattaattattgagccgaatttcagaaaaatagggctaaggtattgattttgtaatatgtttttgatatactatgaatatctgaaatatattggctgtcagtcgggagaattacaatgatttctaaagaagttacaataaaaaacagcgtaggccttcatgcacgtccggctactttctttattcagaaggcaaacacatacaagagcaccatctgggttgagcgcgacgacagaaagattaacgcgaagagccttctcggtgtgctttctctcggtatcgtaaaggatatgacgataacgataattgccgacggaaatgacgagcaggatgcggtgaacggtctttgcgcgcttattgaatctgccttcgacgagaaatatctgtaaaagaaacggcgcttgcagctccgccctgccggatacgggaagtttattccgaacggtgaggcggggcgttttgttttacgggaatcgtgcttccgaatgaatgcccgagcctgcggaaaagatattatccggaagagttttttcggataaggatacttcccgtgcgggccgacgtgctcaagaggcttcggagattgcacgggaaatcggatgcggtgcccgtcgcggacggtatttcgccgacggacgccaggggcggatgtgcgccagagacacaggaggagcgcgttatatgaaaaacgaactctcggcagaggagatactctccggacttcatcagaaggcaatgcgtcttccgcgttctcccggcgtttatattatggagaacgccgacggcaaggtcatatatgtcggcaagagccgttcgctgcgcgaccgtgtggagcagtatttccacggctctcacgatattaagacgacgaggatggcgcagtcggtcagatcgttcagatttatcaccacatcgaccgagatggaggcgcttgcactcgaaaacaaccttatcaagcagtacaagccgaaatacaacatactgctgaaggattcaaaatcatatccgtatgtcaagataacggcagaggaatacccgcgccttacggtgacccgcaagaggctcaacgaccgcgcatcctacttcggaccgtattccggaacgggcgttatttatccggtcctccgcgcgcttgaaaaagcgctcgggatcccttcatgcacgagaaaattcccgcgcgacataggccgtgagcgtccgtgtttgtattatcagacggggcggtgctgcggggtctgcaccggaaatgtgacccgtgaggaatacgccgggcttataaaaatggcttccgatgtcctgcgcggaaaaagcgctgcggtcatcgaacagcttaacgagaagatgctcgactgcgcggagcgcgagctttacgaaagtgcggcaaggtggcgcgatgcgatatcggcaataaaggcgctcggcgacggcaagcgccgcaccggagacgccgaggcggaatacgacgtgatcgggtactattccgatgcgtcgggagaatgcgcggcggcgttttacgtcagggacggatatgtgagcgacagtgagcatttcgacttcggcgagaacgagataacctctgcgggggattccgacgaatctccgctcgcttcgtttatcgcttcgctttaccgcggcagagagtatatcccgcgtgagatacttctttctttcccgcttacggagcatgaatatacgatgctcggagagtacctttctcaaagagcggatcaccgcgtgaccgtcagaaccccggagcgcggagagggaaagcatatggcagatatgtgcgtgaacgacgcgcacgagcaccttgttatgcgccgcggtcggaccgaccggaatgaaaagatgcttgtccgtttggcttcgatgctcggtctcgaggtcgttcccgagaggatagaggcatacgatatttca

SEQ ID NO: 3344 - DNA, 21746 bp, Unknown
  16S sequences of unknown bacteria
ggcgggcagagcgcagtaaaagctctgcccgctgtttttatatgcgggaaaactgccgtttacaagggactaaggcggcataaagtcatatacattttcgtggaatttataataccgctatgctacaatgaagtcagcgataaatcgggagttacaaaggaatggcaatatggaaatcaaagaacttaaagaaaacaaaaaacaatttcttccgcttctgctgttagcagacgagcaggaggatatgatagaaaaggtatcttgacagggggactatgtatgttttggacgatgatggagttaaatgcgaatgtgtagtgacagacgagggaaaaggcgttctggagattaaaaatatcgctactgaaccggtacctttttatgagaagtgcggatttacttattctcatagtattaaaaatttcttcatagataagtatgaccatccgatatatgaagcaggtactcaattagtagatatgattattttgcggagaaaactgtaaattccctgtttatcgtggagatagcaaagacaggcaatcaaggcgggaaagcccttcaaacggcttcccgcccatttcaattttgagaggaaaatccgtcttttttctggggagtgcggctatcagtccgggacgctttgtcatattgtctggtataaaacgaggaatgaggttttcatatacgccctgtctgctgataaaatcaaatctgctcttgcgttgcggctctataccacgcaatcatagctctgctttcctgccgcttcaaatctctttgacctctccggcggcaatggcattttcacggcaacgctgacagagcgtataacacactaagctttgtcagcaaagtcgtgtgccaaggggaatccaccttttagaaaacacaatgcaagacggcgttatgaccatcaccggagccataacgccgtcttgttgtcagcagaccgtttcagtagtcttgcgtatagcttcttgtaaactgccctaactgactaaagcacacatatagaaaaaatttctattttggcatgtgtaaaaagttaaaaaacaggtttacaagaatattgtgctgcttttgtaaaatccttttgcaaaagcgaaatagcttgactcaaaaaagtgtcataaaagcacgtccacagaatatttatagagatatagagtgaaaggacaaggatgtgtatgaacgacagttttaaggctgtaacagcgctgctcccggagcctgtaagagaggaaatagcggatataacaagaggcggccgaagcgagatcactgagatacgcctgcgggcgggacaaacctcttcatatcgcgtctgcatgcgcggaacgcaaattgaaaaaacggcagcaggcagagtgctatgtgataaggaactaattaacgaatgtataaataaatttattaactattcgtattatgcctatgaagatgagatgaaaaacggctatattactttgtctggcggtcatcgcgtgggtatctgcggacacattgtcacggaaaacggcagggtgcatttgatgcgcaatatttcgtctataaatatacggcaggcgcgcgaagttatcggcatagccgcaggtcttgcaggtaagataacgactcctgaaggccgcatcgaaagcacgctcatagtatcgccgccaagatgcggcaagacaactcttgtgcgcgacttagtacgaacgctcagcgaaaggggctatataataggtgtgtgtgacgagcgttctgagatagcgggaatgcgggacggagtgccttcatttgatataggcgcaaacaccgatgtaatggatgcctgcccgaaggcgtcaggaatgctgatgctgcttcgctcaatgggacctgatgtaatagtgacagatgaaatcggaaaagtggaggatatcgaagcaatagaaagcgtgctgctcgcgggagtgagtataatagcgacaattcacggagccggcagacgcgatatagctgaaagcagagttgcagaactcgtggaaaagggcattttcagaaatatagtatttctttcaaacagaccgagaataggaagcataaaacagattgtacatataaatgaagggagaatgaggcgagcttatgattaaaattgcggcgtcgctgataacgatagcgggccttggcatatgcgggatactcaaagctgcgcgttacaaggaacggacggacatactttctgattttatacagacggtggaaaaaatgaaaatggagcttgaatacaggagggaaagcttgccggagctgatagcaaggctggctgatgaaaatacactttcaggctgtttttttacacgcacgtcggaaatttataggaatggaaacggacattcgcttaaagaatgttgggatcaagccgcagatgatatatatacacagaaatgccttgcggtaaatgacatcgaggcgataaaagagcttggaagcgagcttgggagctgcggcatcagcgggcaggaaaaagtattcgatctttcacttatggaattgcgggcgcttttggcagatgctgaggaggaaaaaaaagttaaaggcaaaatgtacataagcctcggatttaccgcaggcataacaatagtaattttactgatataagggggcaaaaatgaattttgatgttgatattatatttaaaattgccgcaatcggcattgctgtggccgtactcgcgcagatacttacaagagccgggcgtgaggaccaggcgcttatgacgacgcttgcgggaatcgtcatcgttataattctcgtagtacagatgatagcggagctgtttgacacactgcgctcgctttttggcttgtaggtgaaggtgatttatggaagcagatatcctgaggataacggcagttgcgattgtcggagtaatagtcgcagggctgataaaagaggtcaagcctgaatttacggtgtatgtagtgctggcgacagtagttatcatattttttctcgcggcatctaaactgcgcgtagtatttgaatttttgagtaacatatatgcaaatgttacatatggcaagacattttttccgattcttataaaggtacttgctgtggcgtatcttacggattttacttctcaactctgcaaggatgccggtgaaagtgcgataggctcaaagctggaacttgcggggaagataattatattttacctttcaattcctattttggtagcgattttggagcttataaacagcgtgctgtgaggtgaatatggattataaagatataataaaggaaaaacttgcggaacttaatctttccgagctcgaaaacgtgctcgacgacagcgacataacgggtgcgctttcaaatgtgagcgcggagagtattatcagcagtatacttgcgggagagccgctcttcaatacggaagctgtcatagaaagcgtaaaggatttattcctttatgaaatgaaaagcgcgctcgtacttggagttgaaatagtcacaatatcgatagtaatcggaatgcttaaaagtctgtcgtcgtcatttggagaaaaagcggtatccaatctcggaacgatggtatgcacctgtcttatcatagggctttgtctcggcaattttacgacgactttcaatctctgcaaagacgctgtaaacacgatgacatatacgatgcagatattgatacccatattgatacctcttcttatagcaataggaggtacggtctcgggcagcgtgctaagtcctgtaataaccggtgcgacggcagcagtgaatacgatgctttcaaatttgatacttccggctgtatttatatccacgatattttttatggtcaacagtatgacggagaaggattacgtgaataagctggccgtatttataagaggggcagcgacatttgcctgtggtatctctgttactttctttgcgggaatcacagccgtgcagagcttcgttacggaatcggcggacggcgtacttgcggatacagcgcgctattctatcagcaattttgtaccgataataggcggctttgcttctgattctgtcgatatgatgcttttgtgcgtcaatattataaaaaacggtataggcgtgctcggtgtgatagtgataatagtgctgctcgcgctgccgcttataaaaatgctggcgatagccgtcgtctataagattacggccataataactgagccgctcggaaacaaacaggtaagcgaatgcttaaaccagatgggtaactccgtgatcacgatggcggtgatactttttttgacatctatgatgtttctcgtgttcatagccataatcataggaataggggcgtgattttatgtcttatgtgactgaatgggtcaagaatatatttatcattgtcgtagcggtgtcgtttatagaggtgctgctgccggcaggtaatatggcgaaatatgtaaagtacatattttcactgatcattcttgcaagcatacttgcgcctcttgcaaaattagtggcataaggaatatgaaatcaaatatattttaaggagggaaaataaatgcggatgcaggagaaatttaaaatttcaccggaattaaaggatatgctgatgcgcgctctagtatgcgccgtagtcattgcagttggttttctcgctgtggacgcctttacacaggggcgtgacggcaggaggcagatagttgacgacgacggggcgagcgaaaccgcactcatagagatactttcggatataaaaggtgcgggagatgtcgatgtgatggtgaaatacgatgacggaggcggtgtgacgggcgtaatagtgactgcgagcggagctgggagcgtcgttgtgagaaacaatcttacaaacgctgtatctgcggttttcaatatcccggtatcaaatgtgatggtttttgaaaaggagaatgggggagaaagcgatgaacaataaaaagaaaacaataatactcggactgtgcgtgtgcctgctctgcgctggtactctttccttaggcattgcgtcgagaaaagcggaagcggataaagcggcgagcgtggagtatgtgaatgacgacaattcgggaatactgccgcacgatggcgatgtactcgtagacagccttaagctcaaaaagataagcggagacggaagcggtgcagaagcagatacatcgggcgcaggcatcacagcaggagaaaacgcggggacgaccagtgaaaccgtaacctctgatgatatatcggagcttgataatgccgatacatatttcgacgaagtaagagcaacactcaatatggatagaaatcagataatctcgatgctgacagatgtgatagcggaagcagaaagcgagagtgaaaaggataatgccgcggcccagaagctcaaaatcatagattatatggataaggagcagctcatagaaaagctgatagatactaaagggctgccaagctgccttgtgctcataagcgataatgctgttaatgttactgtaaacaaacaggatttgactcaatcggatgctgctaaaatatgcgatatcgttatgagagaaaccggaagggatgcggggcaaatagtgattcaaagtaaattctaagagttgttttttcggaagagttggtgtataataacaattgtataatatagatgaagttttgcagataagaaggatacggtatgaaaagcgaatcgcagattaggcaaggcggcataaaaatccccgacagcacgattatttcctgcgcagcgggtgcggcgcttgagacgaagggtgttgcggagcttgcgggcagcagaagaggcatcaggtttgcgcgcatcgaagagggaataataatcgatgtatttgtatctgtgtattatggcagcagcataccggaagtatcgtggaatatgcaaaaaaacatcaagaataaggtcgagcgtatttcaggagagagggtagcagcgatcaatgtaaatgttcagagagtgaaattttctcaggacgaagaggaggatttttagggtgaatagaggaagcgcacgtgagcttttgatgcagcttcttttccagatggagatgcagcaggatttttcggatgagttaaaggacagttatcttgaaaatgtcgcgggagtacgaaaccagctcgattatataaatacgatatttacaaaagtaacagataatttacagcttatagacgatgtgatagacaataacagcgaaaaatggaaagtgacgcgtatgccgaaggttgataaggcgatacttaggcttgcgattgctgaaatgctttttgcggaagatataccgtgcgaggtatcgataaacgaagccgtaaatcttgctaagaagtttagtactgatgaaagcggaaagtttataaacggaattttgagcaaagtaatatgaaaaacaatgcagataaaaactttatactcgggatcgatacgagcaactataagacctctgttgctgttgtcggtttagacggagaaataatttcagatttcagagagcttttgagtgtaaaaaagggcgaaagagggctgaggcaatccgacgccctttttcagcatattgacagactgcctgagcttgttgaaaaggcttgcagcagagcgcttaatggcgaaaacggaggaaaaattctcgcggcagctgtgtctacaaggccgaggccgcaggaaggatcatatatgccggtatttaaagctggcattgcggcggcaaaaagcataggtgcggcgcttggaatcccggtgtatgagttttcgcatcaggagggtcatatagaggctgcgcttgcgtgtgcgcaaaaagcagcttgtgactgcggcaaaagggggctggaagcgaaggcttttggagatgagccgtttattgcgtatcacctttccggcggtacctgtgaaattttaaaggtaaggcgtgttaaagagggtatcggtggttacgatatagaaataatcggcggcagccgcgatatatcgtttggtcaagttatagatagggttggcgttcagcttggaatggcatttcccgcaggagcagagatggacaaactcgcgcttgcagcagattgtgagacgagtttgctcaaaaaaatagccgttttggatttatacatcaatctttcgggtatagatacacagtgcagacgcgaagccgaaaaaataggggaggacgagcatatgcgggctatgcttgcaagggagctcttctcgaaaattgcggaagcacttgtaaagctcacaaaaaacgtggcggaggcatacggtataagaaaatttctctttgccggcggcgtcgcaagcagtgaatatatagaaaattatataaataacactatgaaaataaaaaataacggaaatttggaaataatatttgcggaaccgaatatggcgcaggacaatgccgtcggtatcgcactactcggagcaaaggcatatggcgatgaaacccgttaaagtatcacaattgaataactatataaagagagttctttcgaccgatcccatactcgggaatatttcagtgataggtgagatttccaatataaaataccacggcagcgggcatgtatatttttctcttaaagacgagagcgcgaggataaactgttttcttcctgcggacacgctgtcacatataagctatgagcttagtgacggaatggagataatcgcttacggatatgtgtcggtgtatgaaatgggcgggagatattcgctcaatatacgtgacatagaagtgcagggtaaaggcgatcttgcagcttcatttgaaaagctcaaaaggaagctcgcagccgaaggcatatttgatgaggtgcacaaaaaagcgattccgttttttccaaagcgtgtagcggttgttacgtcggaaacgggtgcggccgtacaggatatattaaggattataaaaaacaggaataattatgcggatgtgctcgtctatccggtacttgtgcaggggccggaggctgcgccggaaatatcatctgcaatagaaaatattaacaggctttttcccaatgttgatgtgatgatagtgggaaggggaggaggctctgctgaagagttatgggcgtttaatgaagaaattgtcgctcgcgctatatataattcgcggataccagtaatctcagccgtagggcacgaaatagactttacgatagctgattttgcagccgatctgagagcgcctacgccgactgcggcagcagcgcttgcggtgccggatacgttggaactcaaaagttatatagaaaaaattaaagacgatatgctgcatgctttaagaaatcaggtgcagtacaaagaaagacttatggaggccgcaaatccggatatgctcagacacagtcttgaaaataagataaatatgagcgagcttaaagttgaaaatttctataagcagctctgcgatctgaatccgatgaatatagcagcgcgcggatacgccgccatcacggacgaaaacggtgtgttaaaaagccgcgcggcggattttaaaaaaggagatatattaagagctgtgttcatagacggcagtattacggcagaagttcttgacagaggaggaagctcagatgataaatgataatatgacttttgaggaagcgctgtcggcgcttgaaaaagcggcatctgctctccgaggtgataatatttcgctggaggaggcgatgaagatttttgaagacggtacggttctttacgaaaagtgcaggcaaatactcgatgaagcaaagcaaaaaatagagatatattcaaaggagtgaagttatgaataaggaatttgacagatacaagagtatagtagaagagcatcttctcgatttcataccggaaatagatcataagagcataacaatatacgagtctatgaaatatagtctgacagcaggcggtaaaaggctgcgtccggtgctccttcttgcagcatgtgaatttgcgggcggcgatataaataatgccattccatacgcctgtgcgatagagtatatccacacatattctcttattcatgacgatatgccggagatggataacgacgatctcagacgcggcgtgccgacaaatcacaaggtatttggtgaggcaatggcgctgcttgcgggcgacggtctgctttcgacggcttttgaagtgatgcacagggacgagcttctctatctcgatgaagatataaggctcaagagaaggataagagcggcgtacgagatttcaaaatatgcaggctgccgcggtatggtagccggtcaggtagcagatatcgaagccgagggtaagcagtgctcgcgggaaatgctcgattatattcatataaataagacagccgctctcattatggcgtcagtgcgtgcaggggctcagcttggcggagcagatgataaaatgctggagtctttgacgaactatgccgaaaatttgggcctcgcgttccagatcgtcgacgatattctcgatgttgtcggagatgaagctacgctcggaaagaaaacaggagtggaccttgaaaacaataaatcgacatatcctgcgctttacggactggaagcgtcgcaggcacggcttgaagaacttacgcagaatgcagtagacgcacttgctgattattatgacaacgctgaatttttcacacagcttgtaaaagatctggcggtacgcgtaaaatagagaggcttttaaattatgagtaaaatgatagataaggagcttacgcctgataaaatcaaggcgatgtctttaagtgaccttgagcttctttcgtatgaaataagagattttttgatagaaaatatagcgaaaacgggcgggcacctcgcctcaaaccttggagtagtagaactcacaatcgcgcttcacaaggtgtttgatctgccgcgcgataagctcatctgggatgtcggacatcaggcttatgtacataagatacttactggcagagcgcaaatgttcggcgggctcaggcagacaggcggcatttccggtttcccgaaaagagacgaaagtgaatacgatttctatgacagcggtcacagcagcagctcgatatcggcagcttacggaatggcatcggcaagggatcttgagggcgattcttatgaggtagtagctgtcataggggatggtgcgctcactggcggaatggcgtatgaagcgctgaataacgcgggtgcgtcaaattctaaaatgattgtcgtacttaacgataatcagatgtcaatatcgcagaacacgggaggtataacaaagcacctttcaaaacttcgcacatcaaagggatatctgaattttaaaaagcatttgaaaactacgcttaagaatatacctaatgttggcgaaagcatatataggggcgctgaaagtctgagagattcgctgaaatatgctttggtggacggcggagctatttttgaagaacttggttttacatatttggggccgataaatggaaacaatctggaagagacgatagaagcgctcactatggcaaagcgtgcggagggaccggtgcttgttcatgtgacgacagtcaaaggcaaaggatataaaaatgcggaaacgcatcccaatatatttcatggtgtggggccattcgatcaaagcacaggaaaaccttttgctttccaggagaagacatttgcgcaggttttcggcgataaaatgtgctgtatagcggatgaaaatgagaaggtggttgcaatttccgcagcgatgatagatggaacggggcttgataagtttgcaagaagatttccgacacggatgtttgatgtgggtattgcggaagagcacgcagtggcgtttgcagcgggacttgcactttcggggtacagacctgtcgttgctatatattcgacgtttttgcagcgcgcttatgatcaagtaatgatagatatctgcatgcagaagctgcctgtcatatttgccgtggacagagcgggaaatgtaggaaatgacggtgaaacgcatcacggaatgttcgatatttcctatctctcggcgatgccgggaatgacggtgctcgcgccggcagacggcgcggagcttgcgcagatgctcgattacgcgctgacgcttgaagggccctgtgccataagatatccgcggggaaatgcgggaaatattgcgtcgggcggctggtttacgggcaggagccgtatagtaaagcaaggaaaagattgcgaaatatgggcggtaggcaatatgagagaaagagcgcttgcggctacggaaattctcgaaaaaaaaggatacaagatcggtgttgtgagtgtgagtgtcataaagccgcttgatacagatacgatagaagggattgccgatagaacaaaaaaggctgtgacgatagaggatggcgcgttaagaggaggattcggagaaatgcttgccgcgtactttgcggataagagcgaaagacctgaggtacttgcgctcggctggccggataaattcgtggaacacggaaatacggaggacttatacgaaagatacggtttctctgcggagagtattgcggaaaggatacgtgaatttattgaaagataaagacagactcgatataatacttacagaaagaggcttttttacgtcgcgtgaaaaggcgaaagccgctgtaatggcgggtgttgtattcgttgacggccagaaagtggataaagcaggtacgcctgttttcaatgatgcggatatatatataaaagaaaatatatgcccgtatgtatcgagaggcgggcttaagcttgaaaaggcgcttaatgagtttgaaatagagcttgacggctctgtatgcaccgatatcggagcttcaaccggtgggtttacggactgtatgcttacgcgcggagcaaaaaaggtattcgctatagatgtgggctatggacagctcgattacaagctgagaatagatccgcgtgtcgttaatatggaaaagacgaatataagatatcttgatacggctgttatagatgacgaggtgagttttatttccatagatgtgagctttatatcgctgaaactcgtatttcctgtagcggccgagatcctaaagcccggaggcagcatagtgtgcctcgtgaagccgcagtttgaagccgggcgcgagcaggtgggaaagaacggcattgtgcgcgacaaagatgtgcacgaggaagtgctcgttaaggtcgcaggctacggacgcgcaaacggactttctgtgcgcggcattaccttttctccgataacgggagcaaaaggcaacatagagtaccttatgcatctcataaaagaagatgatgaagataataaggaaatgacggaggaaactataaaaaaaatagtcagactgtcgcacgaaacgcttgaagcaaaagcaaattgaaacaaggaggtaagaaattatgaaattatcaaagaatgtaacggcaatgcagttttcgcctataagaaggtttaacgggtacgccgcggacgccaagaaggcggggaaaaaagtatatcacctcaacatcggacagcctgacatcgtaactccccctgagtttatggaagcagtgagaaattttgatgaaaatgtgctcgagtacgcggaatcgggaggagatacgcggcttgtaaattcagttatcggttatttttcacgcctcggagtgacacttgcgccggaggatatcctcgttacaaacggaggttctgaggctttgcagatgatatttacaagtatactcgacaaggacgatgaagtaatgatggcagagccgttctatacgaattatcatgcatttatatcggctgcgagcggtaaaattgcgccgattacgactagtccggaggacggatatttctatgctgactctgcaaagcttgaagccgcatacaacgaaagatgcaaggcgatagctatcgtcaatccgggcaatccgacgggctgtatactttcaaaagaagatatgaaagtcatctgtgactttgcagtaaaacacgacctctggattgtggctgacgaggtttacagagaatttgtatatgacggtaaggaaatgagcacatttgcaagctttgatgagattgccgacaggcttgtgattgcggattctgtttccaagagattttcggcatgcggtgcgcgcgtaggctttgcaattacgaagaacaaggaattgcaggacggacttatgaagatcgctcagggtcgtctctgctgtccaacccttgaaatgatgggcgccgcttcactttatgaacttccgggcgagtatttcaacgctacgagaaaggaatatgaagagagacgcgactgtgtatatgacggacttatgaagattccgggtatcgtgtgtcagaagccgggaggtgctttctacattatggcaaagcttccggttgagagtgcggaagattttcttatgtggcttttaacggaatttgatgataacggcgagacggtgatgtatgcgccggcggagggtttctatgctacgcctgggcttggaaaaaatgaaattcgtatagcttacatactcaatcagaaagatcttgcaagggccgttgagcttatcagaataggtattgaaaaatacaaggcagagggatataaataatatggcattatcacctatgatgcagcagtatattgcgataaaagagcagtataaggattgtatacttttctttcgcctcggggatttttacgaaatgttttttgaagatgccaaactcgcggccaaggaacttgaacttacacttacaggtaaaaactgcgggcaggatgaaagggcgccgatgtgcggtgttccgtttcattctgccgatagctatattgctaagctcgtggaaaagggctaccgtgttgcgatatgcgagcaagtggaagatcctgcgcaggcaaagggcatagtaaagcgcgaggttatcaaaatagttacgccgggcactgtcacaaaccagtcgatgcttagtgaaaaggagaataactatcttgcttccgtatggagaggaaaggacaaaacagctctcgcttattgcgatatttccacaggagagctttcagctactgcttttaaaactgaaactgactgcgagacgctgcagaatgaactcgttaagataaatgtccgcgaggtgattttgagcgaggatgcggcagggtttctcgatattgacgggcttaaaaagataacgaatgcttattttaatatattaaatgaaagatattttagtttcgaggcggcagagacgctcatcaatcatcagctttccgcagaaaacgcttcgatttcaggcatttcgagaaattttgcggacgagcctgagcttacctgtgcggtaggtgcgctgctttcgtatctgatagagacgcagaaacagaatctttcgcatctgacgcaatttaatatttatgagatagggagccatatggcgctcgacaaggccacaataagaaatctggaaatcacggaaacattgtatgataaaaaggtgcagggttcgctgctcggtgtgctcgacaagacgcatacagctatgggcggacgcaagataaagcagtggctgcgcgagcctttaaacaaggtcggcgagataaatatgaggctcgatgctgtggaagagctcgtaaatgatgtgattatgcgcaataatataaaggaagcgctgaaaagaatttacgatatagagagacttgcgggcagaatagcctgcgggaatgctaacggcaaggatatggtagcgcttagaaattcagtgtttgtggtgcctgatataaagtcggagcttactggctgcgagagcgcgctgcttttggatatgggcttggagctttccgatttatcggatatttataaccttgtggatgcggcgatagtcgatgagccgccgtttacaattaaagaaggagggcttatcaaggaaggttattcggaggaactcgatacgcttaagctctcgataagagatgcgcaaagctggatagcgggtctggaagctaaggagcgcgagagaacgggtatcaagaatttgaaagtcggatttaataaagtgttcggttactttctcgaagtgacgcgctcttattacgagcttatacctgaaaattacataagaaagcagacgcttgtcaactgtgagcgctttataacaccggagctcaaagagacggaaagtctcgtgctcaatgcagaaacaaagataaatcagcttgagtacaggctgttcagcgagctgcgggatgctgtggaaaaatatataccggaattgcagaagacagcgagaattgtagccgagctcgatgcactctgttcgtttgccgaggtcagcgacaagcttggttatgtgaagcccgaggtgcacgcaggcaaagaaattgctgtagaaaaaggaaggcatccggtaatcgagcaggctgtaaaagatggtattttcgtgtcgaacgatctttatatggacgccgaaaattactcgatgctgcttataacagggcctaatatggcgggtaaatcgacatatatgaggcagacggcgctaattgtgcttatggctcagtccggttgctttgtgccgtgcgagtcggcgaagataggtgttgtggatagaatattcacacgcataggtgcatccgataatctggcgcagggtcaatcgacattttatgtagaaatgagcgaactttcgtatatactttcgggtgcgacggaaaattcgctgatcatacttgacgaaatagggcgtggaacatcgacctatgatggcctttcgatagcctgggcggctgtgaaatatctgtgttcagataaaaaacatataagaacgctgtttgcgacgcactatcatgagctgacggcgcttgaaaaagaacttaccggacttaaaaacctcaatgtcgatgtcgcggaagtaaacggaaatatcgtgtttcttcataaaatcgtgcctggcagcgcttcgagaagctacggaattcatgtagctaagcttgcgggagtgccgggaagtgtgctttcgatggcggaggacaagcttgcagagcttgaaagcggaggagaatatataaatcgtagcgctgcgaatgaaggctcatgcaggggagcttccggagaaggcaaggctgatgacggtagcgttttagggcacgcttctgcacaggagcagcagctctcacttttttcatttgcgggaaacgaagtgacagaaaggctgcgcactctcaatcttatggaaataacaccgtcacaggctatagcggtgcttgaagaattacaggaacttgcagggaaatagatttatgataaagatactcgaaaaacatgtggccgataagattgcggccggagaggttgttgaaagaccgctttccgttgtcaaggagcttgtcgaaaactcggttgacgccggcgcggactcgataacggtcgaaataaaaaacggcggtaagtcgtatatcagggtgacagacaacgggagcggcataaatgctgatgaggtgcttatcgcttttatgcgtcacgctacgagcaagataacgacagacaaggatcttgaaagcatacatacgctcggattcaggggcgaggcgcttgcgagcattgcggcagtatcgcgcattgagcttctgacaaagcagcagaacgccaagctcggaaaacgtgtgcttataaatggaggaactgtcatagaaaattcggaaacaggctgccctgacggtactacgataatggtgacggacttgttctttaatacgcccgcaaggctcaaatttcttaaatctgatagtgcggagagccgcgttattatagattttatatctcaaataacgcttgcatatccagatataaggataaggcttataaataacggaaatatactgtttgcaacaaacggtaaaggtgatgtgcggacgaacatatttactgtgtacagcaaggagacagcagatagcctcatacctgtgagcttttcgcgcgattatgccggagttaagggctttatttcatcgcctggagtgtcaaataccagcaagaggaatcagatattctttgtaaacggcaggttagtaaacagtaaagtgatagaaaagggcgtagcagacgcttattcagatcgtttgtttgagggcagatatccgtcggcgtttttgtttgtagaagcggatcccagcaggctcgatgtgaacatccatccgaataaaaaggaagtaaagtttgatgatgcggcgtttataacagaacttgtacgcgatgcggcgcgagaagcgcttgcggcgaaggaggcgataccgcaggttacagagaagaatatatttaaatttaagaatacagaaaggaaagaaccttcgcaagcttcgcctgagcagattaaggatattgcattggcgaagaaccaatatgattcgtctccatcaagcaggcaaaatacatctaagtatgatttcggaaaagaagagagtttaaaggaagttagagttaaagaagaacaagttgacataaaaaacttattgtcaaacttacgcgcacaggtgacagcggaggaagaaaaagaaaacgaggcagggcaggaaaagattcctgctgcagcaccaagaccatttgattttgcctatcttcatcctatcggatctatattcggcacatatattcttttgacagacgacgatactttttatatgatagatcagcatgcggcacatgaaagagttttttttgaaaagcttatgcatgagtacgagcacgaagagaaaacaaaacagccgattatgcttccgattatattaaacctaccgtacggagcagctgagagcgcgggtaaaagcctggaaaagctcaacgatatgggatttgaaattgaagaattcggtccgaaaacatatgctgccaaggctattccgatgtttatgtcgcttgcggaagcagaggattttttaaagtattttgcagaaaatgtggatgacgggatagatatatgtgatagaaacaagcttgagaagataatgacaaacgcctgtaaagctgctgtgaaaggcggagatttgcttaaagaagaagagataaatgaactgcttacggaactttcacaatgcgaaaatccgttttcatgcccgcacggcagacccacatttataagaatgagaaaatatgatatagaaaagatgtttaagagggtgtaatggaaaaacgcgtaatatttgtcttaggtccaacagctgttggaaaaacaaaatatgcgattgagattgcgcgcgcgctcggcggcgagatagtttcggcggattcaatgcagctttataagtttatggatataggctcggcaaagccgactgctgaggaacagagcctttgccggcatcatcttgtggatatgatcgatccgagggaggctttttccgtatcaaagttccaaaaacttgccaaagctgcgatttacgatatagaaaaacgcggactcgtgcccgtcgtctcaggcggaacggggctttatgtgaattccctcatatatgatatggatttttcatccccgcccggagacgaaaaaaaaaggagagagctctacagtcttgcagaagaaaaaggatgcgaatatctgcacaagctccttgaagaaaaggacagtgatgcggcggcgcgcattcatccgcataatataaaaaaagtggtgcgtgcaatagaagcggcggaaagcggagctaaaattccatcttttgaacagtcgtttgtaaagacaaaagactatgatgcggtgatcatagggcttgaacgcgatagaagcgagctttatgaacgcatcgataagcgtgttaatatgcttattgatgcggggcttgaagatgaggtcagaggacttattgatatggggctcacggaagacgatatttcgatgaagggtatcggatataaggaaattatcgcatatttccggggaaattacagccttgatgaagcggtgcgcctggtaaagcagaatacacgacatttagccaagcgtcagatgacctggtttaagagatatgaagatataaaatggtttaatatttccgcatacgaaaatgatgaaagctgtatagaggtaataataaattggctgaaaaagttgtaaaagtccataataaaagtgacaaaccggacaacattattaaaaaagaatatgatataaacagtagaagtcttgcgcttgaaaaagagctgccgccgtatcttgcgggattttttgcgtatctgcgcggtaatgtgcttcctatgaccagacttgcttacctgttcgatttaagattttttttccgctatattattgcggagcgtccagatctgacaaacgctaagacaccgcgggaaataaagattgaagagctcgaaaatatacaagctgccgatataaatatctatatagattactgcaagtcttatgaagtagaagaagatgatatgatttatgtgcatgaaaacacgaataagacgctggcgcgcaagaaatcatcagtttccgtgatgttcaagcagctttaccgtgacggaattttgaagaagaatataacggacggatttaatcctataagagtgcagaagccgggagagcgtgaaatcaaggcgttgcaggatgacgaggtgatgaaaatgctcgatgcggtgtccacgggcgcgcatctcactgacaaggagcacgaattttgggaaaagacgaaaaagagagataaagctatactgatgctgtttttgacgtatggcctcagaatatcggaactgcagcagcttaatatttcatcttttaattttcagcgcggagaattcaaaatttacagaaagcgcggcaaagaatcaataatgccgctgaacaggtcggtaacgatggtgatttctgattatttaaataatgagcggcctgatgatgagaaggtagatgaagaaagccgcgacgctctttttttgtcgctgcaaggcaagcgtatgacagagcgcgcgatacgcgatatgtgtaagaaatacacgtcaataggaatggaaacatcacggaaagccggttatagtccgcacaaactgcgagctacagcagccacaagccttataggacgagggaattctatatttgatgtacaggcactgctcgaccatgagcaagtgacaacaacgcagctttatgcggcgcatagacagggggtaaagcgcgacctcgtgcgcggtatggaatgggaaatagaaagacgcgagggaatggcaccggaagatgatgagtaaaaaaatactttatttactataaaattattatgtaaatttaaattgaattaaaataataacgaaaggcagacaagaaatgcaaagcaatacttacaaattactcaatgaagaattcggagtcgcaaaagaagtgctcaatgctgtttcacaggctgaggacgaaataaaggctctgttcgacgatctcgatgatgtcgcggcttttaaccagtacaaagtattaaaagcttttcagaagaacaggatatctgatatgcattttggctggaacacgggctacggctatgatgatccgggacgtgaggctattgaaaaggtctatgctgatgtttttcatactgaagctgcgcttgtgaggccgataattgtaaacggtacgcatgcgcttacgcttacgcttacgggtatcctgagacccggagacgagcttatttactgtacaggcgcgccctatgatacgcttgaagaagttataggtataagaggtgatagcggtaaaggttctcttaaggaatttggcgtgtcgtataagcaggttgagcttgctgaagacggggcgatagatcttgatgcgctcggtaaggccatttcccaaaaaacaagaatggtctgtctgcagcgttctacaggctacgcttggaggaaggcactgacgatagatgagatcaaaaaagctgtgacatttgttaagaatataaatgaagacatcatcgttatggcggataactgctacggtgaatttcttgataccaaagaacctacagatgtcggagttgatgtaattgcaggctcacttataaaaaatccgggtggcggtcttgcgcttacaggcggatatattgcgggaaagcgtgatctgattgaaaatataagctatcgcatgacttcacctggtatcggcggggaatgcggtcttacattcggccagagccgcactatgctgcaaggcttttttatggcgccgagagttgtaaacggagcactgaaaggtgctgtgctgtgcggaaaggtttttgaaaacctcggttttgctgtgtgcccgaagcctgaagatacgcgttccgatatcattcagactgttcgtctcggctcgcctgaggcagttgtagcgttttgccagggcattcaagcagccgctcccgtggatgcgcatgtaaagccggaaccgtgggatatgcctgggtatgaggatcaggtggtaatggctgcgggggcgttcgttcaaggttcgtcaattgaactttcggcagatgcgccgatacgtccgccttacaatgtgtatttccagggcggactcacttatgagcattcaaaattcggtgttattatggcgcttgagacactttatgaaaaggggcttgtgtctttataagcgcagggtttaagcggagtttaaagagtaaaggtatatataggggttaagattatattatggaaaaaaggactaaagaaaagcttaaaaagctaataatatggctcaaattcggacttctaatcgccattgtggcagtagttccgcttgtagtatatttcaattatcacgagcttataaacgattttggttcgct

SEQ ID NO: 3345 - DNA, 8705 bp, Unknown
  16S sequences of unknown bacteria
tcccacgtcaaggagcaccttatagtattcaagcttttcctcaaggctcatgggaataacaaggctttggttgccgtctctcatgtcaacgctgcaccacaccgggggatgctcgatgtgatccttgttgacccatttgttgtatttcccgtcaacggggaaatatcccacttggtatttggttgaatccatcatattatttgctcctttaaaatttatgattatttttttaaaaacaaaaaccgccccaaagctcttgctttgagacgggtgaaaacaaaacactcgcggtaccactcaaattgcgataaatcgccgctcttcgaagtcaaataacttctatacactcacgtagcatacacgggtcgccctacacacttgcgcttcaggcttccggctcggaagggagaggacaaagctttcacataccgatttgcaccaaccatcggctctctgaaatgttattcaccctgaccattcttcgtcacagcttttatttattcggttttctgtatactaacacatttgttttctcttgtcaagtcccgacaaaaaattattttctttgccaatccttaaccgcttcggcctctttataaagcgcgacataggaatcgtgacggcttttggatatttcgccccgctctaccgctctgcatatttcgcagcccttttcacaggtgtgggtacaggaagagaacttgcactttccgataaagggtgcaaactccctaaaatcaaactgcaaattttccttgacaataaacccggaggtttcacagtccaccgaggaaaatcccgcggtatcgcaaacatatccgccgccctcaacgctcggcgtggcgggtggtgtggcggcccctccccagcttttcgcttatctcccccgttttaagtccgagctgcgggtcgataatattaagaagagaggatttgcccacgccggaatttcccgtaaaaacgtttattcctccgcaaaggcgtttttttacgctgtcgacgccctcgccgtttttacagcacaccaaaaaggtttcgattccggattttttataaatatccaagatttccgaagggtcggcaagatcggttttactcaccacaacaattggctcgatttctctgtcctcggctatggcgcagattctgtcgataacaagggtgttcggtctcgggtcgacggtggaaacgacaatccaaagacggtcggcattggcaaccggcgggcgttcgagaaaattctttcggtcgacaatgctttttatcacgcctttgccgttttccgtcgtttctatttcggcgaagtcgcccacaagaggcgtgatctcatttttgcgaaacacccctcttgccttgcattcataaacctcaccgtctgccttggcataataaaatcccgcaattgcctttactataacggctctcattgctgctgtccgtctccgttgtttttatcgttttcggcgctgtaataggcctccttcggcaatgtgaaatgctcctcggccgtggcgcttccgcttgaaaaatcaacggtgtatttcccgtagtcatatccgttatatttcagatatacggtgtattttccgctgtcaaaattgcccatagcctgggaaacggacagcgacttggtcttgctttccattgtcgtcgggtcaagatttcccgtatcgtatatctgttttccgtcataaaagaccgtgatattaaagctcttgttggcgtcgtcgggaatgtcatagcttatggaaacggcgtttccgcttgaaatgacaagatccaccgccgagccgttattgaccgtggagccggaagatacgctttgaaaaataacatatcccttgggatatttgctgctttctccgtaggtcacactgccgattttaagaccgtcgccctccacaagccgcttggcgtcggactcggtcatgccgacataattcgacaccataacgaagcttggaacgggacccttgctgacatagacaatgacggtgaccgtgctgtcgacctcttcttccgccgacggaacggtacttataacatacccttcggcctgagtgtcgctgtaaatttccttggtctcatacttaagcttcaaagcgttcatgttgctctcggcacggtcaagcttatatccgacatagtcttccataacctgtttctttccgccgagactgaccgtcacaaaaatttccgagtttttcttgaccatttttcccgcgtcgggagtttggctcattatctgtcccgccggatagtcagaactgtaatcctttgatttgaccgtgaaggtaaattggtccttatactgctcgataacatagttataatcctgacccacaaatttcggacaggaaatttctgttttgtcgattttcgctcggttaagaagcagcacgacaacaatggcaagagccgccacaaaggcgattgccacgcccacaagcacgggcaccgttcttgattttttctttttggagccgagcgaaacatcctgctcctcttttttctcctgaataggtgtgggagttatgtcggaaacatatttggtcggctcgttatccacaaaatatttataatcaaactgaaccgaaggattttttctgaaggtatcaatgtcggcaagcatttcggcggccgattggtatctttcggcgggatttttctgcattgcccgaagggttatttcctcaagtccctcgggaatgtcggaattgagcgtggagggctttatgggctcgttttgcagctgcattatggcaaccgaaacggcgctgtcggcgtcgaatggcagctttcctgtcagcatttcgtaaagcaaaacgcccaccgaataaagatcggatttcgcgtcggtggcctctccctttgcctgctcgggacttatataatgaaccgagcctatggccttgtcggtaaccgtgcgctgctcgctgcgggcaaaacgcgcaataccgaaatcggtcaccttaatggtgccgtcctgaagaagcattatattctgcggcttaatgtccctgtgaacaatacccttgtcgtgggcgtgctgaagcgcgcgcaaaatctgcgttgtgaagtaaagagcgtccttccaagggagtaccccctgacgttcgatatactctttaagtgtaattccgtcgatatattcctcgacaatatactgaacgcggtcgccgaaaccgacgtcgtataccttgacgatgttggggtgatccataacggcgattgcctttgactcatttttaaaacggcggcggaactcttcgttttgtaggagctcttccttgagaattttaacggcaaccgtgcggtcgtcgatttcatcatgagccttatatacaacggacattccgcccacgccgacgatttcttctatttcataccgtccgtcaagacgttttccgacaaatttatccattttgctcttctcctttttcgttcaagaccatgactgccgtgatgttgtctcccccgccgtttttgttggcaagttccacaaagctttgcgggcagtcgcaaaggggagtcttttctataatttccgcaatttgttcgtccgagacgaagtttgtcagtccgtcgctgcaaagaagcagtccttcgccttcgtcaatttcaacctcggcatattccacatcaagattttcgtccacgccgagagctctcgtgattacatttttacggggatggactcttgccgcctccttggtgagctttccgctttccaccatggcctgcacgaccgagtgatcccttgttatttgaacaagtccgtccttgccgaatttgtatgcacggctgtccccggcatgaattatatatgccattccgccgcaaaccgtcgcggcaacaacggtcgttcccattccggaaagtgcgtcatcggattttgccttgtcaaaaaccgttatgttggcggccgttgccgacgacttaagaagattatacaccgaccgctgcggcattccgcttctccatgcgcccttaaccttttcgcaaaatgtctcgaccgcaagctccgacgcaacgtttcctccgttggcaccgcccattccgtcgcagaccacggcaaacaccgcgtcgtccgaaagacgttcgacggcaaagcaatcctgatttgttctgcgaacaagtcccttatcgctttttcccgcaaaattcaatttttcatcacacccttcgtcatgtaataaaatcattgtttttcttttcctttaagctgaccgcaggaggcctcaatatcggccccgagagtccttctgaccgtggcgttgataccgtttttaagaagccgatcccgaaactcctccgccgcccttctcgtccccttgctgttgctccccttcacggggttggcaggaataaggttgacatgggcaatcatgcccgaaagcagccttttaagttcaaaaagacactcgtcggtattgttgacgccgtctattataatatattcaaaagaaatccgccgtcccgttttgtttgtgtactcgcggcaggccttcataaggctgtccacattccactttttgtttatgggcatgagcgaacttctgaccgagtcgagcgggcaatggagcgatattgaaagggttatctgcatatcaagctccataaggtcgtatattctgtccacaaggccgcaggtggaaagagaaatgtgccttgcgccgatgttaagccctttttctgacataacaagcctcagaaattttaccgtgttgtcgaaattatccagcggttcgcccattcccatgagcacgatgttggaaattctgattgaaaggtccttttgagcggccgtgatttgcgacaaaatttccgacggaagaagatttctttcaagtccgcccttccccgtggcgcaaaagctgcagttcattcggcagccggcctgggtggaaaggcattgcgaaaatccgtgtttatacttcatcacaaccgattcgataaggcgcccgtcggaaagctcaaaaagatatttgacggttccgtcgatttttgagacgtatttttttctgattttaagagccgcaacaaagtatttctccaaaagagcgcttcgcaaatccttcgacagattggtcatctcgtcaaagctttcggctccctttgtcagccattcgtaaacctgcgcggcgcgaaaggccttgagcccgtcccgtttaaagctttccgaaagctcctcaagggacatggactttatgtcgattttatccattattaacctttctcaaagcggaaataaaaaatccgtcgcaggggtttttgccggtaatcagcgtcaggcagttttgaggttcgtcaatgctccgtttaatttccgggaaaatttccgccggttcaaaatccgcattattatcaagaaaacgtgcaacgaccccatggttttcatcggggttcaatgtgcaggtcgaatagaccaaaattccgcccttttcaagatatttcgaacatgaattcagtatattatactgtatttcgggcaaaacatcaatatttgtatcacttttgtaacgtatttcgggctttttgcgtataattccgagtcccgaacatggcacgtcgcaaagaattcgatcaaaagttccgaggttttcgtcataaaccgacgcgtcgtttttaaccgccttgaccgaattaagtccaagccgttttgcaccgtcgcttataagctttattttatgttcgtataaatcagacgaaagaatttgcgccctgtcatgggacagctcagccaaggtgaagctttttcctccgggggcggcgcaagcgtcgaaaatcctttgcccctccctaacgtcaagagcctcgcagcaaagggcgcaggccgcgtcctcgacgtgaaaaagaccctcacgaaattccgaaagctcggtcaacgcaccggtggaaaaaaggtcgagacagtcgccgcaaagcgggtttttcctgacctctgcgcccgaattttcaagcctttgcgaaaggtcgtccgtcgaaattttgcaggtgtttaccctgaccgtcagcggaggtctttcaaagcagctgccgagatataaatcggtaatttctcttccgtaagccttttcgagacgcagataaatttccttcggtaccgaatatttaaatgacgacttatcataatagtctccgtcgcaataaagagccttttcgccgtctcttgccgcatttcgcagcacgccgttgacaaagccggaaaaccttgagtccgccgaatttttgacaagtctgaccgattggtcgaccgctgcgctttcgggaattttatccataaaaagcagctgataaagtcccattctcagagcggttttaactccgagagaaagctttttaagcggtgttttcgaatattttgaaatgataccgtcgagagttatttttctctcaagcacaccgtaaaaaatcgccgaacaaagtcccttgtcccgcctttccatatcggaggaggacagcgccgaatcaataacgatatttgaatatccctcgtcgctttccattttcataagagccttgaaagcgacctttctcgggttttgcatctgttcagtcacgccttccgtttccggtaaatctgataatgtaataaagaagctgaagcatactttgagcaagagcggcaacatatgtcatggccgcggcggtgagcattttttttgcacccgtatattcctcttttgtcacaagatcggaagacccgataaactcaagagcgcgacggcttgcattaaattccacgggaagagtcacaagctgaaaaaccgttgcaagcgagaaaagcacaagtccgatataaacaaggggctcaaaggcaaaaatacagcccacaacgcacagcggaaggccgaaacccgccccgatattgcataccggcacgattgcggttctcacctttatgggaaagtatccgactgcgtgctgaacggcgtgacccgcctcatgagctgcaatccccacggcggcaatggaagtggaatcgtacactccctcgctcaaaaaaattgtctttgccttgggattgaaattgtcagtcatttgtccgtttattctcgcaatgcccacgtcgtttatgccgttagcgcaaagaattctttcggcaacctccctgccggtcacacgaaaggttgtgttaactcttgaatattttctgtatcgggatttaacaagtccctgcgcccacagcacaagtatgattgcgggaagcataaagagaaggtattgaaaataataaccgtaataataatatccgtatcccattttaatcctccttggttccgagaacagacccctcgggaattttatgaccgcgaagcatttcctcgcttgtcatgcgtctcgagcccacaagctgaacctcgcaaagctccaccgagccgccatccccgcaggaaacgacaagacttttgccggcaagcacctcacccgccggagcggaggatttccctgccttttttgccgaataaaccttgattttcatgtcgccgaaggcggtaaaggccaccggccaagggttcattcctcttataagatttattatttgctccgcaggctttgaaaagtcgatttcggccatttccttggaaagcatgggtgcatgggtagccttgttttcgtcctgctttttcggaaaaatcatcccgctttcgagagcgtcaacggtttcggtaagaagctcggcgccgagcggcgaaagagcgtcaaaaagctcgcccgaggtcatttcctcgggaatttcaaattccttggtgagaagaatatcgcccgtatccatgccctcgtcaagaagcatggtggtcacgccggtaaccttatcgccgtttaaaaccgcccattgtatgggtgcgctgccgcgatatttcggcaaaagcgacgcatgaacgtttatgcacccgaatttcggaatttcaagcatttcctttggcaatatctttccgtaggcgacaaccaccgcaatatcggggtttagcgaacggagtgtttctaaaacctcgggattgttttttattctttcgggctggaacacgggaattttatgcttttcggcacattccttgacgggaggaggacaaagcttgtgtcccctgcccttgggacggtcgggctgagcaaaaacggcgcttacggtgtggcctttatttataagagcctcaaggcagggcacggcaaaatccggagtccccataaacactatattcaaagccgttcctccttaatcggtgacccatttaacgacgtgctcggaataaagaattccgtccaaatggtcgatttcatggcaaaaagcctttgcaagaagctcgctgccggaaacttttttctttttcccgttgcggtcaaaatattcaacggtaaccttgttgggacggtgggttatgccaacctttcccgggcaggaaaggcagccctcctccgactcctgaagtccgctctgtttaactataacagggtttacaagctcgataagaccgtcaccaacgtcaacgatgcatacacgccttaaaattcccacttggggagccgcaagacccactccgtcggccgcatacatggtctgcgccatgtcgtcaagaagggtgtgcagcttttcgccgaaatcggtcacctcgcggcagtgcttgtttaaaagctcgtcgccctctttaagtattaccctaagcgccatttttatatctcctttgttttaaagacactattgt

SEQ ID NO: 3346 - DNA, 17383 bp, Unknown
  16S sequences of unknown bacteria
cctacaaattcgggataataatacaaaaatttttacggcatatttacctgccgtaaggtgcgcgggagcgcgggaagcggtaaatcacgacagcacgtcggctttctttgcctttcaattttctgcttcggcatatgttaagcaccccgcttgtcagacattataaggcatttgtccgacaaatggggtgccgctgatttttaccgcggcaattcactttttgccgacggtcatcccttcgacacttcatgccgaagcataattataagtctattcgaattgcacacaatacgtcacgcaaagcgattatgcgacttttttcatctttataagaccgattatcaaggaaacaacgttccaaatcaggctgattatcgaaattatcagtgctacatgcgcaacagtgcatgtattttccgatatactgcccgaatcaagcattgtccgaagaacgtttatctgcaactgcatctcggaaagactatccgcctgtgcggacgtagaaggtctgcttcggtccggtatccttcatcaagacgtcgcctttaatcacgaacaagagcaggatcatatcgtaaagatcgcccgaacatcccccgagatgaagcacgagcagaaacgaaagaaagagcgcggcatagtcgccgacaaaagcgatcggcagagcaaaagcgaccgtgaaaacggcaaacggagcgacaagagccgaaagcgcggtcttttttgtaacgaacacatcggggacgccgcagtaggcgcaggaaaagcttatcccgaaggtaagtttttcgcgggtcatgagtttatatacgatgccgtgcacaagctcatggagcacaagatatacaaacatcgacagaaggagtccgagcgtaaacagcagataagcgccgaaattaatctcgtctacggtaaaagtgaagcggcggaatctcagaaaatacagtaaggttccggaaagcgtcgatagaagaagtgcggctgcattcagtcctacggcaacgcgcttatttcccaccgcgtcgatctcgcgtacggcttcgtatccttcgggcagttttttatatgaattcacagtgtttcctttcacagtccgatcttttcgcatcttcccgaaaagtgtctgtcggtcacgcagcaaaccgcataaaacagcgcttatcggatgcacgctttcctttttcgtcgggaagatatttctatattaattataataccaccgcgtgccgtccgtgtcaatattgcccgtatttcatgcgttgcaggcgcgattcggctttagagcatgccgcacggaatacaaaagtcccgctctgccgaatggcagagcgggaacgatgtccgttattttcaggcaagcacccgtacggtcgaaaaaaatcaaacctcgggaatttcgatctcgatctccttgccgatctttgcggaacggcagataccgtcgatgatcgcctggttgatgatgatctgcgaagtcgggacgggggattcggtgtgatttacggaagcgtcgaggaaggatctcaccttctgctcaaagaggtcgccggagccgaagatcggtattttggtctcggtgcgtgcgccgcacacgtcatgatacagagtcatgggaccaccgacggagccgttccagcaatccgtagaaggaatgcggagtgcgccttccttaccgaagattatggtgtcaccgggggtgtcgggatgcattgcccacgaaatgcggaagtcgaggattatgccgccctcaagacgaacgaatgctgcagcgaaatcgtcaacgctgaatctctctgcatccggaagaggagtatacttggggttcttcccaaagaaatcggaggtgtagccggatacggtaagcggcttcggatatccgatggcgttgagcaccatatcgagagaatagcatccgatatcaccgagtgcgccgatacctgcggtcttatcctcgataaaagtacgtcccggaataccgcggcggcggcctcctccggtctggatatagtagatctcaccgagagtaccggactcacagatgctcttgatcattctcatgtttgcgtcaaagcggggctggaagccgacggaaatgaatttcccggtgcgcttctcggcgcgtctcatctcgacagcctcatcaagcgttacgctcatcggcttctcgagaagaacgtcgcatccgtgctcaagcgcgtcgatcgtgcagcggcaatgctcgcggttgtaggtgcagacgcttacaacatcgaggtcttccttctcgagcatttcgagatggttcgtataagttcttgcatggatctgctcgtgaggtgcgaagaaatcgtccgcttttccggggattatgtcggcgcctgcgacgatctccacatcgtcaaacttaaggtactgaccgagatgcgcccccgcgatcgatccggtaccgattattcctactctgatcttcttatcggacattttattttcctcctcaatccataacggatttaagatacttcacgctctcggcaatgctgtccatgatatcgacgccgggagtggggttatcctgctctacgattatataacgggttcccgccttctcggcagcctcgaggattctcttcacgggaagaagtcccttaccgaccgatctgaactcgaactccgagctctcgtcgctgtccttgtactcgattccgacagcacggcaaaccttttccggaacctttccggcgtatccgaaatccttcatatggacgcagggaacgcggccggaatacttgttgatatactctacgggatcgacgccgccgtttgaaagccagccgaggtcaaactccgcctggaatttcttcgcgtcgtggaggctgtaaagcttatcgaggatcatctgaccgtcgtcgcagaattcaagctcgctctcatggttgtgatagagaagcggcataccgtacttcatgcaggcgtcggcaacgttctcgatgctcttgaatccctcgtccgccttgggaccgttgggatatgtatcgccgaaaatatacggaagcgcaacatagtcgcagccgatcttcgcatatttctcggcaaccgcatcgattccgccgttgtcgggattctcaaactcctgaacgggggcatgagtagacattgccttcagtccgaattcatcgagaatcgccttgaactcctcgggagtataattgtaaagagtataaggctcaacgccgtcgtatcccatctccgcgattttcttcaaagttccgcgaaggtccgctgcgcagttgtcacgcaccgaaaagagctgcactcctaccggaaatttcatgatttttacctaccttacttgattgttttgttcgtccgcagtatacacggatcgatccgattttgtctgccgtcatgcgacagcgcgatgacagctttttgcaaactaagtcgcatccgaattcattatatctcaatgaaatctcaaaatcaatactttaatcaactttttgaaaatataatttcaaaaacaaagccgccgtcatctttacgatgcgggcagctctgctttaacgcctttgtaataacgggacgcggggggcttccggtgcgcatcgcggcacaccgatctttcctgccgccgttatttctacggatcaatacttgtcgtatacgtcgtgttccgtgttttcgtcgggcttttcttccttggggtgcttatgtctgtaaactctgtacgcgatgtatccgccgagtgcgacaagcgatgcaaccatatatccgacacagcgggagagcggctgctccatggtccactcaactccgaaaagtctcatgaagaagaacgcaatgcaaaataccgcaaatgctccgagcgttacgattatctgaatcatttatgtaaatccgcctttcagtttatattgggaaggcttgccgcggcaacggactgtcctacgcggcgactcttctcgtcgggaagcgagacgctgatcttctcggcaagctcgggaaattcggctttgagcgtcttattagcaaaatcaaggatgatatttccgccttcaccggaggaaacacgtccgagaagaaggacatgcttgatatcgtagaacatcgcatagtatgcgactgcgtatccgaagtaaacgcctatcgtttcgtatatcctgcgcgcgccctcatgaccctctgccataagagcctgtacagccttcagcttttctgcgggacttgcttcgggatcaagctctattcctgccgcgggagcaagctttataacgctgtcctgcgagaaatacttgacgccgcatccgtaatcgccggaccactcatcaaccattgcttccttattgaagtccacgggaacgaaagcaagctcgttgatccagcccgtgatatttccggcggtatcaacgtatccgcccgcctcgctcgtacccatggcgatgccgagcactccggtatcctcaaggctcattgcacccgcaagcgcggtgacgtcgccgtcgtttgcgacctcaacgggaatcttgcatccgagctcgcgtccgagctcctcggcaacatcggtatacatatgcttgacgtgtttctcgaaatcctcgtcagacaccttgaggaaaagcgacgctatcatgatcttgttgtcaacgtaaactccggcggaggatacgccgatgccgtcaacgcgcggcatatgtgatgcggcggtcttcattgcgtcgaggatgccctgataatgatacgaaggatcggaattcgtcttggggaaccatacgacctcttcggaatatacgggctcgccgtcgatcacggcgctgaccttgcggtcgcttccgcctgcatcgaatccgatgcggcagccctcgagatggcgtccgacgggctcggcagcctcatgatccttcggagccttgtcaagcggaacggattccacctcgaaggggcgctcgtaaacacgcgccataaatcctcggtcgaaatcgcgcagtccgccgaaatcgtaagcctccttgatctttccgccgatcacgtcggagccggcgattatgatcttgtatccgccgcgcgcccaaagcagagttttcactatacgctccgccattgcaaagttatcgtcgtcatgtccgcagccgtcctcgaacacggtcatctcatatgtcgagatatatcccttgttgcgttcgattccgattacgatcttcttgccgccgctcttttcggcagcctcctcgaatgcccgaaattccatgaccatgggggcaaacccggggtcaagcggtgcgtttaccttaagcttcataaatggtgttacctttcttgatagttctctttatattgaatttttcatcagctattacaatgtccgcgtcgcatccgaccttgagcgagcctttgttgtatgcctttatcgcgtgtgcgggcgtcaggcttgccgcggctacgacctcgggaacgctgaggttggtgtgctcaagcacattgcgtaccgcgatgttcattttgagcaccgagcctgcgatagttccgtcggcaagacggcattcgattcctttgaggtatatgggctgtccgccgagggaatactcgccgtcgggcatgcctcccgcgcgcgtgcagtcggtgatgaggcagagtttgcccggcttcagctttgctaccgttccgaacacgccggggtgaatatggaatgtatcgcagataagctcgaccgtaacgtcggttgcgaaagccgcgccgaccacgccgggatcgcggtgcgcaagaggcgtcatcgcattgaagagatgtgttgcgtggcttacgccgtcggcgaccgccgaaaccgcctcttcgtatccggctgcggtatgtcccatggaaattagaatatcggaattgcgtgcgacttcctttatcgcttcgtgtccctcatccatttcgggagcgagagtcacatgacggattatgtccgcgttatcgagaaggaatttcgcattcggcttctgaatgcactcttccttctgcgcgcccttcttcgacggattgataaacggaccctcggcgtgcacgccgagaatttccgcgccgccccacgtctcggattccttcttcaggctgcgaaccgcattgagagcggcgacgatctcctcctcggataccgtcattgtcgtgggaaggaacgacgtaactccgttttcggcaatgccgtatgccatcttgcggattccctcgggatttccgtcggacgtgtcctcgttgagatatccgtgaatatggatatccacaaatccgggacaaacgtaattcccctgtgcgtctatgacctccgctccctccgggatatctccggcgttgatatatccggaaatctgcccgtcgtaagcgagcgtcttgccgtcgattatcctgtcgggcatcacgatacggccgttctttatgtatttcattgcatattcccccttttaaagcatgcaattttttacgtttttcacggatttttccgaaaatgccttccgaaaccgccggaaagtccgttcatcattcaattatagcaaacaaatcaaaaaaatacaagattttttgtgaaacctctttatttatatcggcatttgtgttaaaatacataaagccaagttaccgtgaaagaaaggtgattttatgaattccataggaatcgaaatttcaaaaaacggcattaccgtaggtgcagtccgttacgatcggcgcgcagagcttctcgggaagactttttctccgatcctcgacagtgccgaaaacaccctccgcactgctgccgaagcggcagtctcgcttctcaatgaagtatctcttaccgcagatgatatcgactatgtcggagtcaccgttgattccgcggtcaaagacaatatcgcatacgattcggttctcgggaagaaaaccgatctctcggcaatcctcaagtaccttcccgtaaagaagcttgtttccgtaaaaagagcgaatgctcttgcgatctgcgagcagattcagacatacggcgccctctattcgatcgcttatgtggagcttgacgaaaaggtcggcttcggtcttcttatcggcggcaagccgtacatcggcgcgaacggtctcgcagcggacattgcccacaccaccgtacagcgcggcggcaaaaaatgcgcctgcggaaactgcggatgctttgaagcatatgtttcgcttgacgaatacctcaacaaaagcaaggatcacgcgcagtatgtttcctacctcgcgtgcggcatcaccaatgtaatgaacctgttccagcccaatgttatcgtggtcggcggacgtgttgccgagctcggcggcgacgagcttctgaaggaattttccgagctcgtacacaaggaacagtatgcgcgcaattcggtcaacaaaacactgattgcgcttcccacggcaggtcccgatgccgcagtaataggcgccgcgcttgcgggaatctgaacggtctccgaaaaagtatatccccgctcgggagcgagcggaaaaatataaacaaagaaggtttgcaaaatgatagtcaaagtatttgaaaacgaagaattcgcaggccgcgcagcagccgatgcgatcattgcgcagatcagcgcaaagccgaacagcgttctcggacttcccaccggaagcacccccgttcccacctaccgcgcactttccgcagcatgcgcggaaggacgtgtttccttcaaggatgtaaagacgttcaaccttgatgagtatgtaggtctcaaccccgctcatgagcagtcctaccgttacttcatgaacgacaatcttttcaaccatgttgacatcgacattgccaacaccaatcttccctgcgacggaagcgacctcgatgaggctaccgcagcaaagtacgatgagaagatcatcgcagccggcggaatcgacttccagcttctcggaatcggcggaaacggacacatcggcttcaacgagcccggcggagccatcgattctctcacccacaagcagaagatcaccatggctacccgcgaggcgaacgcacgcttcttcggcggagaccccatggctgttccggagtacgcagttaccctcggcatgaagggaatcatgaacgcacgcaagatcgtgctcatcgcttacggtgcaaacaaggctcaggcgatccacgacaccgtttacggcagagtcaccgcagatgttcccgcatccattcttcagcttcatccgaactgctctatctacgttgataaggcagcggctgcaatgctctgatcgctttttggaaaatcacaattttctcccccgcttcggcgggggagttttcttttgcccttccccctgtccgggctgcgttctgcgtgcaggtctttttgatcgttcctcgcacggtattttcgggggaggcaattcatcgcgggtatgcacccgagcgcgccgaccggatttttgcatccgtaacgtgcgacgaagcatcgcggtcggcgttttttccgcaaattctttcacgccgcaaaagcaaagcgatccccgaaaacgggagtcgctttgcttcattatattcggttatttatctttccgagtgttttttctttttgcccgagaataccgatgccgcagccgccatagcgctcatcagaagcgctgcagtcatcacggcggaagttgtatttcccgttccgggcgctttcacgtcgggcgcatcctttgcgggggtggtatccgcagtcttcggagtcagctttttcgttacggtatccgcctctgctatctcctgcgatgcttcggcatcggcgtaatatttgccgcagacttcgcagtaccaatattcgatattgccttcgctgtcctcggtcgccgccctcgcgtcgatgtgtacgagcttgtcatgtccgtcggggtcggtttcgccgtagcttttaccgcagatatcgcacaccgccttttcggtgcaggttgcccttccgcccgtgtgaccgtccacctcgatcacgtttccgcgttcaagaagctcatcgcatccggcgcagtaaatgtctccggtgtatccgttttcggtgcaggtcaccgtgacggcatcgcggataaccgttccgccgtcgtggtttgtttcgtcaaactcgccgtatccgttgcggcaaatttcgcagatcgccttggtatggcatgtcgccgtgccgccgatgtggttggagatcaccttatcacagaagtcacagacgtggtctttatccgcatctttgtgattggagattatcttttcgcaatagtcgcaaatgtggtttttgtctgcgtcatcgtggttagagataatttttttgcaatagtcgcagacgtgatctttatctgcgtcctcatgattggagatcgccttatcgcagtagtcgcagacatgatctttatctgcgtcctcatgattggagatcgccttatcgcagtagtcgcagacatggttattgtccgcgtcttcgtgatttgagattatcttttcgcagaaatcgcacacgtggtttttgtctgcatcctcatggttggagatcactttgctgcaaatatcgcagatatggtttttgtccgcatcgtcgtgcaggcacgcatatccgcactcgctgcacacgccgttcgaccactcatgatcttcactcgccacgatcacagcgccgcagcagctccatttttgctcgtgaacgtaagcggtccttgtcgtccactcctgcgtaccgccctcatggttggcggagtccttttcgccgtaggactgatgacagtactcgcatattgcctcggcggtgcaggcagccgtaccgccggtgtgcgcaccgtatccgtcctttgcggaatcattattcttcacatcacaatcggcgttgatgcactcatgccaatgatgcgttgcatcgtactgccatgcctgatcccaactgtgaccgctcgcctgaatcggctcgtttttttcaaagccgcattcgtcgcaggtaaatactctgttgccctccgtcaggcaggtagacggtacggtcacctttccattgtcccaaacatgagggttctcctcgttccttgcatcacagcgggagcatttcttccaatgagtgtccccgtcatgatgccatacggatgcggagaaatcgtgccccaaagccgcgattgtgccgccgcagaccgagcaggcaacgggatccgtgcaggagagctgcgcggtgttgccggagtggtcgcactccgtccatatcgccgtcgccttggcattctcaagcatcggcttcgtataatcaaaccctgtccagctgctgaaaatatatcctgttttgacggggttttcggtcggaagcgtcgccttctgtccgcgcaaaattctctgcgcatccatcgcgctgccgccgtcggtgtcgaaggtcagataacggcatgcgctgtcatggataaccgctccgccgtatgtcacccttccgtaataaatgccgccgatcacattgcctcttttcagattgaccctgccgttaaaggttccgccttttatggttccgccgtcattgatcacagcgccgtcaaatatgccgccgaaaatgaagccttgattcgtcacctcggcgccgataccgactctgtccgccgcggtaaaaccgccggtttctccgatgataagctcccggacaaatttgccgccgtacacaagcagctcaccggacgacatcttgatatccccgatggctccccgtgtgtcgcagtcggttacggtcagcgtgccagagtttgcataaagtttcggtttgttcgttccgcccacgccgcggatggcgtatccgttcaggcagatctgcaccccgtcgggcataaaataatcggagttggatttcagaagcacattgcccgtcagatagtagtttcctgccgcagtcggaagcgaatccgtcattgtccaaggtgtccacatgagcggagaatgcaccgtatgcccctccgccgcattttctccgccgcagacgcagtgagagtggatctgactttcgatcacgaccttgcgtgaatcggtgctgagtgtgctgagatcgtcgccgggcctatatgtggcgacattgccgttcttgtcggtggcggtgattttcgtaaagccgcttatggttccgaaggtgggaccgcgcatcacgatatccttggactcaagctccaccagactgttttcgaaagtcggttttgcgtaattgtagccggagaatgcgtattggttactttttgccttgaatatgctgtttttaacggaaaaagtcgtgtctccgccgtctaagcatatggttcttcccgcttgcaaaacatccgactctgcataaaccacgctgtctgtgcaggtgattccgccgcagccctgcaaagctgcgtaatagtaggcatgttgagcatctaaagacgaatagattcccgcattaacatacgagttttcgattgagatcctaccggtggcaaacacacacgcgccctgcttcgctttctgcacatttccttgtcggtctttgccgacgataagatccagcgccgcgttttttacctttaagtcggacacacggatcacaacgctgtcgccgaaattttgcatgcctccgatcaccgtgatatctaccgagcagttacggatttcacattttcccattgaaatggcataagcgtacttatacccgcccgtcgttccgggaagcgtgaccgtcaggctgtcctcacggctgtttcccttgatgagaaaggaactgcttgaggcggagatcgcataaatgttcgtcttcttatcgctttcgtccgcccatttgatctcgttttttcctttaaggatcagcgtgtcaatgccgctgcggatttctatggctatgttttcggtcgtcacgctgattgtggcgttttcgagcgtcagcgttttggcggacgcgtcaaaaacaacgctgcccgaaatgccctcgcccgtgatgcttccgcccgccgcaggcacggcaattccgttgacctttgcggagacctcatccgccgccagcactgccgtcggcacaaggcatatcagggtacaaagagtgagaaaaatgcttacgatccgttttttcataatttctcctatcgtttcaagaggatttctttcgtttcggaagaagcgctatgatcgttcccgtgctcacggtcatcagtgcaatgcagatcatgagaacacatccgtctcccgttccgggcgctttcgtatcggacgcatcctttacgggggtagtgtcagcagtcttcggcggcagctttttcgttacggtatccgcatcggtgatttccttagttgcttcggcgtctgcgtaatatttgccgcagactttgcagtgccaatattcgatgttgccctcgctgtcctcggtcgccgccttggcgtcgatgtgttcgagatcggagtgtccgtcggagtcggtttcgccgtagttctcgccgcagagatcgcacactgccttttcggtgcaggtcgctttgccgccggagcagtcgttggtttcggagccgttgcagccgtccaccgtgcattggcgggtgtgcgtgccgtcgccgtttgatgtccattcgccgaaggtatgcccgtcgtttaccgtcacggtcatttcggcggtgttgcccgccttgtcggtgacaacgatcttctgcgcgccgtctgcaggagcaagggtaaagctgccgttttcgtcaagcgtgacctctgtgccgtttacggtgacggtgtccacatacttctcgtcaacggtgaccgtctgcgcctcgcagtaggtcttgccgtcctcaatgccgccgatgaccggctgaatattgtcaagcgttacgcggtcggagcgaaggtatgttatgttcaggctctcatcaacgagcattgcataaacgatatattccccgtttggatctatgcaaaacggctcctcatacccgccgaatacgagagattgaagctccgcctcggaaagatcccgatcggtcaccaaataagagacaaacacggttccgctgttatcggctgcgtttatcgtcacctcctgcgtatccttaaagaacagaccgaaggtgagattgttcacgaaatcctgccatttatttgtgcctatgataatttcgcccgtcggcttttcgctgtctttccactgtgcggtgactgtcatattttcggcaggcatagtcgtgggaatttccctatcccaaccgataaaggtgtaaccttctcttgtcggggcttcgggagtagtgatctgcgtgccgtagtcctgcgtaatcgaagcaatgtcactgccgcctgcggtgtcaaaggttatggtgtactgattgatttcccaccgtgctttaagcgttatattctcagcaggcatggtttcgggaatttccctgtcccaaccgataaaggtatagccctctcttgtcgggtcggcaggggcggtgatcgccgtgccgtagtcctgtgtaataggtgcgatctcgctgccgcctgcggtgtcaaaggtaattgtgtattgattgatttcccactgtgcggtgacagtcatgttttccgcaggcatggtcgtgggaattgccttgtcccagccgataaaggtatagccctctcttgtcgggtcggcaggggcggtgatcgccgtgtcgtaatcctgtgtaatgggcgtaatttcactgccgcctgcggtgtcaaaggtaattgtgtaccggttgattacccactgcgcatacagggtgcagttttccgtcttgtcataccagcttgtgcctttgccatcgctgttaccgtagcatttgccttcaaccggggcatcataccagccacggaaaaagtaaccggtgcgtattggcacaggcatatcgccgagctgttcgccgtataagacatctatagtttttgttgtcacctcgctgccgccggtgctatcaaaggtcaccgtgtaggtgtccgctatccatttagccgagcactttattgtatctgcagtcggctcagaagtttcccatccagcgaatgtatagccggttctttcaagcttcgatgcatcgggaagcaagagaccttcatccttgtaataaaaatcctttggcgtaaatccgtcggcccaattgccgccgttaagatcatactcaaactgcaccttttctcttgcgacagcggtaacggtaaacagtctgtcggaggttatcagcgtatttttcatttcgtcaaacgtcatcgtttgggtcatgccgtcagtcacagccgcaaaggttttggattttgtgagatctatgtttctgcaaagctgcccacactgatttgacccgcaggtgcggatcacgccgtttttatcaagcagtacgctgtggtaagctcccgctcccgttgcggcggcaataatttcggcaccgtcgataccgtcggttactgcaagaagcttcgaatcactcgattcacttcccgtgtctcttccgagctgaccgtgtccgttgataccgctggttcttacattgccgtcggtatcgatcactatcgtagtaccgcctgccgcaataaacttcgcagcagttgccccctgaagatcggctttcccgaatacgctgctcgacatgccgttcgtttctcttccgagttctccgtagccgtttgagccggccgtccacacattaccgctttcatcaagcagtacagtgtagcggcttcccgccgctattgcggttattttaaccccggatatgccgtcggcgaccttttcaaattttgaatccatgttcttcgcagtctgtctgccgagttggccgtgaagattattgcccgctgtccacacattgccgctttcatcaagcagaaccgtatgagcagttccgcccgacgcaccgattattttaacattatcaagaccttctgcctttttgaacaccgtattgggcgtcccgctgttcacattttcgcttctgccaagctgaccgtcgctgttatagcccgctgtccagacgccgccgttttcgtcaataaggatcgtgtgatactgacctgcggctaccgccctgatttttacactgccgtcgccgacagtgacctttctgagggtctcgatctgggttccgtaccaatatttccccgcattttcatcgattccgagcgcgccgtactggttgcagccggcagtccatacctcgccgttttcgtcaagtacaacgatatggtccacccccagggcgacatcgatcgttttcgcggaggtgctgacctttgtaagaaccgagtcctcatctacataaaaatccagcgttcttgcgagctgcccgcgtaaattatctcccgccgtgtaaaggtttccctcatcatcaacagcggcagtatttgcggctgatgcaacaaccttctttatagccgtagcagcggtaacgccgtcgagcttatatccctcgtccggcttgtattgtactctgtcgccaagcgtcgttccgtttgcgaccgaaacgacaacgctgtcactccagttcgtaccgtctgttgatacttttccgccggcagcagctttcaccgttacattgtgcatttcgtccgccgccagcactgccgtcggcagaaggcagagcaccatacaaagggtgagcagaatactgagtattcgtttcttcattttgcattacctccgttttcgtatatgtcggatcagtcaagtgctataatggttatgttgtaccgggcgtccttaaaattcgtatcttggagcagcatggttgtgtattgaaatgtcagagtaatatcctcttccgctgtgtatatggtgttatacgccatggtcagcttttctgtttggtcggccttcggcgcagtcacataggtttgcgtctccaacgccatttcagagttatatccgtcgaagagtgctgccccgcatgctttgccatcgctcttggcgctcactgcaatcgttccgctgaacacaaggctatatgtatgcccttttgaaagggtgatcttattgcttgatgcgttataggagatcaaccctccgcttttctttttcaccgtgaacggaagcgcttttcccgcgctgtacacactgccgtttgcggcaaaatatccggcgcatgatccgtctttgccgtctgcaccttttaacacggacagatcatatagattcagccaaatggtctcgccttcgtatcgccattgcagctgattgccgtttacccgaaattcgggagttctaccgtcttcgccgtttgtgccgttttgtccggagggacctaaaatatctgcgagagccacaaggttttgccactcgccgcccttgtaacgccattgaatatacaaatcggtcttttggatttcaatttccttaccatttgtaccgtcaattccgtttataccgtcttttccgtcggtacctgccgccttgatgccggtgtcgatttctccgatccaccagttgccgttttcgccgataaaaggtgttttaccgtctttgccgtcagagccgttttgtccgtttatgccgtttgttccgtccttaccgtcggctccgtcttttccgtcagcgccgtccttaccggcggctccgtctttgccgtcaagacctttcagaaccgaaagatcgtacaagttcagccatatttcatcgtcgacataacgccattgcaggatattttcgcttacgcgaaattccggagtttttccgtttgcaccgtccgttccgttctgtccggcggggccctctatatcggctatcgcaacaagattttgccactcgtcgccctcatatcgccactgtatgtgggtttcggctcgctgtacctctatgtttttggcgttaattccgtctgaaccgttggcaccgtctattccatccttgccgtttttaccgtcggctccgtctttgccgtcaagaccgttaataccgtcttttccgtttgtaccgtttgttccgttcttaccgtcggtgccattctcgccgttgactccgtccttgccgtttgcgccgtcttttccgttaattccgtcagcgccgtcttttccgtcggtaccgtctttaccgtcgataccgttttttccgttgattccgtcagcaccgtctttaccatctgtaccgttctttccgttttctccggcagcgcccgtaagctcggtaagcaacacaaggtcacgccaatcggtttcatcgctgtatttccactggatcgccgtgccgttgttccgcacctccggcagtgcggtgtcgtttttttccgttttgccgcatccggcagcaaatacaatgcaaagcacggtgcaaagtgcaatggtgatgcaacagattcgtttcttcatttctcattacctccgttttcgtatatgtcgattcagtcaagagcggttatagtaacagagcctctgaatgaaagcagataggttttgtaatcaccttgctccagcgaaaatttaagttcaacatcgtttttcgcgccggtaagg

SEQ ID NO: 3347 - DNA, 12898 bp, Unknown
  16S sequences of unknown bacteria
ggaattatggcaactcgagcttaactcctgttgcacttagtttgacaattcactccgattccaagagaaaaacaggaggatggtattatggatctgaaagcattcaatcagctgagctgcgggctttatctcatcagcagcgcccacgaaggaaaagaaagcggctgcatcgtcaacaccgtgcagcaggtgacggcagagcctcctcagttggcggtgaccatcaacaaaaacagctataccggagaattgattgcccagtcgggggtgtttgaagccgccgtgctcagcaagaaggtggagctggagcagatcggccgcttcggttttcagtctggccgggatgtgcagaagtttgaagggatctcttgcctgcgggacgaagcaggggtgccctatgtgaaagagggcatgacggcccgcttcttctgccgggtcacagggcagatggatgtgggaacccaccggatctttgtgggccaggtggagcaggccgagtgcctggaaggggagagcatgacctatgcctattaccatcaggtaaagaagggcggcactcccaaagaggctccttcctatcagggagaagaaaaagagcagccggcgcaaaagggctggcggtgcaaaatctgcggttatgtgtttgaaggcgaaaccctcccttcggattttgtttgtcccatctgcaagaagggaccggagtacatggagcctctggcctgataacggcccttcttcgcccttttccaggtctggacagttttcctgggctgtggtagactggaagcaaataagccccctcagggggcgggaaagggtgaacagggatgaatcagcagcgtctggcaagagtacggcaggccatggcggagcagggcctggagcagatcttggtcacggctcccgcttcggtgtattatctcaccggtctgtgggtttcccccatggagcggatgtgggtgctgtatattacggagaaagactgcgtgctctatgccaatgaactctttggcgtggaagagcaggagggagcggagttggtgctgcacagtgacagcgaccagcccaccgcggccttggctcagcgggtgcttcccggcaagctgggggtggataagttctggcccagccgctttttgatcgatctgttggaagcgcggagcgatgtggtgcctgtccacggctctgcaccggtggatctggtgcggatgtacaaggacaaggaagagcagcaggccatgatccatgcctcccaggtgaatgaccgggtgatggagcaggccattgccgctttgcgggaaggagtcaccgagcaggagatcgcctctttggtggaaaatctgtaccagaaagaaggaggcaaccggggcgaaggggtcattgtcagctttggcgccaacggagccgatccccatcacagcccggatcagacggtgctgcgtcagggcgattcggtggtgctggatctgttcatgcccattcgccgctactggtgcgacatgacccggacggtttttttcggccaggccgatgaggagcagaagcgggtctatgaagtggtctgtcaggccaatctggcggcagagcaggtgcttcgtcccggcgttcccctgtgtgaggtggatcaggcggcccgcaagctcattgaagaggcgggttacggtcccttcttcacccatcgcctgggccatggatgcggcctggagtgccatgagccaccggacaacagcagcgtaagccaggccattgctcagccgggaatggtcttttcggtggagccgggaatctatctgcccggccgtttcggcgttcgtatcgaagatctggtgctggtgaccgaagatggctgccaagtgctcaatgcactgtccaaagatctgcgcattgtgtaattttcatggaatacagcaaaagagagccccgttttgggggctctctttttgttctgtatgtatgggatataggaggatcaataattttcgcagttgagctcgaagaagctctggggatgggcgcaggtggggcagacggcaggggccgaaagaccggtgacgatatgaccgcagttgcggcattcccacaccttgatctggctcttctggaagacctgagcggtttccacattgtgcagcagagcacgatagcgctcctcatggtgtttttcaatggcagcaaccagacggaatttggcggccagctgggggaagccttcttcctcggcggttttggcaaagccttcgtacatatcggtccattcgtagttttcgccctgggcggcgtggagcaggttctgggcggtgtctcccagccctcccagctctttgaaccacattttggcgtgttcacgctcgttttcggcggttttcaggaagagagcggcgatctgctcatagccttcctttttggccaccgaagaaaaataggtgtatttgttccgggcttccgattcgccggcaaaggcggcggccaggttcttttcggtctgggtgccggcataggggttggttttggccggttgttcgatcttctcaaaggaagaggccggctgacggcagacagggcagacaaaatcagggggaagtgtttcgccttcgtggatgtgtccgcatactttgcatttccattggctcataatctgagattctcctttgctgtcacattcattgcaggggatgcgttccagaagcttctgggcggcttccaccggaaattggggagagggaggggactgcacccatttttccaacagatcccgggcgtttttgctttgggggagcatataaccgctttcacgcagcagatcttcgttcaccagccgggccgatttggccagggcggtcatcagccggtacaggccgtctatttcggcgccttctgccagctgcaaggccgctttttcctctagagccttgttctgggccagagcgaacgcgggagcacacacttcctgggttttcggctgctgtggaggatattcggcgggcaccatggaaatggctccgctggggcaggcgtcggcacaaaggccgcagcccaggcattttttcacatcgatgatgctgttctctgtatcggtggctccggtggggcacacatagaggcacaggcagtctttggtacaaagacgaaggtttcgcacagcgtattgtttcattttcccttcctcccttccacaacatcaaatttccatgcaggaactttgcacaccgggcaaagttccggggcgctgtcccccacatagataaagccgcacaccgagcaaacccagatccgggtgccttgcaggaaggcttcgccttctttctgatagcgcttgagaagggagtctgcaatgcgggtcactttttcaccccagacacagattcgctgggtgcctcgatcggcttcggctttggcggcggaatgaagagtgggatagccctggttcaggtcctgggataccagggaagacagatcctccagggtgttttggggggccgcaggcgcggcagcggtgaagaagtcggccagctgctggtaaagagcagcttcttcggcctgatactgtttttcgcagccccgggccaggttggagcatacggccgccagaacgccgggagaaagctcttccagatcctcatggattaccggcatgggagcctgaggtttttcctccgcgccgccctccggggaaaaggaagccttgtcggctccgcacaaaggacagacccaggagtccgggaaaagggaaaaggggacgccttccttctcctcgtcatagacatagccgcaaatttgacagatccatttgctcatattgttcctcctttcaaggtgtatcgtctttttagggtgtgatggagtcccggtgtgctccctgctccatcttctgacggcactcatcacagatgtagatcagtttcaggtcataggacaaaaaggggatgtccagctgctgctgtagttgatcggtgagatctttcaggtgcagatctgccagcttgccacagacctggcagatcaaatggtcgtgacgctggggacggtcatagcgatcgggcatcccttcggcggagattttccgcaaaaggccgctttgacacagttttcccaggttgttatacaccgtggccagggccacagtggggtaaatctgccgcagctgaatgaaaatctgatcggccgtcatatgacagccggaagattctacaatttgttgaattgcttgtgcgtattttgtcataaaaacctctggattagaattggaattgttctaaaatgattataggcttttctgcccaggttgtcaaggaaagaaaaggaagagaagacgaaaaaagccccctttgctgggccagggccaatggcccagcaaagggggcatatggatacacatagagcagggggaaaatgcagaaagagaggaggtttatggtggttagtgcttggcgttgccctccacagcggcggttttggcgctgagatcttcgcaaagattccgggaggcaaattcgggattttcaggcagcagcagctcccaatccaggatggggttcagctgcaaggagagggaatcggtctgcagccccaggatatggccgccggtggtcttgtcctggctgaggaagtggaagtgccagccggggaggttgattccttccacatagggcgggcaatataccgcaatgacgctgcccgatacattctggtactggaattctttctgatggctggccgcttcggacagggtgggatagggcttttcgcaggcatagcagctgcggacatgcatttttccgaaagtgcctgtggccttgagcatataaaagatgttggggtttttctccacatagggagccagcttttctttcagcacttcgatggaggagatgttctccagcttttccacagggacggtggtgtcaaacttggctactgtgccaaaggccacaccgtcttccggggacatcacggtgacattgccatcggctgtggcccggtaggccacgccgttttcaaagatggcttcgccgtccaggccggtgtaggtgccgatgccggtatcggcttctttgaggaaggaatctacggatgtggtgcagtcaaaattgcccagcatcagggcattgagggtagaggcttggatcattttgatcataataaaacttcctttctggaatggttaacaaaggggatggattattgggccgccttggtagagtcggcgggatgccgtttgagcacccagcggaccatgaaggggcaaaggatgttggtgacagccagcacaaaggccagtatagccacggcgctggtggtgtactgttccagagcggtgttggcctgggcggccatggaagggatggcaagagctacgccggccagcgatgcgctggccaccgaagcatagcccgggcggtggagcacacggcgctcaaaaatataagagggtgtgatgacgatgatgaagtacagcacgctgagcagcagcccctgagggagcattttgaaggcgtcaaacagattgatggtggagccgaactcaaagcccaggaagggcaggatgatggcgttgccgccggcaaacaccttgcggatatcttcatccaggttgcccaggatcatgcccagcacaaaggggatgagcaaagagacgatctggagcacctgggccatgccaaagccggatgtgccgaagaaccccaggaaaagcaggggaagcagaggcatggagcagatgagcatcacaccgaagctggccttatccgctttgtcaccgaaaggctgaatgatgcccatatacaaagcggcgttggcactggtgacggcgcagacaaaggccaggaaggaaatgcccagaatgccgtcataaccaaaggccgcatagaacagggcgcacagggcataagcgatgaccaagcgcacaaggatcagcagaacccctcggcgcagtgcgtctttcaggtctcccagcttgagggaagtaccggtgcaaaacagcatcagcccgatcagcagcatctggccgctggaggagaacatatccttcatggggtttcctagatagttccacaaatcaaactggaaaatcccttgggccactgtggtgatcagcgcgccgatgatcaagggaacaaacatggttccggcgggaaccttttgcagggctttccagatgttcacattctttttttctgcactcatatcaattcctccgatccaacctacttgttgtttctggggcttatcatagtctcaaaacctggactttgcatggggctgatgatataattttgaatcaagcatttgtgctgtcagcacaagaggaggaaaagtatggattgggacaggctgctgcaggattttttgcgggatgatcgtctggaaccgttggtgaaagatattggcgccatgctgggctgtcctcttctggtggtggatattgcctttcatatcatggccagctatgtgccggaagggtttcgggatggggtgtttgaagcggccctgggccggggggagatcacttatgaagtggtgtccgcgctcaactgggatgcaaggcccgatcccacagacggtgcatttctgccagtggaggacagtgtgtatgtcagaagattctccaccctcaacagcggcggaatgcgggtgggttacctgatctgcgtggatgtgaacggagatctggcggcaaggcccaagggagattttctcaggctggaagccatcttggccaagcagctcttttgcctggagcggtgggggcggacctacggcaccacagcggaagaagtgctcacccatttgctggacggcaaattttccggacgggctgctttttacacccaggccatgaccacccggctgatcaattaccacccggcccggctggtgctgatcaatctgggactgtatcgcagcttgaatttccgggatgatatgctcaagcatgaattgcagagggaatttcctcaatcgcctccctttttgtatcgggatgaagtgctgctgcttttggaggagccggagatcctggagccgctggaggctctggccaggcaaaacaggctgcgggtggtggtcaccgatccttttgaggatctgtatctgcttccccaggtctaccaggccgctcaggaagtgatgcagtatctgtttacccatcgggaaggggcctttgtggtgcaaaccggccaatgccgcaatttgatgcggctgcgtcagctggcccaacggccggatttcatcgatccccagatcaaagaggtggccgcttacgatgagcgccatggcacacagttttgtttgacgctgtacacctattgcatctgccatcattccattcagcagacttgcgaaaggctgtttacccatcggaataccgtactttaccgactgcggaagctgaaagaggattttgggctcagactggatgatccggaagagaccatgccgcttttggtgtccagtgcgctggctcttttgcaaagtcaccaggatcagctttttgtccgggatttttccttggggcccggggcaatgggaggggaattccaggaagaatgtgaagaaaacgggcagaaatgacagagtgccttggtggtattggcaaaagtaagccggtataatagagaaaaacagccgatgaggaggaagtatatgagtttgggaaaaagtctgtatcaggcccggaagaaaagcggtctttcccaggaaaatgtggcagagcagctgggagtcagccgccagaccatctccaaatgggaaaccgacgagactttgccggatatccgccagtccaaaaaattggccatgctctatcatatgacgctggatcagctgatcgaatacgattttgatgagaatcaggcccgggagatgatcgacagcatcagcgaggagacccaaaagaaaatcgattggaataaggtttggagcagcaaataccctgtgctggccacctaccatgaaaaagttcgggtggaggactatgcaccggccctgggggagatgatgacccggctgcaagtggaatacggctataatcacaccgatgcccttttggtgctcaaggacatcctggcccgggtgtggaaaggccagctgtaaaagaagcagaaaagcctgcaaactctgggactttcagagtttgcaggcttttttcaggacttccggtttctttccagaaaatcttggatggccgttaccgtctggctttgctgctcttgggaggagatgatggcaggcggatcacctttttgagtcccatagtttccgaactgggcatggtttcccccttggatctccaccacattttcgctgtaatccagtttggcttccacgctttggttgagagaaccatagaccgtgagcgcctgctccacaggatagtctccgtaaagataggctcccagcagaatcaagccgtccacctgctggggatgctggctggcaaactgagaggccatggccccgcccatggaatggtcggccagataccaatgttccacatcgggaaattgctccatcacatcctgagcggcatcggaatcaaaaatggccatgtggaagggcatatccaccagaatgcaggtgacgcccgtccggcggatctgatccagcaggggcagataagcgatggcctccactttggctccgggataaaaaatcaaggcggtatcgctgggggtcgatggggacaagatggtcaggttgtcctgctggacgatgttgtctccctgggagagaacggacacagccaggtcttcggcccggtaatagtcggacacataccagaaaaatccgccggtcagcagtaccagcagaagcagcgcgcctaaaagcaatcttttaggccagcactttttctttttcatcaaagtttattcccccttttgttctttggcctgggccaccacctttcgataggggccgatgatggcgttggtcatctttccccgggcctttttctgcaccgagggaatggccatgagcgttcccaccaggcgcatttgccagatgcgcttcttctgcttctgggggaaatcgtagatgccatgggatttataaaactggtgatcggctttcatcagcccctgcatgatgtagatcagatcccggaagatcttcatgcctcccacgccgtaaaaattggccgggcgggtcagttttttctccatggcaaaggccaggttctgggccaggctctggatatcctctttggtgtttccctcatcggtggccacgccgcacaggtagttgccgcccacttcgctgcgcccttccacgatcatgcgcagattgctttcgtactggtagtcgccccggatcaggtaggcgatgggggtgccgtgggtcacggtgcggtggccgttgcaaaactgccggtcgtcaaagcatttgaagctggaatgggtgtagtgctgggagatggtgaaggcgtagacgaatccatcggccgtctggatggtttcccgaagaaaacggtcgaaaccatcctgatagacgcactggccggtgatggcgcagccaaaacatcccaggcatcccccggcaaaggggaagtcccgcaggttgaccacccggctctcatagggcagggcggcctggaagtcggcgatcatgccttgaagactttggtcgtccttggcgcagtttgtgacgatgaccacatctttttcccggctttttggaacaggggaaagggaaggctggtagaggcggggcggatgatggggtgctttgggagagagggtgacaatagggccatgggcacaggaaaagatcagctggtcgaaaaacattcgggcttcccgctgtcctttttcctggagcagatcctccatatcggccgacagcccccggattactttcattccaaagtccaaacagttttcctccacataccggtgagcggtcacatcgtaaaaatgtttggaagtggtgatctgggaggcgaatttgccggaaagatccaccccgtcggctgcgatcagctccatcagccggtgaagctgatacggggcgatgaaggtatagaccggatagcagaacaaaaccaggtcagcttgttccagggcctggcgaaccggggtaaaatcggattcatagcttttgatgcgctggcccacggggagaaaggtgaaggcgtgctctgtatgaagggcctggagatacagggccgtttggacggtggcagagtttttgcctttggggctggcgtttaaaacgagaatgttcatagagtttcttcccatttgcaaagcagttgacggtaccaatcccgctggaattgagcggcggcgatgccgtattccaaggtgtattcctggaagcggaaaacggtctcccaatcggttccagggggaagggggccttctttggcctgctgaaagcgttgccggatggcctggaggatggaagaagtttcttccatctgacggatgtaattccggatggcggcctttctctcttctggctgagccagtccaaggaaaaacagatgggccagctccatgtttttcaccttttccgcctgcataggctgggcgacccatgcggaaaaagcctcccggccagatggggtgatggaaaagacctttttccgccgttttccttgaaggctggccgtgggggagacaaagccttcccgctccagcttgctgagggccgtttgcacgctccccgcgctgtgagagcagatcagggccaggttttctttgatgaattgctgcagctgataacccgtcatgggggatagcatcaaaagacctaggatcaggaattccatgggcacctccagatatatcgaatagagatattataaaagagaagaagaggccggtcaatgagaaaataaaaaaatccgaaccatccacagatggttcggatttttgtgcattggtggacgataagggattcgaaccctcgacctctgcgatgcgaacgcagcgctctcccaactgagctaatcgcccttacagaaatgcaattcagcaaaaaatattatatccttttcgcaatgcgttgtcaagaaaaagaaagaacgggagaaaaggaaataaagtggagaaaaaaggcgaaattatggtataatgcttggtagtttggtttgtatgggaaatgaaagccttgacataggagggaaacgaagggatcgctatggaaaagcaggaattctttgcccagctggataaaatgggagtgaataccaagcaggcgctggggcggtttatgggaaatgagggactgtttttgtcctttgtgggacagctgccggaaaagctgaatctggacagactggtccgcctactggaaaaggaagacgaagaagggttttatatggatgtgcacaatctgaagggattggcaggcaatctgagcattgaaccgatttacgattgtgcccaggccattttggtggaattccgttcctcccagttccggaacaagaaaaagctggcggccttggtgggagaagtgcgggaagagagccaggccctgtcccgtctcattctccggtaccagaaagagggaggggaaaactgatgcgggatacattgctgatcatcgacgattccgaactggatctggccattctcaatgagatttttaaaaacctgttccggatggaatgttgctccgattcccggcggggtctcacctttttgcatcacaatcaggaccggatctgtgcggtgctgctggatatttgcctgggaagacgaggtgtgggctttaccgtacttcatcagttgcagggcgatccgtccacctctgatttgccggtgatcctcattaccaccgatgccaacgaaaaagatgtgcgggccagcgtggagcggggagcggtggactttcttgtcaagccggtggaccctcatacggtgcaggagcgggtgtgcaatgtggttcgaagctcttggccggaagggagcaccatcctggaccagaagaacggggagaaagcggaaaagcagaaagcaacctctggagcagacgatgctttgcagcctcaggatctggaggaagagctggcccgctgttggggacgacggatggagcttttgtgccagaaccggcctactctctcttggaaagaggggcggaagaccggggctattgccggactgctggccagtcggtgggcacaaagagtgcctgagaagctcagcggggatgaggccgcatggatcggtttggcggctcctttttgtgacattggccttttgggcctgccggaccaggtaatccagggaggcgaagagcaggaaggggcagacggcgatctgtatgcccgccatacccggctgggctggcagttgttttcccaggaaggggatagtccctttttccgctatggagcggaaattgccttgtggcaccataaaaacgccgatgggtccggctggccggaagatcggggagcggaggaaatccctctcagtgcccagtttgtccgggctgctttgcgcatccgccattatctccgctattatcaagggctgggcgacgccttcgagcggatgcttcgggcgatcaaaaacgaagaagggatcttgctgacctcagcagctcttcaggctgtggagtggaccggagaagatctgcgcattttgtgccgtcatttgtaaaaagcaaaagcatttcagactgtcggaaaacctatatagcgaaaagaaatcatttgccctacccttcatcaatctgcaaaaagccgcgacctgtgcgtggctttttgcacctctcaaggggcaagtgtgcgccgaaagcgtgcatgcagccccttgcaaaaactcgaaaaagtggcaaaagccgctttttcgacacgcaaaaatgggaagcgttgcttcccatttttgttttattggtgcctttaggcttaataaaacccctggttctaccaggggtaaataaa

SEQ ID NO: 3348 - DNA, 2539 bp, Unknown
  16S sequences of unknown bacteria
tgcgttcatttttgcaaggcgttagccttgctgcaaatttctcgcttcgccgaataaaaaattcggcggcagaaacttttaacctaccgaaacaaaaaattttgttataagacgaagccgactaaacgcaggaatactgccgtatttcaagttttgaggcaatgtattatgcaaaattttgtttcgtaggcgcgacaggttcgagtcctgtcacactagcttcggcttatgccgataccgggggagcttttttgatattaatacttgttttcgactgaataatgtgctacaatagaatcaaaattaaaatgggggaaaattttgatttgaacacaggaatcacaagggaaacagctgtcacgctgctcctcaaatacaataaagaaaaatttcacatacagcacgccgttacggtggaaagcgttatgaagggctttgcaaaacgactcggatttacagaggatgccgaggaatggggtattgcggggcttctgcacgatattgatttcgaaaggtaccccgatgagcattgcataaaggcgccggagcttttgcatgaggtgaacgcaagcaacgagcttatacacgcggtctgctcccacggctacggaataacggtggatataaaaccggagcatgaaatggaaaaggtgctttttgcctgcgacgagcttaccggtcttatcggcgcggcggcgctcatgcggccgtcaaaaagcgtttcggatatggagcttaaaagccttaaaaagaagtttaaggataaaaaattcgcagccggctgttcaagagatattattgcaagaggcgccgaaatgctcggatgggagctggataagctgctcggtgatacgcttgatataatgcgcgaagtcgaaaaggatattgcaaatagctacaaagagcttacgggtgaggaactatgagaaaaacaaaaattgtatgtacactgggccctgcctgctcggataagcagacgcttacagagatgtgcaaagccggcatgaatgttgcacgccttaatttttcgcacaacacgcacgcagatcatgaaaagcggatcgcgcttatcaaggaggtgcgcgaggagttagggcttccgattgcgataatgcttgacacaaaggggcccgaataccgcataaaaacctttaaaaacggaaagattacactcaaggagaacgatgtctttacctttaccgccgatgatatcgagggtgacgagacccgtgtttctgtgaattacaaaggactgccgcatgaccttgaaaagggagatattattcttctcaacaacggtcttttgtcctttgaggtgacggataagaccgataccgatattatctgccgtgtgaaaataggcggcgagctttccgacaggaagagcatgagcttcccgaacaaaacgcttaagcagaaatatttaagcgaacaggataagcaggacattaagttcggagcggagcatgatgttgattttatcgcctgttcgtttgtctcctgcaagcaggatttgcttgatattaaggcatatctaaaggagataggcgcggagggcatcgacctcatcgcgaagatagaaaaccgttccggtgttgataatatagaagaaataagcaatgaatgcgacggtataatggtggcgcgcggcgacatgggggttgaaattccgtttgaggagctgcccgcaatacagaaaaagatcataaccaaatgccgtatgctcggaaaacgcgttataaccgccacggaaatgcttgaatcgatgatatacaatgcacggccgacccgtgcggaaatatccgatgttgcaaacgcagtttacgacggcacaagcgcgatcatgctctccggcgagaccgccgcgggcaaatatcccgtgcaggccgtcaggacaatggcgcgaatcgccgaaaataccgaaaaaaacatacactacgaaaagcgctttttatcatctgaattcaaaataaaaaacaccgttgacgcaatttctcacgcaacctgcggaatggcaatcgatattgacgcaaaggcaataacggtctgcagtctctccggcatgaccgcgagaatggtttcccgcttccgtcccccggtcgatattgtgggacttaccacaagcgagaaaacctggcataagctttcgctttcctggggagttactccgcagatgtgcgaaaattatccctcgaccgatgtgcttttctacaacgcgcaaaagctcacaaagcatattttgaatctccgtggcggcgataaaatagttattaccggcggcgttacaaacggcaaatccggcaatacaaaccttattaaggttgagcgggtctgagctttgttacagacagtacggctgtttttcggctgtattgtctgtaatttttaattttcgtcgggttttaaagagtttgttatggtacaatagataggtaacaaaataaaaagaaaattcatctcaaatatggtatgatgttaataacgacaaaaacaaagtaccataagaggtgaattttctatgacaagtataacatcaaaa

SEQ ID NO: 3349 - DNA, 10031 bp, Unknown
  16S sequences of unknown bacteria
cgctcttccgatctcttttaaatcaatatctctgactgtttttttcattttgtgttcctcactatttgttgtcaacgcttgccatatgcttgatcagttcaacgatcttgcttgaatagccgtattcgttgtcataaaatgatataaacttgaacattctgtcgttgagctggaagccctctcttgcatcaaatattgaagtgcaggggtcgcctatgaaatcgcttgatacaacttcatcgtcaacgtattctataacgcctttcatatatgtttctgaggcttccttaaccttggcgcatacttctgcgtatgtagcaggcttcttcagtcttacgttaaggtcaacaaccgatacgtctgcagtaggaactctgtatgcgatacctgtcatcttgcccttgagtgacgggataacaagcgctactgcctttgcagctcctgtagttgtaggaatgatgttgttgaatacgcttctgcctgttctccagtctttcattgatcttgcatctacaaccttctgctttgctgtcgccgcgtgaattgttgacataagtccctcttcaattccccagttatcctcaagcacctttgacagaggcgcaaggcagtttgttgtgcatgatgcgtttgatacaacgttgtattcaggcttgtattccatatggtttacaccgtatacaaatgtaggtgtttcggcatcctttgcaggcgctgaaattataactttcttggctccgcccttttcgatgtgaaccatagctttttctgtagttgtgtatgctcccgtaccttctatgatatactccgcgccgcactctgaccaagaaatgtttgccgcatcgctttcactgtaaacaggaacctttctgccattgattgtgattccgttttcgtatgttccaagctctcccggaaatcttccgaaagtggagtcatatttaagcatatatacaagataatcgtaatctgcattacggatatttattccggctatctctatatccggttcactcattgcaatacggattacaactcttgaaatacgaccaaaaccactgataccaactttaattgccattttaatttaatcctcctaaaaaattaatatatttaaactttaatttttaaaccgtttaatatcttttgcgtttctgtgaagacggtatgcccatttcttctctgtattttgccactgttcttcttgaaatatttatcccgtcctcctgcatgcggtcagccatatactgatcgctgcatggttttttggggttttctttttcgaccatatctctgataatgcttttgactgccttagaggacatcccctctccgctgcctgcgctgacaccgctggtaaagaattctctgatctcaaacacacctctgggactttgcatatatttgccgttgatcgatctgctgaccgtcgattcgtgtataccgacctcctccgctatctgcttcagcgtcataggttttatgtgtttgggtccgtattcaaagaaatctctctgatacctgactaccgccgacaccacattgtatattgtctgcttcctctgctctatgcttttgataagccagttggctgtatttattctgtcattgagatactccgcaaggtttctgtcgtttgcgctctccctcagcacctgtctgtaataggagctgaccataaggcgcggcacgcttccctcatttattataacgtgatactccccgtcttccttttcgacgaatacatcgggagttatatatctggtttcgtcctgcgatgcaaacgctctgcccggctttgggtcaagggttctgatttcatctgcgattttctgtatctgctctgtttctgttcccagctttctggctattacagcaagcctgtttgatgccatatcctcaagaaaatccgatatgactctctgtttgagctctgtcagtctgtcctgtgctgcaagctgcactgtcaggcattcactcaaatcctccgctccgactcccgcaggatcaaaggtatgaataacctcaagaactttttctatctcttcgggctctaagccaagacctgccacaagctcctgcctgctctgggtcagatatccgttgtcgtcaagagactcgattatatatttgccggtctttcgctgcgcctcgcaaagcggcgcaaattgaagctgaaacatcagatgctctactaaagtgacatcgtttgccgcatgctgttcatacggatactgctgtttttcctctctgcggtattcccctctgtaggaatcagtcacacgctcaggatcgggaagttcaaactcctctgcaggcttctctcctgctgtttctattacagggtttatcagcagctgctcctgaacatagctctccagttcctgattactgaactgcagtatctgtattgcctgtataagctccggcgtaagagcaagcttttgtgtctgtttaattgtcagatcatatccaagtttcataactgtacctctggtctgcaatcactgttcgaataagctgattatctccattatatcatatctttggcacagttggtatgtaaaaaaagtgaaaattacggaattaaaattcctattttcacatgtcgctcacaaggagcgacaacattcaaagtgctttctttgcctttttaccccaagctatgcttggctaggaaaaacggacagcaacaggcaaagcctgttggagcgaagcactgaaacatacggaaatatctcaaaatcgatatttcctatgttataaaaagtgtacttttgcatattaatgcgcaagtacacccgtattgtcatttgagctgcggaaatcccagctgcctcagagcctcaaacagaacaatgttgaccgagtttgacagattgagtgatcttaatctggtgtcctcgctcataggtattctgattgctctctccttattctcatttataaaatccctcggcaggcctgctgtctctctgccgaaaagtatcatatcctcatctttaaactctacatctgaatatacagtttcacccttggtggttgcaagatacatagtatgacccgcatactgctcaaggaattcctcaaggctctcgtgaacctccagcttaacatacggccagtagtcaagacctgctctcctgactgccttgtcatctattgaaaatcccagcggcttaacaaggtgaagcactgcgcctgtcgctgcgcagcttcttgccacattgcctgtgttgggcggtatttcagggtttaccattacaatatgaattgccatttcatttctccaaatctagtattactaatataatagcagacctttgcggcagtataaagacttttttaaaaatttttaaagacaaaacgctttttttgttatataatcgaattatattgtttacattcggaggacagatatgaaaaaagtaaatattggattactggggcttggtaatatcggtacaggctcctacaaggtgcttgaaatgaacaaagcacagattgaaaaaaacacaggatgtgacattagaatcactaaaatattagaaagagataccaccagagaaagaggaattaaagtttccaaagatcagttcactcaggatccagacgagattttcaacgaccctgatattgatatagttatagagcttctgggcggtattgagcctgcttcaacatttatgctttcagctttaaacagcggcaagcacgttgtaactgcaaacaaggctgccgttgccgcaaactatgacaagcttatggctgcggcaaagaaaaacaacgttgaattcaaatttgaagcaagcgtaggcggcggcattcctatcctgaatgctctgactacagttctgggtgccaacgaatttattgaaattctcggcatcttaaacggaaccacaaactatatcctgactcagatgactgaatacggtctcaactatgacacagtattaaaggttgcgcaggaaaagggcttcgcagaggctgaccctactgcagacgttgagggtatcgatgttgcaaacaagctttcaatattaatggcgcttgcatttgacaaatatgttccgcctacagaaatccctacaataggtattacaggcgttactatggaagccatcgaggctgccaaaaaagacaactgcaaaatcaagctgattgcaaaggcaaagaaaacagacaaaggcatcgagtacagcgtacagcctacaaagctttcaaacgatcatcctcttgcaacagtatcaaacgaattcaatgcggtattcgtaacaggcaatgctgtcggcgagcttatgttctacggcaagggcgcaggcgcgcttcctacaggcagcgctgttatgggtgatgtaatagaaatagcaaagagaatttaaaatacggagggtaaatcaatggctactttatatgagcagtggaaagatttaatcgaaaatcagacaaaagaaacatttgaagcgttctggaaagaatacagcgaaacagagacaagaatttacaaggatctgcttgcacaccacaccgaaattacaaaagggactttcaaggagcttgcagaaaaatatgaagccgatcctgtaatcttcatgggatttcttgacggcattgacacaagcctcaaggcatcaaacgacttcaaaactttcgatgaaaactcagaaatcgttttagacattgactttgagaagctgttcttcaatatgctggttgcagaggcgcagtacctgtacactctcgaggaatgggaagatgtccttgacgaggtaacaagaataggcatcctgcaggcatacaagaaatcaaagatagtagtaagagagcagcctaaggttggaagaaacgacccttgtccttgcggttcaggcaagaaatacaagaaatgctgcggagcaaacaaatagaggtaatagcagacggtgcgaccctgaaggctgcaccgtttttaattttttaaaaaaaatcagccacactaattccattgttcttcttcacctgcatcattttctttttccactttaacacttattttatctattctgtgcctttccattgaaagaattctgaattcagctctgatattgccgtctgcggcaactgcagtgtcgcctttctccggtatacgatcaaatatagtcagtaccagtccggccgccgtatcgcattcatctgtcagttccggtctaaagccgatcagctcaacagtttcttctgcagaaagagctccgtctataatgtaggtgttctctgttaccggaacaacctccgactccctgctctgtatgtattcatcatcactgttacctatgatttccttcataatatccgacattgttacaatccccgcagttcctccgtattcatctaccacaaggacaaacttggttccccgctcctgcattatctgcataagtctgtccaccgcaaggaactcggaaactgccgtaacaggtcttatcttcaatttttcgtactttatatcatctttaacgtcactgttccagtaaaggtctttgatatgaacaaatccatcgatgcagtccttgcttcccctgcatacaggatatctggtatatttatatttttttatcatatcaatattctcgctgtaggataactcaaggtcaaagcactgcatatcggtacgcggcgtcattatctctgatatttccttattgtacagatcaaaaatattatctatgaattcattctgtttaggatttataaggccgctttcggtactttcatctataaggagctgaatttcctctcctgtataaacctcctgctcattggcaatatcgtgtcccatcagcttcataacaccattggtcactgaattgaaaagccacatcaccggagctgtcatacggtaaaaccatacaagcggcagagctgtaagtctggcatatctgtcagttgaaaatatggcaagagatttaggtataagctctccgactactatatgaagcgctgtaacaagcgcaaatcctatggctacagcaatagctgaaacagcagactccgacacgccaagggcagcaagtcccggtctgataagctcagatacagccggctctccaagccagccaagcgcaagtgaagccagagttatcccaagctgacatgccgacagatacgaattaacattatttgcaatacgcagcgccgcctttgctcccgctctgccctcatctactgcaatctgaagctgcgtttttctgactctcacaagcgcaaactccgccacaacaaaaaaggcattcataaaaagaaaaaacaaaacaagtattaaactgagtgctgttgacacaaaaatcctcctttataactgaatttgaaattttattttaattattctaacttctttacaatcctcagtcaatattactaaagtattataatacatcaatttttctctttaattctgccaaaaaggacttaggctgtttactttttaacaaacctgtattaaactaaaagggtgtggacttttttcacactcttttaaaaccgtacatatttttaatctttaatatatcggaggaatttacaaaatgaacattcagaaacagtatcaggctaaacttacaacagccgaagaagcagtaaaggtcgtaaaatcaggcgactgggttgactatacctggggcgtttgcactcccgacgctcttgacagggcattagctgcaagagcaggcgaattatttgatgtcaaagttcgcggcggtataataatgaaagagcctgaaatattcaaggtagacaatgttacagagcatttttcatggaactcatggcatatgacgggaatcgaaagaaaggcaatagcaaagggcttttcatactatgcgcctatccgctattcagagctgcctcgctattactatgatatcgacagcaaacctgatgttgcaatgtttcaggttacaccaatggactcacaggggtatttcagcttcggtcttgaagcttcacacctcaaggcagtatgcgacacagccgggacagttattgttgaggtaaaccctaacatgccttatgcatacggtgacgaaacaactaaagttcacatctgtgacgttgatatgatagttgaaaacgacggacctgcgcttcctacacttgacggcaacaacgtgcctatgactgacatagacaaaaaggttgcagagtacatagttgaggaaatctgcgacggcgcgtgcatccagcttggtatcggcggaatgcctaacgctgtaggcaagatgatagcagagtcagatttaaaagacctcggagttcatacggaaatgtatgtagacgcatactatgagcttgcaaagtcaggcaaggttacaggacgccgcaagaatatccatccgggcaagcagatgtacgctttcgcagcaggaagccatgagctttacgaatacatcgacaacaaccctgaggttgtaagcgcgtcggttggatatgtcaacgatatccgcacaatctccgctttagacaacttcatgtcaatcaacaacgccgtaaacttcgacctgttcggacaggtaaacgcagaatccgcaggcacaagacacatcagcggctccggcggacagcttgacttcgtgcttggcgcttatctatcaagaggcggcaagagctttatctgctgttcatcaacctttacagacaagaacggcaacactcagtcaagaatactgcctacactgactcagggctcaataatcacagatacacgctgcaatactcagttccttgtaaccgaatacggcaaggcaaacctcaagggtctttcaacatggcagagagccgaggctatcatcggtatcgctcaccctgacttccaggatcagcttatcaaagaagcggacaaaatgggcatctggaaaagatcaaacaaataggaacacagacaaaaggagaggtttcgcagttaagtcctctccttagtttcatttatttgctgtttgcgattgcctgatcgataagctcctgcagtttttctgcctgcttctttccggtaatcgctcccacgatcggttcgcctacaatgtttccgtttccgtcaaccacgtaagtcgtagggtaggagtagattccggaggtgaattttccggcctcgctgtctgatgcaaaccatatattccgataagacactttcttcttttcgaggatttcctttgcttccgatattgccgtcttatcaccgtcaagtgtaaatgtattaacgccgacaactgcgccgcctttttcagcaagctgtctgttcagcttatccagttcgccaagttcgcctacgcacgggctgcaggttgtaaaccagaaattcaccacagtaacactgttgccggagaacagtctgtcgctttttaccttgcctccgtcaagatcctttccctcaaatgcagggaatttcatgagatcgctttccttttcgggtttgccttcctttgccggaacgctcatatcgctgtcaagagccataaccgcacactccggatatttctgttccagaacagtcagcttcccttcaatttcacgtattttttcggctccgtccctgagaattttcagttcctttttactgaacttgtcttcggcggaatcaattgttttaagcaggaaatctccgtaattggtgccgtcttcaatcataggggtacccttgtctgccagtttgaatactttctcccaaagttctttgttttccgtcagaatcgcattttcctgctgcataagttttttataaagctccgcggcttcctcaaggttttccggctctgccgccagtaactgtgcaatttcggctcccatatcatcgtcattatttttgtctgccgcaccgcaggcagaaaggctgaaaatcagtgctaaaatcatcagcacagtaagcagttttgttgttttcattgttgtttctctccttttatattatttctttttgtttctctgtttttttggcaaatccgcagcggaagcttacggcctcaacaggacaggcctttacgcacattccgcagcgtatgcattccgtatggtcaggtgtttttgtaacatctacatccatcctgcaggctttggcgcatttgccgcacgaaacgcatttatgtccgtctaccttcatcccgataagcgaaactttgttcagcagagcataaaaagctcccagaggacaaagccacttgcagaacggacgataaaacagtacgctcagtacgataaccgaaagcaggactgcaagtttccatgaaaaaagcacgcccagcgctgcgcgaattccctcatcagcagcagccagaggaagcgccccctccaatactccctgcggacagagatacttgcagaaaaacggctctcccatacccacatcgtttgcaacaagcgccggcagcagtatcaccattatcaccagcacgccgtattttataaaagtcaggggcttcagtttcctggcggacagttttttgcccggtatcttgtgcagcagttcctgaaaccacccgaaagggcacagaaatccgcagataaaccgtcccagcagcacaccgagcagaataaggaaaccggtgatatagtaggaaaagctgaattttgacgatcctgccaccgactgaaacgctcctatcggacatgccccggaagctgcagggcaggaatagcagttcagtcccggcacacagacagcctttgtgtttccctgataaatgccccccttcaggaaattcggcagatgaaggttggcaagcagcgcggctcctgcctgcagccacccgcgaaaacgtgacagaatctgtgatatatccggtcttttcttatccaattcccacacactccagacacagccgtattgccttgttcagcacgatatccgcctctccgcgccatattccgaagcataacattgccgcgccgccaagcagcaatgcaatctgcagcagaagtttttttgaatgaatcagtttagtcaattaagtcacccctttctttgcatcctcattgtaacacagaagatataaaatctgcgttaa

SEQ ID NO: 3350 - DNA, 3225 bp, Unknown
  16S sequences of unknown bacteria
cccgccgcttttgcgaacttgttctcatccctttcatggtgacccccacctttcgttcgtacccgccgcgtttacggcgcagctctcccaaagagccaggtatgcatttcacatgataggaacgcctagggatgactcgcctcgcttgtcgtaattgcacgattcatggcgtatttgtgaagggttcatccatcagccgagccgggatgggggcgcataggggtactccgcgctccccgcatgcgccggatgcgtggcactgccacggttctcgcacaggggacgggggatacgtggcactgccacggttcccgcgcagcgaagaggggcgcggcatcgccacgcccctcttcgcgccacactatatgtactaccgtctcgctcgcagttccgcgccttgcttcagcttctactcgcgctcgtcgataacgcgcttcgacttcttggtagagcgcggcagcaggccattttccacgaccttcacaagcggcgtgaagccgatgtggctctttacctccgcagcaatctgtcctgccagcgcgaggaagtcctgagtaccgtcggtttcgacgtaaatgcgcatggtatcgcgcccctcgaggtgcgacaggcggatctggtactcgctcgagagctgcgggaacagttcgagcacctcctcgatctgcttggggaagacgttgacgccatgaatcttcatcatgtcgtcgctgcgccccatgatatgcccgatccgcggatgctcgttatggccgcaggggcactcgccgcagacaacgcggctcaggtcatgcgtgcggaagcggatgagcggcgcgccctccttttgcagcgtggtgaggacgatttcgcccggctcgccatcgggcacaagctcgccggtcttggggtcgatgacctcgagatacaggaaatcgctccacacgtgcatggcatcgctttcctggcagctgatgccgatgccggggccgtagatctcggtcaggccgtagatatcgtagagctcgatgccgagcaggtcctcgatacgctggcgcatcttgtcgctccagcgctcggagccgatgatgcccttcttgagcttaatcttgtcgcgcaggccgcgcttctcgatttcctcgccgagcagcagcgcgtagctcgaagtcgcacacagcaccgtggtctcgaaatcgatcatcatctggatctgcttctcggtgttgccgggccccatgggcaccgccatggcgccgagcttctcgcagcctgcctggaacccgattcccgcagtccacaggccgtaacctggcgtaatctgcacacggtcttccttggtgacacccgcgtattcgtagcagcgcgcgaactgcgtcgcccagtcgtcgacgtctttttgggtgtagggaatcacgaccggcgtgcccgtcgtgcccgacgacgagtgaatccgcacgacctcgctggtcggaacggcaatcggcccgagcgggtaggtcgcgcgcaggtcggatttgtccgtgaagggcagcttggcaaagtcctcgggagtattgatcgcatcgatgtcgatgcccgcgaactttttcgcatacatgccgtctttgacggccatcacgcgcttgagctgccgttttatcatctcgaactgctcgtctgtcatcttcatgggatcaatcgcgcctttcttgtagcggctgtttgttgcctaggtcgatgtgggaattataggacgttgaacgcaatcgccgcggcaagcacggcaacgcagacgacgaccgcgacgatatcgcgcgcggagacgccgtgctggcgataggcgctcgtggcgtcgcgcagactgaaaccgcgcagctcggcgccgatggcgatggtgtcggtctttttcacggagctcacgagcagcggcaccgtgagcgggatcatcagagcgaatttgcgggcaacgttgcgggtgtcaaactgcacgccacgcgccctctgcgcttccatgatgccgctcatctcctccatgaacagcgggatgaagcgaaccgccgtggtaaaggtgaacgcgtacttgtagggcagatggcacttgctcacgagctcgttagtcaggtcgttcatgggcgtcaccatgaacgcgagcgaaagcggtagcaccatgcacacgaccttcaagacgacgagcacgccggacagcagtccgtcgctcgtgatcatgagcgggccgaacgcggcaaacacggtgcccgtgcgaacgaagaccacctgtaagacgagcacgatgagcgccagcgagcctaagcccaagacgagcttcatgctcttcttgaaaacgccagctgtcgaggaaagcaacagctgcacgacaattaacgcgagtacgaacaggtggttggtgctcaccgccgccgcaatgcagacgagaaaggcacacaggaacgtgaagacggggttcatgcggtgcagcgcgctcgtgcccgggacgtacgagaatacggtgtccattactgctcctccttgagtgcgacgacggcatctgccatggcatctacctcatatatatgtgcaagttgcgggtgcacgggggcgagccgctgggagagctcgcagatttgcggcggcagcagcgacgcgcgctcgagcacatcgcgctgctcgaagatgtcgcgcacggggccatcggcgataatgccgccttgcgccaagacgacggcgcggtcggcgaagtcgaggacgacctccatgtcgtggcagaccatgacgaccgtcgtacccgcgcggttcatggccttgatgtgcgccatcatctccatgcactcgctgtagtcgaaaccggtcgtgggctcgtcgagcagcaagagctccgggttgacggcgatcaggccaccgagcgcgactgcctgacgctgccccttcgcgaggttgaagggatcgacgtcgccgtcgaggtgaagcagctcgagcacgtgccgggtgcgctcttccacgcgcgggtcgtccttgccgtacagcgtgcgcagcccgaacgcgatttcgtcgcgcgtcgtgttctggcagatctgccggtcggggttttgaaacaggaagccgacatgtcgcgcgatctcgctcgtgcgcacctttgacgtgtcgagccccgccaccgtgaccgtgccctcgctcggcttgagaagcccgtcggacaggcgcagcgtggtggatttacccgtgccgttggggccgagcagcgccacgaactcgccgcggcgcacgctcagg

SEQ ID NO: 3351 - DNA, 8175 bp, Unknown
  16S sequences of unknown bacteria
gctttgctgtatgcttcgggaggtacgagttcgccatggaattatgcagtcatggtgatttccctgccttgcatgagcatcttcttttccgtgcattacctaacgctatattatcttttgcagccatacaatgcgggcacggaaatgaaaagcggaacctatcagcttttgatgtcgctgacataccttgcctgctttttgatgatgcaggtacgcatgcccacgctggtctttggcgctatgaccattgtgttttgcgccatctattgtttggctgcctgcctgcttatttatcgatttgccccaaaaacgtttcgattgagggcttaatgcaattcgttttaggcattcatgaggatacgagataggtattagacattctaattgcgattccttacaataaaggtgtccagatacggacaccttttttctatatttgtgtttttacatagacatagggcgctttggcagaaaaaacctgatgctaaggaggaaaagagtatgcaatatacaaagctgggcaatgccgatttgatgatatcacgcatttgtatgggatgtatgggatttggagacgccggcaagggtcagcattcctggaccattaacgaggaagagagcagaaagatcattcgtcgtggattggagctgggcgtaaacttttttgatacagccatcgcctatcaaagcggcaccagtgagcaatatgtagggcgtgctttgcgcgattttgcccaacgcgatcaagttgttatggctaccaaatttttgccgcgtacggccgaggagatagagcaaggcatttccgcacaggagcacattgaacggatgctcaataaaagcctgcaaaatctgggcatggagtatgtggatctctacatctaccatatgtgggactatcagacgcccttgtacgacattatggagggcttaaaccgcgtggtagaagcgggaaaggcacggtatatcggcatttcaaattgttttgcttggcagttggcaaaagcaaacgctttggcagaaaaggagggctttgccaaattcgtttctgtgcaggggcactacaatttgatttttcgcgaagaggaaagggaaatggcgccctactgccgggaagaaaatattgcgatgacgccttacagtgcgctggccggagggcgtctggcaaagcgcaaggggcagccaaccaagcgcttggcagaggatgcgtatgccaagctaaagtatgacagtacggaagcagaagatcaaaagatcatacaacaagtggccgagttggcagagcaaaggggcgtttctatgacagagatatcgctggcttggctgctgaccaagacaacggccccggtggtgggcgctacaaaacaagcccatatagaaggcgcggccaaggcagtggatctgaggctaacgccggaggaattggctcgtctggaagcgccgtatgtgccgcatgcactggtgggcgtaatggcacagaatactgcggcctcggccaaagaacagcatgtctggtctacgggagaacaaaggatttgaacgagtagagaggagcagaaaagatggatagaatggaacgcatgcaaaaaattctccaggccgggatggcagccggagggatgcaaaacaatgagcaggatccggaatttcagaggatcacccagcggtttttatatggcgatgtagcccatcatggaacgctttccgatacgcagagagcattgattgtcctcgtagcgctgacaacctgccagacctggccggccatcggaaaatatacacaggctgcgctggccgcgggggctacgccggaagagatcaaagaagcgcttatccaatgcaccccctatattggaatggagaaggtacagtacgctctggaagaagtgaatcgagtatttgaagccaagggcattcagctgccactggcagaccaggcgacggtcaccgagcagacgcgcctggaagaggggttagaggtgcaacgacggatctttggcaaagaaaacattgatgccatgcgcgcttccgcccctgaagagctgaagcatattcaagcgtatttgtccgcctattgctttggggatttctatacacgcaaaacattggatctaaaaatgagggagattatcaccttctgcgccatttgctgcctaggtggatgcgaggcccaggcaaaggcgcatgcagcaggcaatgtaagcgttggaaatacgagagaaacaatgatacaggcaattacgcaatgcctgcctttcattggattcccccgcgcgctcaatgccattgcctgtatagaccaggctacccagcaataaacataaaagaatacaataagagacgcctttgcagggcgtctctttcttttttctgaacctttgtgtttttaacacatcaaatagggggaaaggacgggaaggggtagcgtgttaagcatctatatgcaaaaaaaagacaaccttttaaggttgtctttttggtggagcatagcggagtcgaaccgctgacctcctcgatgcgaacgaggcgcactaccaagttgcgcgctttgcatcatccgtagatgattattgttcagtctcctttcgggtatattagtttgcaattacggccttgctataatcaaagccgaactgttgggcggtcatgctcataatggcattgactcggtactgattgtctacatatattttatcgaagatacttgccagaatcatttttttgatggagacgtcggccatatcatactcttggcaccagttgttaaattgatcgtactgagcagacagcttttcgctattctgcaaagattggttcaattcggtttgtgcttcgtccacgcttatatatgctttgcggatttgaccttggcaatcgttcaataacgaatccaatgtgccaatatgaaaagagatttgctctcccatcaaactacgcataatattgtcctttatgatttgttcttttttcaaccaacttgaaagatttgctttagcatcttttaactgttgctttgcttttcgttccaaatcgtagcatagcgtttgaaccacagtctcctttggatttttgtctaattgcatgcaaacagtgtgaacaatatcgtttatgcgttgttctatacgttgtgcattgtacacgctgtatccgtcacatggccttttttgaatttttgcataacaacgatatacaggccgataccggtaactattaccatgtaaatccttattggtcgaaccacacattctgctaccacaatgaccacaaaaaagcagaccagtcaacaaatgtttgcctcttggggctgtactgatattttttggtgtggttcttcgggcatcaatatttttttgggccaattcaaacatttcgtccgaaataataacccattcctcttttttgggatatacgacaccatcatacttgaaacggccagtataggcgatgttttttagcatacgtaacactgtattttgtgaccattttcgactaggatccatttgcctgagaatgtaagcaatttgataggtgccttttcctgtaatgcaaagatcgtacgctgtacgaacaagatttgcacctttttcatcaatgactttctcgtggataggtaaccctctactgtttatcaaacccgtgtccacaagtttgtagccaataggctgaacaccacccgtgaattgtcgggaagcggccaattgtttgcatcgtgtttttacacgtagggatgtgttaatactctcgcctgcagcctgccaaaaccggatgtagttgatgagcttgtcagcgtgtgtttcgatccgttgctgcccctccacttgactccagacttcaataccgtggttaataaaccattcgacaacaaacggagtttcgctctcaatacggccaagacgatcaaatttgaaaacaagcagcttatcgaacgctttttcttgggccagttttttgatttcgagtatatcatcgcgtttattagcggataccttaaagcccgatactccattttcggaaaattccgctacgatttgccagttttgctcgttacaaaatttgtgacattctatcctctgcattggtatatctgcttcttcggattgtcgttttgtagaaacacggtacaggcaacagacacgagggatatgagctatattctcatttttactattttgtattgtcagaggttgcagtttcatcatgactctcctttgtttttgaaatacgagagaaaaatgaactggatagcaaatcaataatctgctctttgtaatcgttttcattttgtgttgctgaaaaagtcaacgtaattccattacttagcagatacgtcattcgctcctctaacgatacagggcattgatcattttttattctattgtcaaggtacatattattctcctttcatttttaattgataagaagaaaaaaatcaatatgaaaaaccttggcggctaaagatagcccacagaaacgctgtaaagcgctctccccgcattccgatgccgagccgtcccttgtcatcacgatagccagacgggcgtaccattatggctcctgaaggtcatggcggggtgtttcgctcgctccaggaggaagtaccaaggtatgtatggaaaaatgtcaaggtacaaggtcaggattcagattgttctctcatcctatcaagacagggaaaaagtcaattttctgacaaatcatcgggcattttaaagcaacgaacggcgatcaaaaagcgttcgacaagcgtttggtaacaatcgggcgaaaaccttccaaatacatagctgtttttcatgagcagcggttgatagagttccaataattgttccaaggccgcctcatccccttgtttggcgtttctaagcatttgttcaaatgtcatcttggtcctcctgtaatgctttgcggagcgtacgcaacgtataccgtttgaggtggtacacgtagtctaccgaacaaccgagacagttggcagcatcctttggcgtcagatcctcaataaacagatattccaacagctttttgcgtcgttccggcagctgctgaaaagcggaggcaaggcgttcctcctcaaacacaaactcgttttgataaacgacatcctctatggttccgcatatttgatagcagggctcttgctctcccatagggatttcgttgcgccagcgatacgctttttgtagaaagtttaaccttgcgccttggatatggcgccggacataggcagaaaaaatataaaataaacggttatcatcgttatacatcatgtgccaccttccatgccgtgccatctttgacagatgacagacggcgccaaggatggcacgctgtaaaagttagaaattttgtttggccgggggcagggcgtgcaacggaatcaccccctgacaaacaaaaaggggcgcaccaaacacggtgcacccacaaagatatttttcggatgaaatggatacggaaaaacgttacatagaaagccggttaagaaaatctcctgaacatgcaatccctcgtaccatgaaaatgaaaagaacgtctgtatatgttcaatataggtacaataccaaagaaaacaaagcagatatatcgcacaaaaaacagaggatatacagtggaaaaggccgtccgggggacggcctaaaacagggactgtatatctgccagcatacttttagccaaatcttctttgctgtccattggtacagattcatggctcgtatggggttgttgtgctaaagcgcactcgatcatcgctaacacggcagcttccgtgatggaaggctgtgtccgtacgacgatagacgcgtgattgagcaattccggatgcgcatccaggtactcgctgacaacggaaacgatgaatcgtgcttttttatttttcagcgattccaaaaaatcgccgactttgcagttttcgggtgtcgtggccgggatttgcatggtaaaacgaaacagtttatccgttttcaccgggatcacccgcctgttgcagctgcgccttgccgagctgttcaaagccttttgcgtttgccagcgtgtccgcacagaagaacgctttggcaatctgtggggactgttcgtagtaaggacgcaaaagcaacgcgccgcctccgatgatcaaaacaggcagggtatgcaggtcgatgtgcagttcacgcagtttgctgagattgtcctctacatgcgcccgggcatggtcttgaacaatgcgcttgatgtccttgctcagaatgttgggcttaccggtcaatacgtcttggatgagggtatcatcaagctgctgcccgtacccggcgttgacggcttcacgaacctgattgtacaaggaaatgataccgctgtccaaactgccgcaaatgtcaacgtccagccggttttcacgaaggccgacgtaatcaaatgtgtatccgccatggtcaatgatgacaagacgggcgtactgtgcaatgacgtcctgctgcgtaatggcggcggcgaacgcctggggaaataccatcacattgcggatctcaacggtatacgctttgccggcaaaccggaacgtaacgggatcgctgctttttttgaaataggcggcaaacggggcgcgcaaacggccaaagtgctccgggggcagcccgaccgccagatcaacgtctgcgcgtgtggtatgcacaagctccaattccttggcaatggccaccaatgtcaataggtaataccgttcgtccagcgtcttatcgtactgatagctcagacggttgttggacagcgaataaatggcgccgttgtattccaggacgtcgtttgtgacagggggatgcacataccgacggacaatgccggaagggaaacgaagatgcggcgttttgataaacaaattgccgtggtcgatactgataagcatagaaaaacctcctttgaaacgtatataaatgacacagaccaatacgtaaaaacgcaagaatacggattgtgtcagtaaaaacgtattgttcctttttgggacgccaagcaatagtcatccaggccgttgtatttcggcggccagaaataggcgccgtaggaaaccccgttttgttcgagtaaagcgcaaagctgatgataggcgtgttttacgggttccttgcgcagaaaatccatatcatatgccgtcataacccgccttacgccttgcttgtacaatgccggcaaaaggcgtttgagctctgttaagttgttgacgccgggtacggcgaccaccgtttgcccggtgagccggtgcacgatttcgcctttcagatgcccctcggtcaaaaggatttgtgtttgtaaaggccccgctatatgcacccatccgtacgcttttacaccgctttggtaatcgtaactggacacccaacgatattttcctttatggctttggtcgagccggacggtcaacccctggatgcagcccgccatatccagtacaggaatgagaaagccacggctgggagacacgaacatccagtgaccggatttggcttggtaaaatccgggaacgccggccaacgtacagccctgttccaatagcttttggcaaagcatggcctgccctgccatgggaacggtacgatacaggttttcctctatcatttggcaagacagaccgcgatgcagcagatccttttcatggtcactgctcaaacttaaaagcgccagcaacgcacggtaggttttgttacgcacggatatatccgccagaagagactgaggcacatactttttcgcaaccgcttttccaggcacagccatttttcggtgtatggtctccccctgaagctgcctttgaatttcatgaaacgctgatttcatgctttgcggataatacaggcaatacaagctcaaaacgccgccgtgttcgccacagcggttgcagcggaacacatttttttcaaggttgatgttcaggtgcttttttgtatcgttgcaggccggacaaggcaaatctaccgaccggcccttgaccactgtatccaacggcaacaggggcaaaatgtcttgcatggtaagcgaaaaagactgcatggcgtcacctcctttcaagaggagcggccggtaggaccgcccctctgaacaaacggggcattaagcggacatcgactgatacgagcgcacaatcatatgcgccgcctgcttaaacgcgtcgtcaaaattggattcgttgatgatccattg

SEQ ID NO: 3352 - DNA, 32442 bp, Unknown
  16S sequences of unknown bacteria
catgataggcgcggcgggaatttccgctttccccatgtcaggacgaatcgttcacaagatgggactgaaagaagacccgcagaacttccttcttatgcagtctatcggcgtaaacgtgtccggtcagatagcgtctgtcatagccggcggactgattttgaatttctttatgtaacttttgtaatggggtaacagcatgggaacattttttgaaaacttttcattccatcccgagatgtttatatcaaatctcaaatacatgggactcggaatgctctgcatactcatagtaatgggaataataattcttctgacgatgcttctcgaaaaggtgtcggtgaagaaaaaggataaggaagagtaatttttccgacaaaacaaaatggataacgttcgtaaaaagaatttgctttctcccgcgaaggtgatagcggtaggatttctcgccgttattgccgcaggaacgattcttctctcgcttcccgtctcccacagcggaaaatgcgaggtcggttttcttgacgcgctcttttctacggtgtctgccgtctgcgtaaccggacttgtcacagtagatacaggagcggcgtactcaatgttcgggcaggtcgtaatcgctctgcttctccagataggcgggcttggcataacgtctctcggcgcgggttttgtcgctctgctcgggggaaagctgtcgacaagaggaaactccatcgtccgtgaagcgctgaactatcctacatacagcggtatcagacagatgattcgttccgtcatggtgcttgacttttcaatcgaagcgataggagcattcctgtcgtttttcgtgtttgtaaaggattatccagtgaaaacggcggtgtggtattcggtgttccactcaatagcggcattcaacaacggcggctttgacgttctcggacgcggagactctgtcggaatgtacacccataacgtatggttcaatatcgtgacgtgcgtgctcattgtgctcggcgggcttgggttccttgtgatgcgcgagcttctcggaatgctgtcggcaaagctgcacggcagggaagtgggaaagctctcgctgcacgcaaaggtagtgctcatgatgaccggaatactcgtcttcggcggcgcgctgctcattaagctcacggagggcagtaatatcagcgtaatgggagcgattttcgcaagcatcacggcaagaacggcaggatttgcaacataccccctcggaggattttccaatgccggcatacttgtgatttgcgtgctcatggtaatcggcgcgtctcccggctcgaccggcggcggtatcaagactgcaacggcattcgtgttcgtgaagcggcttgtgtcggtcataacgggacgtgaagctcgcgtgttccgccgtaagataaaggacgaggctatgtctcaggcgttcattatagtctctcttgccgtaatttggatacttctccagaccgcggtgatgtcggtgttcgacccgggcattgcgctcagagacatactgttcgagcagacgtcggcgttcagcacaacgggattgtcaacgggtatcacaagctcgctctccgttccgtcaaagctgatacttatcgtgacaatgtacgtcggcagactcggtccgttcaccatagcaacactgtggagcgcaaagaagccgagtcccgtttcccgccccgaaggagatattccgataggatgaatggaggtcatgtatgaagaaaaatcaaaagaaaaacagcagtgagctttacgcggtcatagggcttggcaggttcggcatggctcttgcgcgtgagcttgcggcaaagggaaaaagccttctcgtaatagactacgacagagaaaaaataaacgaggttctcgaattcaccgataacgcgtttgtcataaactcgctcaccatcgacgcgcttgaagaaacgggaatcggagaagctgacgttgcggtagtctgcataggcgaaaagattgatataagcattctcgcgacactgaacctgatgaagctcggcgtaaagcgcgtcatctcgaaggctatgagcgaggaacagggtgaagtattaaaattgctcggcgcggaggtcgtttatcccgagcatgacatggcgctgagacttgcttcaaagctcgtgtctccgcatatactcgagtacatcagtttaagcagctcgatagacataatggagatacgcattaccccgataatagacggagttaccgttatagactcgggactgcgcgctaagttcgggctgaacgtgatagcactgcgtcatggggacgaaatgacgaccgacatacgcccgacgactaagctcatcacgggagacaccattactgttatcggcaaaaaagaaaatatagcgaagttcgaggaatatctcggctcataaaaacggaggtgcggctgtgaaaataagaaagctctttgatttaccacccggagacaaaaatccacgcaacagcgaaggctcgtttctcagactgaaggacggcaggatagttttcgcgtactcacgatacagcggaacaagttctgacgatggagcgtactgtgagatagcggctatgtattcgagcgacaacggagagacgttctccgagccgaagattctcgtcagacccgacaaaagccgcggcgagacgaactgcatgagcgtgtccctgcttgagctgccgaacggagacgcgggtcttttctaccttgtgaagcacacgggaatgtggtcggagatgatactcaggcggagcggcgacggctttgacaccctcggagaagagatacgctgtgcgccggagaaataccgcgactattatgtggtgaacaacgacaggattctgcgtacggaaaacgatacgctcatcctgccggcagctctgcaccgttcggcaatgaacaactacggcttcggcgagagcgttgactcgcgtgcgatagcggagtttttcgcttcctacgacggaggctttacttggaagagagtttcggactctgtttccatccctgcggcgtattcgggagcgggacttcaggagccgggagtcgttgagcttggcggcggcgtgctgtactcgtattttcgaaccgacctcggcaggcactacgaaagcgtgtccattgacggcggaagaaactggttcactcctcagccgtcgaagtttaccgctccctgctccccgctgtcgataaagaaaaatccgtacacgggagagtatttcgcggtgtggaatcccatttccccgtccgttaccgccgagagggactggagctttcagcgcactccgcttgttatcgcaaggtcgaaaaatggtgttgacttttcctatccggagataatagaaaacgcggaaaacgcgggctactgctatcctgcgctgtatttcctctcggagagggaagctgtaatgtcctactgcgcgggggagagcttcaatggagacgtctcctgccttgtgagcacaagaataataaagctggagctttgacatcggcaagaaaataatgtgaaaagcggaaaaatattaattgacagggaacttttgtctatcgagccgcgtctaaacgacatctcaaaatattggtattttatcaaataaaatatcggaaaacaaaaagaaggaaggatttaatatgaaacgcaaatttttaagcatagtttcgctgtttctcgcagttatgatgatactgccgatgggcgtgtttgtctcagcagctgcaactgacggaattcagatttatcatggtactgaattggtatccggtactacagttaccttgaaaggcgaaaatgcattcaacagcggtgagacatatgaactgactgtaaagaatgcggcagaaggggacgtgacatggtattcattagacccttcggttgcttctgttgataagcacagcggcgttgttacactgcttaagacaggaactgccgaagttcgtgttgaagactcagcgaagaatgaagcttctgtcacattcgatattgaacttaatgaatgcaacggcataagagtagctgaggattacaagaaagaatactactccggtcaaacatttgatgtttcttctctgacagtatatgaagtatataaagacggctctgaaaagaaggtaacaagcggatactctgttgaaccttccggcagacttactgctgacgttaaaaaggtaaaagtaaactatggcggaaagtattccgatccgcttccgattacagttaaagaaatagctgttgaatcaattaaaattaaatatgtaaagactgaatttacagaaggcgaaaagcttcctgaaattgaagtagaagttacatataacgatggaagtaaagttacaatagttgacggttatgatgtatatgtaaatgacagtcaggttagttcctcatatacattcaaagaaggcgacacttcaataaaagtttcttacaatggtaaaaccagtgattctattggtattaaagtaaccaagaagtccaccgaccccgtaaccgatggaacatatacagtgacagttactactcctccgacaaagaaagaatatcgtgttggagataaattcgacaaaacaggaatgaaagtaactgtaaaacaaatagttgatggcaaagaagtaactataccgagttcagtagcaactgttaattatactgagtatactataacagaagatgacctgaaaaataagaattacataactcttcctgctaaacttactattaaggtaaatgacagtgaaggaaaggtttatgatgtatcaatcaaggtaacaggacttacaataagagatgctgccggcgaacttagcgtatacgaaatcaccgacgttgaaatggttgagaacagctatcccgtaggctataagtttgctgtagatgatgtcgattatttcaagtataaggaaaaaggcggaagaacagagtataaagtctccggatacgatatgcttcattcctacacaaacaactttgacctcgaagttctcacaaacaagaacgacaagcccacagtaaagagcagcagatatatgtacactctcgaggaaggcgacatcttcaccgacaccaagagagatacacagtacgcttacctccgtctcaccgttgataaggaaacatacgactttaccattaaagttggaggcagcggagtttactactactacgacagcgacctcatcgaaacctacgacgatatagattatgccatcaagtatacaatggagcaggacaagagcgtaaaggataaattcgacctcgacagagttaaggattccaaggatatcacactcaagctcggcgaggaccagaaggtttccacaaagaccgactttgagctttgccacaacgtaacaatcgacctcgcaggtcacaagctcgacttctacaccgatacggttgatatcacaaaggcaaacagggactacactctcactataacaaacacctcttccacttccgctaagttcacttacgttgacgaggaagttgaaatcactctcgcaaagggcgacaagatcgtattcgagtacgacaaggatatccccggcatctacacaatcactctcgacatcgacacaaacggtaaggtaacaacaactcccgccgctggtaagaacgataccgtaaaggtaggtcagggaagcgacgttaagttcacaatcactccttccaccgactacgagcttgacaccattaagcttgacacaaagactgtagccgaaaaggattacacaaagtcctccaccggcgttgttacatacacactcaagtccgtaacaaagtctcagaaggttacggtaacattcaagaagtccaacaccacaaagaactggaacaaccccttcacagacgtttccgcaacagactcctactacagcgcagttaagttcgtttacgaaaacaatctcttcaagggtactacaaccacaaagttcggtcccgacactactatgacgcgcgctatgttcgttacagttctcggcagactcgcaggcgtagacgtttccagattcaagacctccagctactccgacgttccgattaacgcaaccacaacatggtacgctccttacgttgaatgggcaacacagatgggtcttgttgaaggctacggcgatggcacattcggtcccgacaacaagattactcatcagcagatgtatgtcctgatgtacaagtactctatcttcgtagaaaacaagaagaccaacatctccggaacatccatcaatgcatccgacgctgaagaagtagcggattgggcaaaggacgctgttaagtacgcaagccagcagaacttcctcgttaaggtcggcacatcctccagaatcaacccgacaggcgaagctaagagaagcgaacttgcacagctcctcgaaaaatactgcgacgttgttctcgattggaacagcagcaataagtaatcctaattaaataaaatctccgccgagacgattcctataatggatatatcccggcggatttttttacttatttgaagaattccgtgttgccgatgactaccgagccgtgcgaatatcccgtgtcgtcactctcgccgaatccgcgcagctttggttttgtgtacctgaacgatacagcacctccgctcgggtcagctccaatcagtgcggcggaaacagcgtcacggcttagcctgagagaggatgaatcatatttctcgcgggacgaaaactctccgacggctcgaagggactgtataactccgccgacgttgtcaggatagcgcgggtcgtcaagtcggtgcagaactacggcgcagattcccgtccgttccgctaagtttgcttcgggataacagcgcgtcagttcatgctcaagaagctctctctcgtagctccttatcccatgggcagatacggcaacggaaagagcggcggcgcatactactccgagcagaagtgcaaatcgcagttttttcatgtccttctcctatataaaataatctctgagagtattattccgcaaatcggataaaatatgtttgacacaaaaaaagagacagagcaaatttaccctgtctcatttaatttttgcaaaattactttataatctcgccccagcattcaccgaaagcgcaggcagcgttagcttcgtctgtgtcgatgtgcatagcggcggagaacttaggacttacacgaactacaacatcgccgaaaataaggcttctgtcagcggatgtaacctttacggaaacgatctgcttgtcctcaacgccggcagcagcagcttcttcgggagtgaagtggatgtgacgcttagctgcgataacgccttcactgatttcaacttcgccgcaggggccaacgagcttacatggagctgagcctgcgatgtcgccggattcacgaacgggagctgttacgccgagagtacgagcgtctgtaagagaaacttcaacctgagtagcgcttcttgcgggaccgagaattgatacgccgggaatggacttcttaggaccgacaacggtaactctttcttcgcacgcaaactgaccgggctgggaaagatccttcttctttgtgagagttgcgccttcgccgaaaagaatcttgatgtgttcttcggtgagatgaacgtggcgcgcgcttgtttcaactataaccttggacatttttatgtacctccgaaattatttttcttccttgaatattatagcacttgtgccgcgcaatgtcaagaaatatcacttttctccgaaaaaaccgagatgtaaaaattcattcttgacaaaattaatgcgatgtggtattataataaagtcggctgaagtcggcgtaggtgagctgaagctgccgtttatttgcaatattttcttgaaaagatatcatgaaggtgtctgtttttccgcggaggagagcgatatcttttttcttttaactgaggtgtaaaaatgaacgcagcaaaaacaagatcaagcttatttataagaaaactcacgtattccgcgctttgtctggctctcgcgatagtgctcccgtttctgaccggacagattccgcaaatcggctcaatgctctgccccatgcacattccggcgcttctctgcggattcctctgcggatggcagtacggtgcggtcgttggatttgtttccccgcttctcagaatgctcatgttcggtatgcctccggtatatgtcgctatagctatggcgtttgagcttgcggtttacggcgctatctccggacttctctaccgtgcattcccgaagaacgtggctagcatttacctctcgctccttaccgctatgatagccggcagacttgtctggggtgcggtcaagttcgttatggcaggcattcagcatacggaattctcattcgcacttttcctcagcggagctgttacaaccgccattcccggcatcattctccagatagtgctcatccccgtgcttgtcatggttgcggagaaggcaaagcttgtacttgaataaatactcgtcttataaggcataaatatggaaaaaacgaaggatatattgctctctctgtataaaaaatacccctcatccgagattcaggacttttataaggcagtctatcaaagcgtgtgcggatgcggtcatcttgtgggagactcatctgccgccgcggactacataagccgtgaaagttcatccgcgacagtggacgacatcgaaagcctcggcaaatactcgcgcgtgtatctcggtcagataaatgacggactctcgccccttacccttgcgaagctgttttctctctcggctgtggtcgaagataaggctgacacatcggtcgagatggacgaaaagctgtccctgctcatggacatgataaagctcggcgtgataggacttgactatattgagagcgagagctatgtcagccgcatgagggagagcggatatcctgcgtgccaccattccgagaagtaccgcgaattgtattcccccgcgtacaggcttctgaaaacggaatacgcaaagtttatccccgcgtttcggctgatagaccggctcatggcggaaaaagaccgcgttattgttgcagttgacggaacgagcgcgggcggaaagacgacgttttcttcacttctcgccgaggtttacgactgcaacgtgttccatatggacgacttcttcctgagagaagagcagcgcactcccgaaagatacgcggaagccggcggaaacgttgacagggagagattccttgacgaggttctgcttccgctcagcaaaggacttgacgtgaactacagaaaattcgactgtaagacatttaccgtgctttcgggtgagacaattcccgcgaagaagctgtcgatagtcgagggagcttacagtatgcatccgtctcttgcgggatactatgacgcgtcggttttcgtctgctcatcccctgaaattcagcgcgagagaatcataaaacgcaacggagacatggcggaaaggttctttaacgaatggattccgctcgagaacaggtactttgaagccttcgacatccgcgaaaaatgcgatttagtgattgaaacagaataagcatacgcctgcttgtccgatattttatgcggacgaggggcgttttttacgttttgtattgactttttcccatcggtggtgtattgtatcttgtgataactgaatctggaatactaagaagcctctgatttaaggtttttattcagagtatcctcaggaagcctctgattcaaggtttttattcagagtatccttaggaagcctctgattcaaggttgttattcagagtatctttagagaggtcgaaaatgaacaactacattggaattgatataggcgggacaaaatgcgcattagtcctcggtgacagcacgggaaaggtcatagacaaggtgagattcccgactacagacgtgcatgaaactgtaggaaaaatccttgatacggcggaggagatgaaatgccgctccgctatcccgataaaggctgtcggaataagctgcggaggacctcttgacccggtgaagggaataatccagtctccgccgaacctgcccggatgggacaacattgagataacgcgcatggtgacggacaggctcggtgtacccgcgtatctctgcaacgacgcaaatgcctgcgctctcgccgagtggaagttcggtgcgggaaaaggcacgaagaacatggtgttcctaactttcggtacgggaatgggagcgggaattataataaacggaaaaatatataacggtgcaaacggaaacgccggagaagtcgggcacatgagattgtctgcgcacggtcccgtaggctacggcaaggaaggctcatttgaaggcttcgcaagcggcggaggtattgccatgctcgcaaagaccgcggctgtagaaaaattgcagcagggaaaaacgtgtgcgtactgtaaatcctacgatgagcttgaagctgtcactgcgaaaacggtagctgacgcggcgtatgcgggagacgagactgcgaccgaggtgtacaaaacctgtgcgggaatgctcggaatggggctgtcgttcattgtagatatgctgaacccagagatgatagtgataggcagtatttaccagcgttcttccgacttgattgagccgtacatggacgacgtaatgcgccgcgaatgcctgcctttgtcgtacagtgcggtgagggtagttcctgcgcttctcggaaatgagataggagacatagcggctttgactttggcaatggaagggggagaaaactgatggaaacactgaacgagcttgtaggacgctatcctgcactgaaaaactgcaagggcgacattgagcgtgcgagggagatacttgtcgagacttttgacagtggaaataagctcatgatatgcggaaacggcggaagcgcggcggactcggaccatattgtaggggagctgtctaagggatttttaaagaagcgtcccgttcccgagagagaccgcgaaaagctgaaagaattataccccgacgagtgggagaagctcgctgacggactgcaatgcggacttcccgccgtgtcgctgcattcacaatccgcactgctgaccgcttttgtgaacgacgtggagccggatatgatgtacgctcaggagctttacgcactcggaaaagacggggacgcgctcattgcgatatcaacctcgggtaactcaaagaacgtagtgaacgccgcaaagctcgcacggataatggggataaaaattatagctctgacgggtgagagagaatccgcgctgtcctcccttgcagatgtgtgcattcgtgtgggagagcatgagacttaccgcgtacaggagcttcatctgccggtgtaccactatctttgcgccgcggttgaagacaggttctatacggaatagtgatttgcactaaaaatcaaagaaagttcacaaaatcttgcttccttttcatccttgactaaagctccgccgcatggtataatggagacaaagaaagaaaggtaacgccgctgggttctgatggtagtgttgccttaaatgaaaaggataattttgatgctgtttttgtctcacaggaataagaaaatatatcttcccgactgacgtgatgttttgcgcattgcacaggtcgggattttttaaaaggtataaaatgtggcaaaaacggcgataattaaggtaaaaccaaggaggagagctatgaaacaggaaatcttcaaaatactcacgaatcagccgcttgcaaaagacgtgtaccgcatgactcttacgggagacacctgcggaatccgtcccggacagttcgttaatataaagctcgacggcttatatctccgcagacctatttctgtttgtgactgcgtaggctgcgtactcactttaatctacaaggtcgtcggaaaaggtacggagcttatgtcgaaaatgacgcagtgcgaggagcttgacgtgctgaccggactcggaaacggctatgacctcacaaaaagcggcgaaactccccttctcatcggaggcggcgtaggagttccccctctctatatgctgtgcagaaagctcgcggaagaaggcaggcacccgacggtagttctcggctttaacaaggcggaggaagtgttctatccgaatgaatttgctgctctcggagcggaagtcaaggttgcgactgtcgacggctctgttggagtgaagggatttgtcaccgacgccattgcagctctctcggatgagggaaagaaattctcttacttctacacctgcggacccgagccgatgctgaaggctgtctacaattcacctgtgcttgacggagtggagggagagttcagctttgaagaaaggatgggctgcggattcggcgcgtgcatgggatgttcgtgcaaaaccgtcacgggatacaagcgtatctgcaaggacggtccggtgctcgaaaagaaagagatactgtggaagtgaggtagtatatggcagatatcaaaacaaaactttgcggaatagagcttgacaatcccgttatagccgcgagcggttctttcggctacggcaaggagtttgaggagttttacgatataaaccgtctcggcgcgttctcattcaagggaactacgtttgagccgcgattcggcaacaacactccgagaattgcggaatgcgactccggaatgctcatctcaatcggcttgcagaatcctggggtacacgctgtcgccgagaaggagcttccgagacttaaagaaagctatcacaaaaaggttctcgccaacgtctgcggattcacgccggaggaatacagagacataatcgaggttcttgaaaactgcgctgcgcgagacatcataggctggtacgaggtgaacataagctgtccaaacgtgagcgaaggcggctcttgcataggtacgtcggctgtactgtcggagagccttgtgaagatgctccgcggagtgacgaaaaagccgcttataatgaagctgacgccgaacgttaccgatgtagccgaggtcgcaaaagcctgtgaagccggtggagctgacggaatatcgctcatcaataccctttacggcatggtgatagacttaaagaaaaagaagcctgtgcttgcgaacaaaatgggcggatactgcggaactgcggcattcccgatagcactgcgcatggtatatcaggtgtacgacgccgtaaaaatccccgttgtcggaataggcggagtttccacacccgagcacgttatccagatgatgcttgcgggagcgtcggctgtcgaagtgggagcggcaaatctcaccgacccttacacctgcccgaagataatagacgcgctgcccgtgactatggacaaatacggaataaagtcgcttagcgaaattatcggcgcggctcactgaaaatgacataaataaaccgctgatttacattagaatgtgtgaagatcagcggtttttgttatgttaccttatgaggatggttacgatttccttgggctttgcgatgtactctactctgccggagtcaacggtaagctcctcgtaaacctcattttcaagaagagacacggactgcgctttctttatgccgaacagtgggcattcgatggagaacttgcgctcgccggaggtggagttgtacgctctgactacgattccgccctttacggattccttgactgcggtgacgacgactgcgttttccgcggattcgagctttattatggacgcgctctgaggcagcttctttgacacgttcttgacggggcggtagaagaggtcgggcattccgggtccctgtacgaacggtcttcctccgatgaacttgttcgggtcgcggcttctcgatgcggagtaaacgggggcgaggaactgcattgcctttgccgcaagctcagctttgacgtgatctccctcgtatggcataacggcgaaatgcgcggtgttctttccgatgcactgtccgccgggagttacccaaagctgcgtcatggtgtttctctcttcccagtcgcctgtaattctaccgacagaacggagaacggtcagcgcgagagtgtcgttttcgtcggtcatctgctcgtattcgtaaagtccctcatggaacagcgcgacaccgtgaccgcctccctcgactgctgcgaaatcgcttgacggatggtcgctgtcataggggtatatgctgaccttgcttctctcaagcacatcgtatggctgggaagcgaagtttgagtcagctttgattcccgtgggaacgagtgcgcggagtctgtggttttcgagcgcgttgtctatttcaagccgaatgtcaagcatttccgcgccttttgcgagtgtgagcgtcataataatgccaatctcgcccgatgcttcctcgcggtctgcttttatggtgagctttaccgtgcgtttttgtatcagctcgttgttctcgacagctgttatctccgctttcgtgccgtaggtggtaatatctcctgtcggatctccgtggacgtagttgtaaagtgttccgcggtcggcagtgtcttcaaacgcaagcagattcttgtattctctgccgcttctcttgtccgtaatatcagccgttccgtcggagtttatctttacgcggagattttcgttttccataacgtcagccgcgcagtccgagattccggcttcaacagcggatttgtccgataccttaacgctgagagtgcggtaggaatatccctcgataacgcccgcgtcaactacaattgtgtatctcgcaactctgctctcaccggggagatttatcgggctgagtattcttctaccgatgtcgggttcgcacttctcgtatacgaagggaacagcattgccgttttcgtcgtacagctcgatgccgccgcggtcctcttccttcatcacgtcgactacagcgcgaacgggtgcgtccgatgctctgtctgtggcgttgagaaggattactctgtactcaccgtcgactttgagcggctcgagatgggagcttagctcgtccatggcgcgtgagaagaggtcggtggtgttttcgtgaatgcggtcgaagcgatccatcatgtgctcgtgtaccgcatcaacggaacagccgcagatggagtcgtgaggatgattttcgatgagcagcttccagaggtagtggagatagtcgtgggggtaatcctttattcctgcggcactcagaagtgtgcagaggggttcaagctctctttcaagctccacctgcgaacgtgcgttagcctgctttaagtaagtgcgtgaggagagagtgccggtcagtacgttagccgcgccgttgtctctgaattcaccgcggaaggtattcagctcgatgccgttttcctcgacttcgcggcgcagtctctgcatgaattcggggagagtgtcctggaatatctcttcatcctcgtcgagcatgggtctaaccttgtccattatctcggtgaggtcttcctgtgcttcaaggtggtcaacgccgttcatgaggaggtagtttcccgtagcgcagtttgcggcagtgcagtttcttccgcagtttctgacgagattcagcgcgccctcgggatcgggagaaagtctctgcgcgttgttgtaccagaatctcatgtgttcgcagagaacctttgagccgtcctctgtctcccagaagaattcggtggttccgcggtcaaagcctcttccgaatacacagtcgcgaagtccggctttgtacagtatctgcgggagctgtgagataagtccgaactggtcggcggcgtatcctatgggcatggaagcgccgaattcacccgccatttcagtgcctatcatgaggttgcgcactgttgcttctccgtcggtgaggtggaagtcgttctgcacgtaccacggtccaacgaggattctgccgtgacgaatgtggtcttcaagctcgcgttttctggacggacggatggtaagatagtcttcaagaactatggtctgcgcgtcgaggtggaaacggtattccttgtcttccttcagtatgtcgagcagattgtcgatgaggtctaccagacgcatacggaagttttcaaacgggagataccattctctgtcccagtgggtgtgtgatataaggcaatatcttttcttcatgtgaaatgtactcctgtgctttttgttatcacttcacattatacatgatttatacggtgttaatcaagagcgaaaaatgtgaaaatgaaactattttttaatcggcagagtcaagcgcgtcggttgtctttttcatctttccgtgacctgcaagggagatgagaagtcccacgagagcgcatccgacgaagagcatgaacaccttgacccatcccgcaccctccgataccgcaccgacagctatgtttgaaacagcggcggcagcatatgagaagcagtcgagcattccggaaacggacgaagcaagaccgacctttccgtagtgcagggggatgaacgtgagcagcattgtgttagctccgaacattgcggcgctcgacacggcgaaaagaatagtgatgaacacggcggtgactatgcctaaagctcccacttcttctcccgcggattttgccggagtgaacgagatgaaagccgtaactatgacaaggcagagggcggagagcgcaaacataaccccgcagcagctcagctcatccagcttaaactttctgaatacgaaccgcgcaccgtatgcaccgcttatgttgattatcggcaggagggagcatatgagggacaccgcggatacatcggggatgaacctgtcgttgagcactgtcggaatccacaagtcaagtccgtccttgagaatgccgttgaacacgattgcaagcgcggtgaagagtatgccaatgctgaatactttaagaaaaggcagcttctcggatttgtttaccgttgttttctcgggtactttcgcgtattctttcagggatgtgaagcagaggaacaccacggcagaggcggcgcagagtattataccgcacacgataaacgcgcatctccatgtggacaccttcatgcacagcgcacatatcatgtagcagacgacggttccgagcgggatagcggttgtgagatgtaccccggcggcaaggcttatctcatgcgtagtccaaagtgagaccgcgcggactatcggcgaccacagcattgagcaggcgaatccgcacaccgcccagaacacgcagaaaagtatgccgacggagctcagccccatgaggatattcataattcccgcaaccataagtccggtgcatatcatagctttcggatgaaatttgtctccgagacagccgtttatgagctgaccgcaggcgtagaatatgagaaagcaggttccgacagtaccgccgagagcaggggagataactccgtcctctgtcatggcggaagtcaccgataaatgggcgaccgagaacagacggaggtgtacgcgagaatgcagaataaaacgacgagccacgattttttctcgacttccgtcatttttcgtgaatttttcatgggcatgaccttctttttacaaaatcaatggtattatatcgcaaaaaacggcggaatacaatatctaacaaaaaaacaagcgacacttttcggcatcacttgcttaaaaatcttatttttttgcccacgtggagggagcgaacgtcagaagaagcggataaagctccagtctgccgagaagcatcgccgcggagagaaccagctttgaaaagtccgaatatcccgcgaaggacgccataggacctactccggcaaatccgggaccgatgttgttgtagcaagccgtgaccgccgtgacattcgtctcaaaatcgagcggttcaaggcagagcaggaacaaaagcagtgcgaacacgatgaaatacattgcgaaatacgacagaactccatgctcggcttcgctgtcgactgttttgccctcgaatttcagggaagacacggagcgcgggtgcagtattcgtctcagctcgcgtctggctgacttgtacatgataatcacacgcgaaaccttcagtcctcccgccgtagaacccgcgcatcctccgatgaacatgagcaggaacaacacggttttcgacagctgcggccagaggtcaaagtcaaccgaggaaaatcccgttgtcgtgattatcgacgagacttggaacacggcgtcggtgacagcacttcccacagaggcggaggtttttaatatgttcgcggtgattatgccggacgagactaaaacgataccgagaaatacgtgaagctcctcgcttttcagtgcctgagagaacttttttatcagaatgaagtagtagatgttgaagtttacgccgaagatgagcatgaataccgccactacccacttgatgtacgtggaatatgacgcgagactgtcgcccttgagaccgaatccgcccgttcccgcagttccgaaagcgtgaagcaaagcctcaaacaggctcataccgccgaacagcaggaaaattacctcgacaattgtcagcgcgatatagatgagatacagtatctttgcggtttcgcgaaccttcggcacgattttgtcgactttaggaccgggcatttccgcgcggattatgtgtatcgagcgaccctcaccgttcggcattatcgccatcatgagaacgagaactcccatgccgccaatccagtgagagaagctgcgccagaagagtgagccgtgcgtgagggcttcgacgtttggcagaattgacgcgcccgttgtggtgaatccgctgactatttcgaaaaacgcgtcgacatatgagggaatatcacccgacagcacaaacggaagcgcgcctattgccgaaagcaccacccatgcgagagctacagtgacaagaccctcgcgcgcgtatattgttctgtcggctttgcgcagcagaaaggtcaaagcaaaaccaacgacagcagcacctgccgcaaccgcaaagtacgacagcgcacaggaatattccgcatagacgagagccgtcacacatgggagcaggagcaggacgctttcgaggagcacgagctgtccgattgtataaaaaatcattttacgattcatagctaaaccccgttatcctgttcacagcgcgatgtcggtcaggtcgtggagcttctttccggcggctatgactattacgcggtcgccagagagaatcatatcgttaccacccggaactatagtcctgcgtgagcgtatgattccggcgatgattatgttcggcttgagcgtgaggtctctcagagggacgtttgttacgactgacgcggagtttacgctgaattccagtgcctccgccgcgccgtccatgaggttgtacatcgtctcaacgttgcttccgcgagagttttcgagtgcgcgcgcatactggacaagcacatccgcaatgacgtttttcggagagatcacggagtcaactcccagcttttcggcgagggaagacagctccggtcggttcacctttgatattaccttcggtacgctttgagactgggcgtagatggaaatgaggatgttctgctcgtcaagtcctgtgagcgcggcaaaggcgtccattgagcgaagtccttcctcaagcagcaactcctgttccgcgccgtcccctttgattatcgtagcgtcggggagaagctgtgcaagctcttccgccttttcgggattgttttcgatgatttttacggtgtttccgcttccttcaagcatcttcgcgagatagaatgccgttctgcttccgccgagtatcatgacgcgttttgcgcttttctgcatgagacccgtgcgggcaaggaagtttgtgatttcgctgtgtgaggcgacgataccgattttgtcgttcgatttcagcacaaagttaccgtcgggaatgtagaattccttatcgcgctgaaccatgcagacgagcacgcgtgtcttgaacttttctgcaatctcacggagcgcatatccgtcaaggggcgagttttctctcagctttaattcaaccacttcaaatgctctgcgcgcgaatgcctcaacttttgccgccgacgggagctttaataggtcaaacagctctcgtgccgccataagctcgggatttatcgccatggataagccaagctcacgtttcatgaagtcaagggaagcgtcgttgtattcgggagtgcgtattcttgcgatagttgcgccggctcccattctcttagcgaggaagcacgagagcatattcatctcatccgagccggtaactgctataaacagctccgcttcggcaactcccgcgtcttcaagcgtttcacagtcggcgcagtttcccacaactcccataacatcatggatattcgcgatttcggtgacgacagcttgctctttgtcgataacaataacatcgtgaccttcttctgacagtttttcgattatagcggagcctatcttaccgcatccgcaaacgattatcttcatttaaatacaatatcctgttaattttattatcgaaactattatactaccgtcaaatacatttgtcaatcgttttcgccgaagcacttgacaatcagataaatatatggcataataaaagaaacaaatgtacgtggggcaacaagaacaaaaatttatatattgcaacaaataacgacaggagatgaaatactgtgtgcggaagatatcaggcttggctggacgacgacgagctgctcggaataattgaaagagagaaaaagggaagtgcggagaagtatttccgtcgcggagaggtgttcccgggggatgagataccgataatctacggttcatacgcggcggtgagagcacatcgggcaatatggggatttcccgcaccttcttcaacagacgaaccacagcagaactttgccggaacgcaggtgaaaagtgcaaaacggctgataatcaacgcccgtgcggagactgctatgtataaacccatgttcaggcagtcgtttgaaacgggacgtgcgcttgttctggcgtcgggctactacgaatggtcgggaaagcagagatggcgttactttgacgagcgcggagcgatactcatggcggcgtttgagagggtgtttgaagacgaaagacggtacgttatcctgacgacacctgcgattggagcgccgtcgaagattcacgacagaatgcccgtatttgtcgaccgcgaggaaatgaaggactggctgtacgatgaatcctacgcaaaggacgtgctcacgcggaaaagagtttgtactctcacagcggaagtatgttgaaaaaagagcagggattcatgaccgccatcagtttgttagttctgtactctaacatttggtggtggaatgaattcctgctttttatattaatgtaagctgttcttcgtcctgctccgtctgaatttggctgagtgcgcttgcgggaatgtcacgctctgcgattttgtagtcaatacccgcttttcttgcctgtgctatctgctgtcttcgcggaatacggtaggtttttccgtcctttatgaaattcgcgcccgtctggtggaactgaaacgggatatcgctgtccacgcactgctgtctgagtgagagaatccattcgtaattgcacattcgcgcgtcctgtcccgattctccgcttgcgttcacttcttccactttctctggattcagatatgcccgaatgtcgagtggggtcagcatgggcgcggctacaatagctctgtggcaaatgggaagcgagaggaaaatcggaagcctgtagtccgccatctcctgattttcgacggtacagccgattatgacgttctcgtacccgctgccccagtcggacggaaggcatttttcaagtcggtcgattcgctttgtgaaaaaatagaagcagcagtcagacctctgccgaatcatgtcccagcagtcttctctccacgggtcggcgtcgctcaagagaaaatccgaggtgaagcaggtgaaaactatcctgccggacggtattttccattttccgtcgcgctttttgcgtatcgggaggtcaaaatccgcgttttttcggcagagatatgacgctttttcagtcccgtacattgcgtcctgtctgtatacatagcagtatttgcatccggggctgatttttgtgcatccgtgccacgggttccagcttgcgtaaatattatcgttctgcaaattacttttcctgcacttcttttccgctgatgtgctcgattactatctcatacatctgcacggcttttcccgaagcggcgatttctttatctgcaatatcttccgttggaaagtacttcatggcgagggctttcaatatttccatcgtctcgggcgtgttttccatgaagcggcatcttccgaacacgactgcgctccggagatacggcgcccactgctcatcgggatttttaatctgctcttttcccacgacggtgaagcataccttgttcgatagttttatcatgtcgtacttgtatccggctctcgctccgtggaagtagattttgttctgctcttcgtcgtagtagtagtttatcggaatcgcatacggatatccgtcctcgccgttcactgccaaaattccgcggcgctctatcttgaggagctgttttgccgcctccgtgctgatttctctcttctttcttcttaattctctgaacataatatcctcattatttctgtttctgcggcgcgaagtagtgctgacgtgcgtattcaaactgctcgttgaatctttgcacggcttctttgctaagcttttcctccggcttcatcatgtcgaacgcgtgcatatccgagtgatacacatccactgtcgcaggaattccgcataacctcagcttgttaaaatattcgacggtttcactgtagaatggctctccgtctccgacaaatgtgtatgcaggcggcaatccgtgatagtccgtaagccttgcaggggacgcgtatggtgagaggtcggttctgtcctgcccgcgaagatagcaccgccatgcgaagtgattacgttttgtgttccagattttgctgtgattgtcgcgggagctttcggtgtcgcggtcgtcaatcatagggtagagcggcatctgaaacgcaatgttcacctctcctgtgtcgcgagcctttatgcagacggatgcgcaaagtccgccgcccgcactctcaccgcctaccatgagctgattttcacgaataccaagctccgcggcatggcttttcatgtacaaaagtgcgtcatagcagtcgtcaagcgcggcgggatatgggaagaacggagctaatctgtaccccggagatactaccactgcgccgaactccttcaccaaatcagccgcgcgggaagcatacaccatttccttcattccgaggatgtagccgccgccgtggagccacagaactccggttttcggctgagtattgcctttgggtgagagaattaatgcaggaatactccgctttttcgccggaatacggatttttttgacgcagatatctttgtcaggcttcatcggacgcatattttcaccccctcgcacacgataactatattttaccgcaggagtttggtgatgtcaatgcaatttttcattaaaatacggcggagtagcttttgcgctcggcggggaagagtatctgctcatcttcggaaactgttataacgcgaaaaccaaagccgactataccaccttcgactatcgtgggtatttgtacaactgtagtaaatcctgcttcgagagaatatgaaaaatccgcacctgtgaaaccgttgtctgatttcttcaaggtgcggatttgttttagatatattctcggctttgcttgcggtacatttcggaatatctgccgttttgtgccatgagagagtcgtgcgtgccgtattctatgatttttccctcacagaaaaccgcgattttgtcagcaacagaggacaccgcgagacggtgagagataaatatcgtggtcttgtccttcgccgcgctgaaaagatccatgtaaatctcgctctcggctttcgggtcaaggtttgccgtaggttcgtcgagcaccagaatgggagagcctttgtacatggcgcgcgctattgccagcttttgtgcctgtcctcccgaaagctccgttccgtccgtgtcaaactggcgcgtgaggtatgtgtcaagtccgttcggcagcttttctacgcattccgtgagtccggtcgtctccactgctttgtcaacagccttgtcgtctccgctctcgctcatcgtgatgttttctctgacagtgaacgagaaattcttgaagtcctgaaataccgcggatatcgtctgaaaatagctgtcgttcggtatatcccatatgtccactccgttcagcgtaatttttcccgcagtcgggcggtagaatttgcacaggagctttataaatgtgctttttcccgagccgttctctcccactatcacgagcttttctctgtccgatatggtgatgcttatatgctcaagcaccgttttgtccgtgttggggtaggcgaaagagacgtcatggaacacgatttcagtttcttcggacgcgggaacgctctcgtcagaactttcttcggagtagttttccttcaccgccgtcagcagcttgttgtattcggcaatgtcaagcgcctgcctgttgtaccgtcctattttgtcgctgacggaggagagctgcgcggagagcattgtcacggctgaaaaatacatcgtgaagtccgctatcgaaattacgccgtccaggtatctcttcgagagaatccagatgagtagaaaggtctgcacgccgacgagcactgccattaaaatacccgaaagcgcggaccttttgtactccttgtattcgatgccgagcatggtgtttctgtatttcgccaccttctgcatgaatcggttttgcaggttgttcaggcgtatttccttctcggcaccttcgctaaaataggagatgtagttaagataatccccgtttcggttgttctccgcctcgagagttctgcttttttgtgcgaagtggtattctatccttacaaatacagctttcgcggtgagggtcaggagcaccaaaaggatgaacaaaaagtcaaggcgaactacaatccatgccagtccgagaatcgctatcacgtcggatatgattccctcgatcgttcccatcgtgcttgtgaggtctgcggcgcgtccggctaaacgaatgatgtcgcgtgtcgtcgggtcttcaatcgcgctaagttcggtgtgcatagagttttgaccgactttttttcttatctttgaagaaaacatcgccgcgcggagactgcttttgttcctcagtacgacctcgccgaccttcagcaggagaagcactgttgcatagccgagtattacggaaagcgacgcggaataagactgcccactcatgagccgctcgatgatcagcttcggaaaatagacagacgcaaggggcaggaatgcgctcactataatctgcggaacggagaaggcaaagtacgtcggctcgtattccgcgatgattttcacgatttccagcggagttctaagaagcctctgatttaaggttattttgcgacaaaagcccctatattttagccttttatcgcaaaattccgatttattcagagtatctttcagtttgtcgtttatctttcccacttctcagccctccttgtagtatttcgcctgtgaattaaacagctcataatactcaccctgcctgcgcatcaaatcgtcgtgacagcctgtttcggtgatttttccgtcggagagcacgattatcctgtcgcagaattttgtgctcgacagcctgtgagaaatgaacagcgcgagtttgttttccgaaagctcgttaagacgcgagaacagctcgtattccgctatcgggtcaagcgcactggtcggctcatccaaaacgagaatcggagcgtccttgtatatcgccctcgctaaggctaacttctgcccttcgccgcccgagaattcgattccgtcgttgtcgagcgtttttgagatggaagtatctatcccgttcggcaggctttcgattttcttgtcgcttccgctctttttcaggcacaatgatagcttttcttcatcaaaaggcgcgtccaaaacgacgttctccttcacggaatacgcgaacaggtagtaatcctgcaaaacgataccgattttcgcggcgtactgctcatacgtaatttccctgatgtccactccgttcagcgtgattcttccctcggtggggtcgtacagacgggtgagcagctttacaagtgtggtttttcctgagccgttcagtccgacaagtcccactctttcgctcggtctaagctctaagtttatgtttttcagcaccgttttttcggttttcggatatgtaaaggagacgttttcaaaccgtattatcgggtgcgagaagtcaatatccttgtgtggcagtgcgttgctcgcgtgaatattgcttccggcggtgagtgtgtcgcggtattcaaaatagcagtcgagaacttttagagtcctgccgaagagcgcgattttctcgaaaaaacctaaaatcagggagacaaacagcgtagtgcttcccaaaagtaccgtgtattcggagatggaaatgcgaccggaaaacgccatatacgagaaataaagatacatgagaaccgtctgcgcgactgctatgaccgtactgccgatgtttatcttcattcttctgccgagcaggtttttcagtctcttgaactgtccctgcatgattccgtcgtacttgttcacggcgtagtcttccgcgcggtttatcctgacttccttcgcgtagctgtagtccgtcatgacgagatagaggtaatcgagcttgcggtcgtcctgcaccttttcgttttggaacgcgagctcgtcctttttcgtctggaagataaaataaacggacgcggctgaggtggcggcaaggatgagcagaaacagcggactgaaatgcgatacgatggtgatgacgccgaaaaactggacgatatatcttaccatatcccccaaatgatcgatgtaaaacgcaggcagagctaccatagactttctcttcaagtcgagaatcgttccgtcctgtgcgtagtggtagttcacgttgaccgaatcctgtgcgtacatatactgcgcggtgttcgtcgcctttcgtcccatgtagtccgtcgcgagggtcagcagctcttttactaccgaaatcgccaaattgacggaggtaaaaatgatgatgagcgtaaggatttgcgatgagctttgtcctgaaacgagcgcgtcaacgacaagtccgataccgactatgctgccgaacgacaggacagcccgaaagatattcgccgcgcctgaaacgagaacgtacccccttgcgcttttccatgcgttactcagcaggaacagtatctttttgtgaagcttcattgtagtcacctgcgtttcgattttgatgcttataggatagcataaattccgcttttgttcaagaagaaaacgaaattcaagaaaagtttgtcgaattcggcggatatggtgaacgtaatttatgcaatgtgactgaaatgcagcgcaaaaaacgaccccatagaatttcttccgtgaggtcgtgattttttgtttatttaagaatcagcttgccgcgagcttatctgagggcagcctgtgcagcagcgagtcttgcgatcggaactctgaagggtgagcaggatacgtattcgagaccgattctgtggcagaattcaacagatgtcgggtcgccgccgtgttcgccgcagataccgatgtggaggtggttgttaacgggtctgccaaggttgatagccatttccatgagcttgccaacgccaacctggtcgagctttgcgaaaggatcgttctcgaagatctttgcgtcgtagtaagcattaaggaacttacctgcgtcgtcacgggagaagccgtatgtcatctgtgtaaggtcgtttgtaccgaagcagaagaagtcagcttccttagcgatttcgtcagcggtgagagcggcacgaggaatctcgatcattgtaccaacttcgtattcgagttctacgcctgcagccttgatttcagcgtcagcggtttcaacaacgaagttcttaacgtacttgagctccttaacttcgccaaccagcgggatcatgatttcgggctttacattccaatcgggatgagccttcttaacattgatagcggcgcggataacagcggatgtctgcatcttagcgatttcgggatatgttactgcaagacggcatcctctgtgacccatcatggggttgaactcgtggagggaagcgatgatagccttgatggtttcaacggacttgccctgagtctttgcgagagcttcgatgtcttcttcagcggtgggaacgaactcgtggagcgggggatcaaggaatctgatgcaaaccggtgtgccttcgagagcttcgtagagagcttcaaagtcagcctgctgcatgggaagaatcttagcgagagccttttctctttcttcaactgtttcggagcagatcatttcgcggaatgcgtcgattctgccttcgccgaagaacatgtgctcggtacggcagagaccgataccttcagcgccgagttcacgagccttcttagcgtcgcgaggtgtgtcggcgtttgtacgaactctgagctttctgtacttgtcagcccatgccatgatacgaccgaattcgcctgcgattgtagcgtctactgtggggataatgccgtcgtagatgttacctgtggaaccgtcgatggagatgtagtcgccttcgtggaaggtcttgcctgcgagggtgaacttcttgttttcttcgtccataacgatttcggagcagccggatacgcagcaagtacccataccgcgggcaacaactgctgcatgagaagtcataccgccgcgaacagtgaggataccctgagcagccttcatgccttcgatatcttcgggagatgtttcaagacgaacgagaactaccttttcgcctcttgccttccattccttagcgtcgtctgctgtgaatacgatcttaccgcaggcagcaccgggagaagcgccgagacccttgccgatagcttcagctttcttcagagccttagcgtcgaactgaggatggagaagtgtgtcgaggttacggggatctatcataagaacagcttcctgctcggttctcatgccttcgtcaacgaggtcgcaagcgatcttgagagcagcctgagcggttctcttaccgttacgtgtctggagcatatagagcttgccgttttcaacggtgaattccatatcctgcatgtcgcggtagtggttttcgagcgtcttgcaaacgtcaacgaactggttgtatgcgtcggggaacttttcttccatctgcgcgatcggcataggagtacgaacgcctgcaacaacgtcttcaccctgtgcgtttacaaggaattcacccataagcttcttttcgcctgtagcagggtcacgtgtgaatgcaacgcctgtaccggagttgttgttaaggttaccgaataccataggcattacgttaacagcggtaccccaggaataaggaatatcgttgtcacggcggtaaacgttagctctggggttgtcccatgaacggaatacggcgcggatagcttcgtagagctgtaccttaggatcggacgggaaatcttcgccgatcttagacttgtattcagccttgaactgctgagcgagttccttgaggtcgtctgctgtgagatcaacgtcgaacttaacgcccttcttttccttcatctcgtcgatgagctgctcgaaatatttcttgccgacttccataacaacgtcggagaacatctggataaatcttctgtaggagtcgtaaacgaatctcttgaacttgggatcgtcgtttcctgcgatcatagcttctacaacttcgtcgttaagaccgaggttgaggattgtgtccatcataccgggcatggatgctcttgcgccggaacgaacggatacgagaagaggattcttgagatcgccgaactgcttgccgttgatctcttccattttagcaacgtagagcatgatttcgttcatgatctcgtcgttgatcttcttgccgtcttcgtagtactgtgtgcaggcttctgttgtgatggtgaagccctgaggaacgggaagaccgatatgcgtcatttcagcgaggttagcgcccttaccgccgagaagctcacgcatgttagcgttgccttcggagaaaaggtaaacatactttttggacatctttgaatgtacctccgcaataaatagtatataatttttatttgctgacaaaaattatcggcgcggcggaaaaactgcacgaaaaaaccgcgcggcagcctacgtcacgcacctgctgcactgcatattataccacttttcgcaccgtttttccacataaatgcaatggtttacgaaaaatttactttttgcgcctcattatgctatatgacggaagccgccgcaaaattaaatactttaagttgactgcaatgcgcatttgtgctataatgaagaatacagatactgacgcgacagacatttgtgattttgataggatacatatataatgtttttaggaatatacaacgcccctcctgacagcgaagtcgagaaagagctgcgcggagacattgacgaccgtgcggacgttgacaagctggtgaagcgcgcccaaaacggtgacgacgaggcgttttcctcccttgtggagatatttgaaaaatttgtctataatacggcggtgaggtacctttctgctgccgctcagcctgcggaagccgcggacgacatagcgcagaactcgtttatcaaggcgtggcgttcgctttcgtcgttcaggggggagtgccttttttcgacatggctgttccgcattaccgcaaattccgcgcgggactacataaggcacaaaaaccgtcaccagaccgtgtcgctgacatcatccgaagaagacgacgatgaaaacaaggaatgggatgttccggtaacttccggagatacggttccggagtcatcgcttgagaaaaaagagctgatactcggtgtgcgccgtgcgatagaacagctgccggaggatcagagggcagtggtcgtaatgcgcgacatacacgagctgccgtacaagaccatagccgacactctcggaatcgaactcggtacggtaaaatcacgtcttaacaggggaagagcaaatctcaaaacaattttaaaaaacgggaactttatttaaatattcggcgtctaatggtcagatgattaagagacaagatatgattcattaaaattagattaaaaatacaactttggaaagcggctgcgctgataacgatgatgaatattgtcctgaatttagcgaagagataaaagaggtgcgtggtcagatatgagtgaagatttaagatacaacgaagaagagaacggtgctgtgttctccgacgaggaaatgaaaaagtactcgtcccttcttcgtgcagcatatcctacgccgcaaacgagcataaaaaactccgtcatggcacagatacgcgcggaaaaagacgggaaggtactgaaggctgccgactcaaccaaaaataaaacaaaacacagtaaagcaaagaggcttcttgttaggtacggaagccttgccgcttgtttggcgatagttacacttgtaggggtaaatgttctgccgcatataatgaaaaaatccgcatcgatgaacgatacagcctcggcgtattcacttgaagccgaagccgacgttctcatctccgatgaaaatccggcagaggaagagagaagcgcacaaagcaatgccgcgagaaacgatattgtgaaaaactcgcatatgtcgctctcactcattcctccggtatacggcagcgcggtgattgaggaagaaaacgaaaccgctctgccggaatcttcggatgacatcccggaacgcgccgagcctgaagcggagctgaaatccgcgccgacaaacgatttttccgaagaagcctgcggcggaattttgatgggctccgcagccgccgaagagggtgacgcgggagatgacagagcaatgaattcgatgatgacttccgtggagctttcgtcgactcacttcaactatatatatattcccgtgaaaagctgcgcgcattcgtccgtgttccgtaattcttaccacgatatcccgaagaacctcgttgctcttgcgggtaaggaagaattcagcgactgggcgttcagtctcgcggatgaggacaagtgcgcggtcaatatagtttcgttctacagatatttctccgagaaggacgagacgtttgccgctaagttcagagatttcgctctgggagacggcgcatactactgcgatatccccgatgtatctctctttgaagagggaaaatgggacgagataacggcgtattacgaaaacggcggagacaagacaggctcggagcatgactacttcgagtacaaatacaaaac

SEQ ID NO: 3353 - DNA, 20246 bp, Unknown
  16S sequences of unknown bacteria
taagagcctggacgcatggcactgcgcaaactgatggaacaactcaaacagcagggcaaaacggtggtgctcaccagccatgacatgggagaagtggaaaatttgtgtgatactttggctatcttggcaaaggggaaggtggtgtttgccggtacgcctcagcagctccggcagcaggagggacgggcgaacaaggttattttgcacaccgatggggaggccatttgttttgcatcagaagatctggggagagatctgctttctcagctggaactatgccgggccgcagggcaaaaagtcctggatatccaggtggaacgggactctttggaacagtgttttctccggctgacaaaggaggaaaacaaatgaggggattgttttatggtgtcctattgcagtggaagatggatcttcgcagcaaaaccatgctgattgcctgctacctggtgccgctggcctttttcgctttgatgggaggcatttttgtctccattatgccggagagccggcagactctgacccagaccatgacagtgttcgccatttccatgggagcactgattggcttgccgcccacattggtggagttttatggaagcgatatccgtaaagtgtatcaggtcagcggcattccaggatgggtggggtttgttttggccctgctgtcggccttctgtcatcttttgctcatgagtgtgttgctatttggcctttcgtttctttgctttggtggggaaattccctcaaatttgcaggagtatgtgctggctttgatcttgctgctcctaacctccttattcatggccggcgtggtagggctgggtgtcaaagatcaggccaaaacctcgttgttttccattttgctttttctgccttcgattttgctgtcgggggtcttttttccgacccagctgctgtctcctgttttggaaggcgtgggaaaatgcttccccgccttctggggcagtcgtttgctgatgggtggatttcattggacggatatcttgcctcttgcagggcttctgtttttatatggcggcatttgtattctgctgctgaaaaagagctgaggtatggttctttgagatttttttcagagaattttatggaaaaacagaaaaacttcccattgttcagccaatcgtcacatttgctgctggcgttggtgtttgtgctccggtaccggcggaaaaagtgagttaaggcggttttggatggtcaaatccatgaaaaagacaaaaggcccagtgtaaactgggccttttgggctgttttaaaggaaaacttttttggtggcgattttttcccggaatgcctggtcatgctccacaaaaagcatggtgggagcaaactgttggatcagttcttctatttgaaggcgggaatagatgtctatgtaattgagaggctcgtcccacacatacacatgggcccgctgacaaaggctgcgggccagcagcacctttttcttttgtccctgggacagatcttccaggttcttttcaaattggacccgggcaaaatccattttacgcaaaatggccttgaacaggctttcatccaggccttcttcctggatgagccgggacaggcttccccgaagaaaggaggcgtcctggggcacaagagagatcacaaggccggaagccttgtgcatttctcccacataagggacagctccgtcggtcagcaaccgaagcaggctggtttttccgctgccgtttttgccgacgagggccacccggtctccctgctccagggtgaaggacacaggcgggcataccggcgtgtgaccgtattgtacctggacctgagaaaaggcagccagccgctgggagtgaaaggagagaggagaaagtttcaggctggagaccgtttcctggtttttgagaagggccgatttgtcctggatggcctgctgttgccgctgctttattacctgggatcgcttcatcatcttggccgctttatggccgatgtatccccggtccactgggccgttttgatatttggccttttccgcctgctgtgaccaggtggccgagcgttgagcggctttttccaggcggcggatgtcctttttcaggctttcctgctgtttttcctccagcatttgctgccgctggaaattttccatccaggaagaaaaattccctttctgcacttggatatcggcccggttcaaagaaagaatatgatccacacagccgtccagaaaccggcggtcatgggacaccagaagaaagccctgtttccctttcagataggcggccactttccgtcgcccttcttcgtctaagtgattggtgggttcgtcaatgagaaggaagtgcccttctttcaaaaagagggcagaaaggagcaatttggtctgttctccttgggagagggaggaaaagggccgctccaaagccgcttcctccacatccagcagagagatctcccgggcgatttgccagggctgggcctgggggcacagtgcggccagaacttctccggctcgatgttgcggatgggggacaggataggggaaataatcaaactccaccgaagagtgaatggagccgccatagggatattcccccatcaacaggcggagaagggtggttttgccccggccgttgcggccgataagccccagcttccaccgggtgtcgatttgaaaattggcatgagagaagacctcgtcatagctggaagggtaggaaaaagtcagatcggttacttggatgagagacataaaaaacctccttggctgcgtttgaaacagtaaaaaatgcaggccgagggaagttctttcccccggcctgcacagccaaaagagccgtctgcaccagacggcaaaagggaggaaagggcgcacttctcctgcggcagcgcggcacaaggccgtaaaaaacacattaccggcaggaagaattgcgcatctttccactcctttctcatccatatttcttttcacatgatacacccggaaagggcaaaatgcaagggttagggaagattcacatgcttcacatggagaaaacgcatccggggggcatcgtatgtattgagagggcggagataggcgtcataggtatgggtggcgatgaggatgctgtcccgggtggggatggggccggtgcggatgaccagcagagagtgatagaactggccctcctgggtgcccagctggatcacatccccgggaagcaggcggaagatgggcacttcctccatcaccgggccggggcctttgtttccggtcatgaagttgtagaaaaaatccacccctgtccaggcgggggcccgggaagagggagagcggtaataccagccgaaggtgggggtgaagttcatcacaccggacccggcgtaaacgcattgggagataaagttggtgcagtcgccccccagattttcaaaatccagaaaggcaggattgcgtcccagagcccatttgcgtgcataggccagggcggccgggcggtcatagcttttttgcggcatagtgaagaagcctcctttggacttgcgatcttttattattctatgctgcgcttcatccatgggagaaagtccacaaattaaagggagaaactttggcaggggccttcgttgactttgcttttttccaccgatataataaaaccagtgctgtaaagctgtaaaatgaaatgaaaagggagttgtgatcgttatgtccggcaagatcgcctatgaggccatcgacaaaaaccgttctcaactggaaaagctgagcctggatatctgggcttgcccggagggcggataccatgaatataacgcccagaaatggacggcggagcttttggagaaaaacggcttcaccgtggagctgggggccggggaagtgcccaccgccatcaaagccacctggggaagcggcaagccggtcatcggctttttgggagaatatgacgctctgcccggtctgagccaggaagtgggcacagagcagaaggctgtggaaggccaggcttatggtcagggctgcggccacaacctgttgggcgttggccatgtgggcgctgttttgggtctcaaggccgaaatggaggaaaagggcctgaatggcactatcatttatttcggatgcccggcggaagagctgcttaccggcaaatcctttatggcccggggccatgcctttgatgggctggactgcgccatcgctttccatcccggcaccgccaatgaggtgaccatgggcaattccctggctctcaacagtgtgaaattccatttccatggcgtcaccgcccatgccggcggcgatcctcacaacggccgttcggccctggatgccgtggagctgaccaatgtgggcgccaactatctgcgggagcatgtgaccaccgatgtgcgtatccattacaccatcaccgaaggcggcacggcacccaatatcgttcccgacaatgccactgtctggtactatgtgcgggctcccaaacgggagactgtggatgaggtctatgcccgcctggtgaaggtggccgaaggcgcggcccatatgaccgaaaccaaactggagatcgagtttatgggcggctgctatcagacgctgaacaacggcgtgctggtggatctgatccatgattgcatggtggagactccccaggaggcctggaccgctgaagagctggagtttgcccagaagctggacgaggcccggcccgatcagtatgccgcagccatcgccggttacggcctgccggaaggcacccatctccacaccggcgtcctgcccgtgggcgtggaaggcaatttcggttccactgatgtgggcgatgtgtgctacatctgtcccaccgtcacttttaacaccgcctgcgagaatgtgggcgctcccggtcatagctggcagatcacttcctgctctggcagcagtgtgggccagaagggtatgatctatgccgctaaggccatggctctgtggggcctgaagatcctggaagatcctcagattctggagaaggcccagaaggaattcacagagaagaccggcggaaagccctatcattgccccattcccgccgatgtgaaagtgccccagtaaaatgaaagccaaggccccggaactcttccggggccttcagactgtcgaagaaccgatatagccagagggaaggagctgcgttacctctcatcaatccgcaaaaaccagcgacctgtgcggcggtttttgcacttctcaaggggcaagtgtgcgccaaaggcgtgcatgcagccacttgcaagaactcgaaaaagtggcctgagccactttttcgacacgctccaaggccccggaaatcttccggggcctttttgcaaggagggactatggaaaaaacacaagaagggcttttgcttcaccgggcttactcctttgccgccttataccacgaagggcaaaagcggaaggggagtcaggtgccctacatcgcccatccggcggaggtggcccagatcctggctggggagggggcggcggcggaagtgatctgcgccggcctgctccacgacactttggaggatacctctgccacaccacagcagttggaggagatttttgggcctgtggtgcggcagctggtggaagggtgcagcgaggacaagactttgtcctgggaagagcggaaggaacacaccattcagatgctgaagtctgaaatttcaatggatgtaaagcttattacctgtgcagataaactttccaatctgcgcagtatttgcctggattatcgggagatgggagatgctctttggagccggtttcaccggggaaaagaaaagcagcgctggtattaccgggcattgggggaggccatggcgcctttggagagccattggggactggtacaggaataccggcagctgctcaaagaagtttttcctgaagaataaaaagtgggacaaccttttgggttgtcccactttttatatttatcgatagcggtgggagtattgtccgggggagaccccaaccatgcttttgaatgtgcggataaaatgagaattgttggaaaaccccacgatctcccccgcttgctgcaccgagatgttctgccgcagcagctcccgggctttgaggatgcgcagattgatgatgtattcgttgagaccgaaaccggtcacatccttgaacaaatggcacaggtagtacttgctcatataaaactgttgggcaatgctgtccagagtgatggggttctggaagttctgttgcacataggacaaaatgggctgcactttgtggaagctgtccttttggacgatgagatgatcccgatgcacatggtcatagagggagttcacatagagcagcaactggataaaggccatctggcggcggagatcgtccccgtattctcccttctgcccggccttctgggccttttcgaaataggacaggagctgctgcgtctgttcctcgctcagctgcacattgccggtataggagcctaccggatgctcaaaacagcggagcagatcggtctggggagtggaaaggccagcggcgtattcggggataaagtgagccacataccggtcgtagctgggctgggtgctgccggcgctgcggtgcagatccatgctgttgaacaccagaagcccgccccgcttgatggggtaggtggattcccctacgaaaaattcgccgccatccgacaggcatagaaggatctcataggtatcgtggaaatggaacttgtccattttccaggaagcattctgatgaaagctgatgtagaaatccttgcagaaattttgcttgttgtcggtttccataaaagaccctccccaccggttcgctgaagtatctccagtatacaccgaaataacaagatatgcaaacaatgtctcaaaatttcaaaagatttttgctcccttgaggtctagaataaggagtgttgaataagccaccggccctccgggccatgaaaaggagcgatcacatggcaaatgcattgatccgcccgatgagcggagaatatgaggaatatctgcgggacgaatcccgcagtgtgggaaaggcggagagtatttctttcccccgtaccacagaggatgtctccagcattttgaaagagatgtacgaaaaaaagatccctgtgacggtgcagggctcccgcaccggtctggccgcggcagccgtgccctacgagggacacgctatgaacatgagccggatggacaaggtgctctcctgccgccaggatgagcagaccggcatattttattttaccctgcagcctggtgtgctgctgtccgagctacggaagatgatctccggcaagcgttttcagacggcggattggaccgaggaagccaaggcggcctatacagccttctgccgggcgccggagcagttctttaccccggaccccaccgagacttcggcctccctgggcggcatggtcaactgcaacgcctccggggcccgcagcttccactatggttcggtgcggggatatatcaatggactgaaagtggtgctgatggacggggagactctgaccctccgccggggagagcaatttgcccaggggagagaggggacgctgtggaccgacagcggcaaggaaattcactttacactgccttcgtatcagatgccccacaccaaaaacgcctccggttattacgccgaagacaatatggatctcatcgatctgttcatcggcagcgacggcacgctgggcgtgacctgtgagattgagatccggcttctgcccctgccgcagatcatctggggtgtcacggccttctttgaccaagaggaaaaggccctgcgttatgtgcgcctcatccgtggggagcagctggagggatgcgaccgttttgatatccatccggtgtcggcggagtttttcaatggagatgccctggagattcttcgccgggaaaagcgggagaacagcgcttttgcccagatccatgacattccccagcaatatgagacggccatttatgtggagctccatggggataccgaagaggatatgacaaaccggctgctggagctgggaaaagccatccagcaggccggagggaaggaagaggacacctgggtggcccgcagtcagaccgatctggaccggctgatgttcttccgtcatgccattcccgagtgcgtcaatatgctcatcgaccagcggaagaaaaagaacaaggagatcactaagctgggtaccgatatggccgtgcccgatgcagcactggaagagaccatggcgatgtataacaccatgctgaaagagagagggctccagtcggccatttggggccatgttggcaacaaccatctccatgtgaacatcctgcccaatgacagcgaggaataccgaaaaggcaaagagctttacaacgactgggctgcaaagatcacagccaaaggcggcgccgtttctgccgagcacggcgtgggcaaattgaaagccgggttcctgaaggtgatgtacggggaagagcacatcagggaaatgcggcagctgaaaaaggcttttgacccccagaatttgctcaaccggggaaatctgtttgcgccggaggaggaaaacaaatgaagatcatcgtttgcatcaaacaggtgccttccacaaatcaggtcaaattggacccggaaaccaaaaccatcatccgggatggacgccagtcggtgatcaatccctttgatacatacgccatcgaagaggccgtgcggctgaaggaaaagctggggggcaaagttaccgctctcagcatgggtatcccggccacccagcggattttgcgggaggccatgtcccagggagtggacgaaaccctgctgctcagtgaccgggcctttgccggggctgataccctggctacggcctataccctggctctgggcgcacgccacatcggggattttgacctggttatctgcggccgcatggctaccgatggcgataccgcccagatcgggccggaactggccgaggacctgggagtgccccatgtaaccaatgtgtccgaaatactggaagccagcaatacggagcttctctgccgcaaagtcaccgattatggcactcaggtggtgcggatgaaactgccgggggtcatcaccgtggccaaggacatcaatatgccccgtatggcctccatccgtggcgtgcgggagagcctggaggctcccttcaccatgctgggggcagcggacaccggggcagaccccgcccgcatcggcctgaaaggatcgcccactcaggtggtgcgcacctttacgccggagaaaacagtggaatgtcagttccttcagggagatgaaaagcaggcggccggtgcgttgtgccgtttgctgaaagaggaacatttgacaggggaggaagcatgatggctggtatcgtgatcgatgaaagccgctgcgttggctgcggcttgtgcgtgaaaacttgcccccagggggccattgagatcaaagacaaaaaagcccatgtgggagaaagctgcatcgcctgtggtatgtgtctggactcctgcaaactgggagctatctcccgcgtacaggaaaagggcggggaagacctggagagctggaaggggattttggtggccgccgaggcctgggaagggaaactccacaatgtaaccctggaacttctctgtaaagccaaagaacttcagtgcgattcaaaatgcggcatttctgcctttttgatgggcaaagatgtggagaagctggcccaggaactgatcgaccatggagcagataccgtctatctgtgccaggatgaatcgctggcctatcccacagaagagccctgggccgatgccctcgccagcgtgatcgaaaaggctcgtccggagattctgctgtttggggccactgagttcggccgcagtctggcgcctcgggtggccgcccggctgcgcaccggccttaccgccgactgcactgtgctggagatcgacaaggaaaccgggcttttgcagcagacccgcccggcctttggcggcaacctgatggccaccatcgtttgccccaaccaccggcctcagatggccaccgtccgtccgggggtattccccatgggacagggggaggcacggcagggtactgtggtacgccttccggttccggccctctccggccgggtacaggtggaatcggcccagcctgcgccccagagcaagaccattgccgacgctcagatcattgtggccgtgggaagaggcattggcagccagaaaaatatgcagtatgcctatgagctggcccgactgctggggggccaggtaggcgcttcccgtcctttggtggatgccggatgggcccaatatcccatgcaggtggggcagaccggcaagacggtggctcccaagctgtatatcgcctgcggcatttccggggccattcagcacctggccggcatcggcggggccgagaccattgtggccatcaacaccgatccggatgcgcccatcttccaatcggctcactatgccattgtgggcgattgtgttgaggtgctgaaagagatgattgctcagctgcaaaaataaagagaacagaaaaagcggaaggggcgtcccttccgcttttgggctgttttgtgttagtccagaaactcttccagtacatcggcggccagctccaccgtggccaggcaccggtctccctctacaaagtatttttccttcacattctggcacagttcgctgccggccttctcctgaaaccgggtgacgaaagccttcaccttttcccgcatttccgggtttccgtgggcatccaggtccatcccgccggtgcgcagggcaatggcagccgcgccgccggctaccgcgccgcacaggctgccgcagcatacgccgccgctgaacgcccctatgagcttgaggcattccggcgtcaccggaatgttccgatcttcgcaggccgccagaaagagggattccgagcagcttttgctctggccgatatagtacttgaatacatggtccttgatcatcttctgttctcctttttaccgttggcaggcggttgcaaagtcctgccggatgtggtacccttgatttgttgcttttgctactattataacgaaaagagaggaaattggaaatgagtatttttgaagcactgatgttggcttgctttggggcggcctggcctatgaacatcgccaaatccctgcgcaccaaatccaccaagggaaagagcctggcgttcctcatggtcgttgaaattggctatgtggccggcatcacccacaagatcctgtacagccaggatatcgtcatgctgctgtatatcatcaacttcctgatggtgggcaccgacatgaccctgtatttcatttaccgcagtcgggaaaagaaagaggaaaaagcgaaggagctgaaaaaatgagtctgtgccttacaatgcagcaggaaaaagagatcgattccattttccatcgctggcaaaagggtttgtgtcccggcgggcaggtgctggtgcgccggaagggagaagtgatctacgataaatccttcggctatgccaatctggagcacaaaattccggtgggagaaaacacggtatttcatgtggcttcggtttccaagcaggtgacagtgctcagcctgctgcttttggccgaagaaggaagggtgtgtctcaccgacgacatccgggactatgccccggaactgattctgttccgtgagcctgtgaccttgtatgatctggtgcacaacatttccggtatccgggatcagtgggagcttctgatgatccgtggtgtgcgcattgacgacaccatcaccatggaagatctgaaacggatgatctccatgcagaccatcctgaattttgagcccggcagccagtacatgtacagcaactccaatttcaccctcattgcccgtgtggtggaaaaggtctccggcctgaacctcagggaatttgccgcccagcggatctttgctcctttgggcatggaccatacctgcatcaaaacggcctatactcaggtgatcccggggcgggcctattcctatgacgatgacggagaggggacatttacctatcaccccatcaactattcggcctatggggccacatccctgcacaccaccgtccatgatttgatgaaactgctggaaaactacaaaaaccccaccatctgtcggaaagaaacggtggaaaagatgatggagcggccggtgctggccgatggcagccgcagcatttacggcggcggtctgatgctgggagaatacgaaggccatcccttcctggagcacgggggagtggatgcggcttaccgggcccataccatccgtttttacgacccggaagacgatctggacatcgccattgtcagcaatacccagaacaccattcccggcgtagcggcccggcagatcgcccgggtggtgctgggattggaagaggaaaagcctcagcatcagcagtatctgctggagcaggcgccccagcaggaagaaaccggcgcttattgggcggaagagcccagcctggcttgcttcactgtttgccgggatcaggaaggccagctgcatctgggagaggagaacggcacgaccctccatcctgtggagggcaactgctaccgcatcggttatttggaagatgtgatctatctgggcaaagaaaaggcggcctgccagatgggagccaatctgtatcccttggtaaaggtggataccgcttcccaggacaccgactttttgctggaatacgagggcacttatcaaagcgatgaagtggacacccggtatttcatcaccgaagaggaaggttttctgtatgtttcccacacccgccatggcaagggccggctgtatcctctgggccgggatcagtatggcgtgcagatcggtggtctcactttgcgcctgaccttcaccagaggttccggcaaccgggtcacagggcttgtgatggacgggggacgagtgcagcatctgggatttacacgggaagaaatgtaaaaatagatagcaggcaaaaagcggggaaatacaccccgcttttgccctgaacaggaggaaagaccgatggagagaagttcgccgcaggcgatttatgatttgctgaaagaatggggcattgaattcaagagcatggcccatccggaagcggccaccatggaggattgcaaagccatcggggaaaagctgggtgcacctttttgcaaaaatttgttcctggccaaccggcagcaaacggaatttttcctgctgctcatcggggaggacaagaagttccgcacggcagaggtctccaaaaagatcggtcgctcccgcttgagctttggcaacgaagacaagctgtatcaggccctgggcgtgcgtcccggttccatttcgcctctggggctggtgtttgacgaaaaccatgagatccatctgatcgtggatgaggatgtggccgcgctgtccgccttctgcgtccacccctgccgcaacaccgagagcctggtcatctcccaggaagggttccaggaatatctgaagcacaccggccatacccctcagtacatccagatcaccggggaagtgccggagaaagaataggaggaacgaaggatgaaagagctgctgcgggagctggtgtccctgccgggcacctgtgggtttgaagaaaatgtggcccaatacctttaccgccgggtggcgcccctggccgacgaagcctatgtggacgggctgggcaatctcatcgtgatgaagcagggcggtctggaaggtcctaccctgatgctgtcggcccatatggatgaagtgggctttatggtgcggaagatcgagaaaaacggcctgctgcgttttgaaaaactgggcggccacgatgaccgggtgctgccttcggagcatgtgctggtgcatggggccaagggggcctgccatgggatcatcggcacaatttcctgccatatgcgccgcttcgatgatgaaaagctggtgcggcattatcgtcagctttatatcgatgtaggggccagagatgacgccggagtgaaggaaatgggcatttcggagggggacggcatcacctgggccacacctcttcaggacttcggacagaaccgggccctgggccatgggtttgacgaccgggccggctgtgccctcttggtgaaagctctggaagagaccgatttctcccaggttcatggcaaggtgtatttcgtcttttcctctcaggaagaagtgggattgcggggcgcccgggtagcctcccagcagattgccgccgatgtggctttggcggtggataccaccccggccagcgatacgccggaaagcgttaacgacggtaccattttgctgggcggtggccctggagtcaaggccatggacggcagtcttgtagccaataccaaagtgcgccgccgtctccaggagctgtgtgccaagctgaacattccctgtcagatcgaggtgttcccgggcattggcaccgatgccggggagatgcacaaggagaaggccggtgtgcccaccggggtgatctccattccttcccggtatgcccattgcccccacgaagtgatcgattggggagatatggaccagtgcctgaagttgcttcaggcgtttatcctgtctctgcgggagctgggagaattctggagtctgtaaatctgtaaatcaaaaggcggcttttcagccgcctttttcagtgagaagagaaaggagtagaaatggaaggagtcaaacgaaatcaggtatgtcttatgccccatcaaagggcttgggacgaggaatttgagcgggtacggaagcagatcctggaggcctggggagaaaatgtgctggacatccagcatgtgggcagcacagccatcccctccatctgggccaagcccattttggatgtggcggtgcgcctgggatccatggaaagcatgaacagagacgaactggagaagctgggctatgattaccggggctctcagcatggaaaagaaacctatcatctttttgtgctgcggggagcgggggagttgtcgctgcatcacatccactgctacgacaaaagggatgaggagttttttcagctggtggggtttcgggattatctttgcacccatgaggaaaaggccgcagaatatgaaaaactgaaaaaatctttggccgcacaatatcctctggatcgggtggcttatacagaaggaaagaaggactttatccagggaatttatgaaattcttgagaaaaacgaaggcgtttgagggggttattgcctgttttctgtctgatgaaaactgttgagcagttcgtaggtgacggtacagccggaagaccggagggtggaagaactgatcttcatatagtaggtttttcctggctccagaccggtaaagcacaccccgccgtccaccggggaaacggtgtagtctgatgctgttttgccctggccagggttgccctggtacagctgtacattgtagctttcggcaccgggagcggcagccaggacaaagacggcgctggcagcctgagcggtaaagggagcacaaaggctaccgttggtacctgtttcattgttttgggacagataggcagtgcccacctggccttggccacgcagtgcttcccgctgggaaggggtgaggttgtgaagagtcaccggaaaggctgcggccagagcagaggagagggtggcgctgaggcacaaagctcctgccagggggagaaggatctttttcggtttttcataaaaaacagctcctttcaaaatgggaacgcctttggagcgtgtcccttattggatggagcagccaatcaaattgctaccgggtttaaaaaacaggagaaaacgaaaaaagacacgaccaaaagtcgtgtctttttctggcgcgcctgagacgattcgaacgtccaaccaacggcgtcggaggccgctactctatccattgagccacaggcgcatatcttgtttcagctcatttagtatagcacaggtttgaaaaaatgtaaagcattatttgaagaatttattatttctttttttgacagaactatgatataatatatcggaaaaggggtggagcctatgcggcacgagctggaaaggctggaacaagccgactacaaagaaaaactccagggcaaagcaaaacctcaaatgatctttttcacagcggaatggtcggagccctgccgacagatgcaggggctggtggaagaactggccgacgcccattacgcccaggcggatttttaccaggtcgatctggatgaacagccgctgatcgccggggatttcaatatcgccggtgttcccgctttggtcatctgccgggaagggaaggaagaagagcgcattgtgggcctgcgggcctatcccgacttggaaaaggtcgtggtcaaatatctaataaactaaaccgggggatcgaaagatgggcgtgctattcaaaacggccttagtcggcggctttcaaaaagaggaagtcatcgaatacattgaaaagctgaaaaacgattgggccgaggaagaacgccgcttgcaggaagaactccgccagacccgggaggaagaaaaacgggcctggcagcagcaggaagaaaagaaagaagaaaaccggcgtctggaggaagaactctcccaggccagggagcagatccgcaccctggaagaagaaaaggagcaggcttgccgccaggcggaacaggcccggcagcgggctgaaactctgcgccgggaatatggagagctgaaggaatatatcgccgacattgagatttccgcctataaacgagccagggaagtgcaggaggaagccagccgtcacgcccaggaagtgacccagaccatcaaggatgccggcgctgtgatgacccctgtggcggaagaggcccgggaaaaggtggtcatggccgaagaagccttcagcggattcaaggcccggattgcttccatcaccggcgagatcgacgagttggtgcgggccatgaatgaaattgagcagcgatcccgccatactctttcggccccgccaccggaagagccgaaagcccccatacaggcgcggcctgctgcccagaaaaaaagcgactcccagtctcagcctgcgggcacgagactgcgttccatacaagagatcttggacagagtcaaaaatattggagaaaagatgtaggtgcattatgaaagaatggaatctgaacacttcggaactgcgcgcccatgccaaagaaatcaaagtgggcgacatggtaaacctgacgggcacgatctatacggccagagacgccgctcataagcgcctgttcgctctgctggacgaggggaaggaactgccctttgacatcaaggacgctgtgatctattatgccggccccacccaggccaagcccggtgaggtcattggctccatcgggcccaccacttccggccggatggatccctttgctccccgtctgctggatctgggactggtggctatgatcggcaaaggtggccgggcccagcctgtggtggatgccatcatccgcaacggcggcgtgtatttctgtgccatcggcggcgccggtgctgccatttccggctgcatcaagaaggtggaagtgctggcttttgaagagctgggctgcgaatccctcaagcgcctgaccattgagaatatgccggtggtgtgcaccatcgacagcgaaggcggcaaccagtttgtcactggccgtgccgaatatgaagtgaaagactaaacaggttttccgcccgtggctctctgagccacgggtttcttcttttcttaaaatgactttataaaaatcattttaagaaaatatgaggataaaatcaggaagaataccaaataaaatgaaataaaaaatatttttaaaatcattttatgaatttctcttgcaaaatgaaaaagaagcgggtaagatacactcagaaagacaggggatgtcccccgcaaaaaaatcaggatgatgaggtggaagaatggagcgttttgatatctcccgaatctacggggaaaatgtgttcaacgatgagtccatgcgcaagtatttgccgaccaacatctataagcagctgcgggccaccatcgaccagaacaagcctttggacccggccattgccgacagcgtggccaacggaatgcggctgtgggctctggagaagggagccacccattatacccattggttccagcccatgaccggtttcactgccgaaaagcatgattcttttttgaatccgctgtccgacggcagtgtgctcatgactttctccggcaaggagctgatccggggcgagagcgatgcttccagcttcccctccggcggtctgcgggccacctttgaggcccggggctataccgcctgggactgcacctctccggcctttgtcaaggacaataccctgtatgtgcccacctgcttctgctccttcacaggcgaagtgctggacaaaaagaccccgctgctccgctccatggaggtgctctccgatcaggcggtgcgggtgctccatctgctgggcaaaagcgatgtggagcgtgtggtggccatggccggcgccgagcaggagtattttctggtggacaaagccctgtttgaccagcgtctcgacctgatgctctgcgaccgcaccttgtttggcgcccgtccgcccaagggccaggagatggacggccattattatggcaacatcaaagagcgggtcatggactttatgcgggagctggatgaagaactgtggcgtctgggtgtgccggccaaaaccgagcacaacgaagcggctccggcccagcatgagctggcggcggtttacaccacggccaacatcgcctgcgacaacaaccagctgatcatggagaccatgaagaaggtggctctgcggaaaaacctggtgtgcctgctccacgaaaagccctttgacggggtcaacggcagcggcaagcacaacaactggtctctgaatatttacaacggccccagcctgctggacccgggcaagaccccggcggacaacgcccagttcctgctgttcctctgcgctgtcatctgggcggtggacgaatactccgagctgctgcgcacttcggtggcctgcccgggcaacgaccatcggttgggcggacatgaagcgccgcctcccatcatctctatctttctgggcgatgccctcaccgatatcctggaagaggtggagaccggccgtccttctcagttccgtcagggcggcaacattgagatcggcgtcaccaccattccctggctgccccaggacacttccgaccgcaaccgtacttcgccctttgccttcaccggcaaaaagttcgagttccgtatgctgggttcttccatgtccattgccggctgcaactatgcgctgaataccgcggtggccgagatcctcagccgcattgccgaccgtctggaaaaggccgaggacaaaaatgcctgtgtgcgggagctggtgcgggagatctaccgggaacacaagcgggtggtcttcaacggcaacaactacagcaaggagtgggccgaagaggccaaagagcgtggcctgccctgcgccacaaacgatgtggacgccgcccgtggcctggtggtttccaagtcggtggagctgtttgaaaagcacggcatcttccgccggaaggaagccgaggcccggtatgaaatccgtctggacaactatatcaagaccatctctctggaagccaacaccatgctggatatgacccgccgccagatcatcccggcggtgatcaaatacaccaagttcctggccgacagcgtcaacgccatcaaggaaaccggcctgacggtggacatgaccatggaatccagcgcactgaaggatatttctgctgccggcgcccagatgaaggccgccgtgagcaagctggagaaagcactggaaaaggctgctcaggccgaaggtgctctggccaaagccgaggcttatcgggacaaggtccgggtggccatggacgctttgcgggaagtggccgacaaaatcgagtttttggtggacaaggaatactggccgttccccacctattccgatctgctgttccgcatctgattttcagtcaatccatccccctggctcatacaaaacagactgtcgaaaaacctatataacgaaaagggtcgtccgccctacccctatcaatccgcaaaaagccgcgacctgtgcgtggctttttgcacttctcaaggggcaagtgtgcgccaaaggcgtgcatacagccccttgcaaaaactcgaaaaagtggcctaagccactttttcgacacgct

SEQ ID NO: 3354 - DNA, 7154 bp, Unknown
  16S sequences of unknown bacteria
ccgccacgagaagctgtgcgccgtaggggatgatgccctgcgccacgcagctgaagatgtcgatcaggcttgccgtgcgctttggctcgatctcgtagaccgtcgcgatggttttggcaatcggccctgcgacgacgatggccaccgtgttgttggccgtcgagatgtccatgagagcggtcagcagccctatgccgaacatgcccccgcgtttgccgtgaaaatggtcgcggatgaacttcaggatggccgcgaatccaccgtattcgcgcacgagtgcgctgatggacgcgacgaggatcgtgacgatcatcgtctcgaacatccccgaggtgcccgtgcccatcgcctcgaacgccgacgcgaaggtgagcgagccggtgattccgcccgcgagtgcgaacagcacgatgccgccgcccagcacgagaaagacgtttacgccgcacaggctcgcgacgagcacgatcaggtagggaagcgcctgaatgaggttgaagtcgtggtgctcgagctgcggcgccccgctcgtcagggccgcgatgacgagcacgacgagcgtcgccagtgccgcgggaagcgcgatggcgaagttcgccttgaacttctccttcatctctacgccctgcgtgcgcgtcgcggcgatggtcgtgtcgctgatgaacgagaggttgtcgccgaacatcgcaccgccgatgacggtgccgacgcacagggggaggttgaggtctgcggacccggcgaccgagacggcgatcggcacgagcacggtgatcgtgccgacgctcgtgcccatagccatggagatgatgcacgcgatcacgaagatgcccggcacggcaaggctcccggggatgacgttgagcagcatgttcgccgtgctctcgacgccgccggcggcgctcgcgatgcccgagaacgcgcctgccatgaggaagataaacagcatgatggtgatgttgtcgtcgccgatgccctgggcgcagaagtggatcttctcgtcgaagctgacgcggcggttctggcagaacgccacgatcaaggcgatggcaaacgcgacgaccaccgagatgacgtagaagcccatctggccatcctgtggggcgatgtactcgaagtagacgccgcttcccaggtagagcaccagaaagatggcgatgggcagcagggcacgcgcccgtggtttcgggtcctgccgggtttcttgattcttgtcgtccatatgagcctccgctaaatacaaagcgaattgatgatacacgtaaaaaggggatgaccgagctttcggccatcccctttcccttgcgtggcaggtatctgtcgcgtgccgcctagacgacgagcgtgatgatgcgcagcacgaacagtgcggtcgaaacccacatgacccagtggacttccttgacgcggccctggaagatgcggatcacgacgaaggccaggatgccgaacatgatgccgtttgcgatggagtaggtgaacggcatcatgatgatcgcgaggaagccgccgactgcggcagcggagtcctcggaccagtccatgtccttgaccgacgacatcatcagaaagccgacgaacacgagcgcgggcgtcgtggcaaagctcgggatggcgaggaagatcggtgcgagcacgagcgcgacgaggaacagcacgccggtggcgacggacgcgaggcccgtgcggccgcctgcggcaacgccggcactcgactcgacgaagctcgtcaccgtgctggtgccgaggcaggagcccacgaccgtgcccacggcgtcggcgagcagcacctgcttggcgcgcggcaggttgccgttctcgtcgagcatgccgcccctgttggcgacgccgatgacggttccggcggtgtcgaagaggtcgacgaacaagaacgcgaagacgatgaccgcgaactcgaccaggtgcgagctgatgtagtcgaagttgaacgcgaacaggtacggcgcgctgatgccgattccgttggagaagtcggggaacagcgagttggcgccggcggcggggtcgacgacgtaccagccgcaggcctgggcaatcatgccgaggatccaggtgagcaggatgccccacaggatgtagccgggcaccttgtagtggtacatgacggccacggcgatgaggccgatgaacgcgagcgcgacggacggggtcgcgatgtcgcccatggcgaggatggtcgaggggtcagccacgacgatgcccgcgcccttcaggccgacgatgacgatgaacaggccgataccggtgctgatgccgagcttgaggttcgtggggacgtcgttgaccagcgcctcgcggaacttgctcagcgagagcaggatgaagatgatgccctcgaccaggaccgccgccagggcgaccgtccacgggtcgctgatgccctcggcagccatctggccgcataccgagtaggaaaagtaggcgttcagacccatgccgcttgcaagggcgatggggtagttggcgaaaaacgccatgaacagcgtcgccgccgcggcagagatggccgtcgcggtaaagacggcgcccgcatccattccgcatcctgagagaatggacgggttgatggccaggatgtagaccatcgaaaggaacgtgatgacgccagccgtgagctcggtcttgacgtcagtcccgctctctttcaacttgaaaaacttctccacgaaattcctctcctcgaaggtatgagactcggcgctattgtagcgatttcgtggagatattcacgaactattatcggtgtatgagctgcctgaacatctgggcggctgggcgccgccacgcgtccccgcgttgacacgaggggccgtgggtatcggttcattttgacacgaggggccgtgggtatcgtgccatctcgtctttcccacgcgcacctagagcgcgtggacggcggcagccacctgtccggcaagctcatgcagtacatgaggtcctccgcttcgcgcgtagccatcgcttctggcacttcggcacgatggagtcaacgcgtttgtccctatcaatttcagaagagggaatacgggcagctcatgggggctgctccgccgcgcgagaacgtattatcatttaccatgtgaaccgcgaaggtcgcgcttcgacctgctacgaacatcgagaaagggacaccgatgcccgataaacgtgacgacgtcatcacgtgggacgagttcttcatgaaggtcgcgatcgcggcccagctcaggagcaaggaccccaacacgcaagtgggcgcgtgcatagccgacacgaaccaccgcatactctcggtcggatacaacgggacgccctcggcgctcaacgacgacgacttcccgtgggggaccgacgacgaccccctcaacgacaagcacagctacgtcgtgcatgccgaggccaacgccgtcctcaactaccgcggctcgctgaaggacatgaaagacgccaccgtgtacgtgacgctgttcccctgccacgaatgcgcgaagatcctcgtgcaggttggcatcggcgaggtcgtctacctcgataacaagtacgacggcacgctcggaaaccagatatcgcgccggatcttcgactcctgcggcatcacgtaccgccaggtcagcgtcgaagaatagcgtttcccgggacgaagcggcatgccgaaggactgggatcgcataaacgaggcgctcctttccgccgcgcagggcaagacgcccacgcccgtcgtgtcgcgccgctcgctgttcggaataccgagcgccgtagagctcaagatacaggcgatcgtcgcggaggtcgcacgcggggcagaggaccctgcggcgcgcgcgaaggcagacgagcttcgcgagaagctcgctgccgtggccgatgcgctgggagaccgcctcacggtggggcgtgcgagccgctatttcgtgtttcgcgcccgcagcgcgggctacgacattccggcatacccgttcgcgggctcgggagagctcaaggagtttctgcgcgaccagggcgtctcaagcgttccagagtggtacgaggcccacggcatcggcacatcggacctctcggcgctcgacgcgcgtgccctggtctcgtttcaatacgagaccagcagattcagggtcgccctgttcgatggcgtctcgttcgtcgacgattcgaggttttgcccgcttgcggtttctgcataccttgccaatgccgggtattcctcgctggactcactttcctgcgcgctcgatgcgttggtcggcgagggcaccaaaggtgacggcgagaagtctcggcatgcgcataaggagggaaggcagccatgaagcttactgacgaggagttcgaagacgccattgccgacgccatcgacagcatccccgaccggtttttagacgagctcgaaaacgtcgcgttcatcgcggaagacgagccgacacccgaacagtccccgcaaggcgacctgctcggcctgtacgagggcatctcgcttgccgagcgcggcgatgactacgggttcttcggcgactgccccgacacgatcacgatcttcaagggccctcacgaacgtctatccgattccaaggagacggtcatcgaggaaatccgcaggacggtggtccacgaggtggggcactactttggcatgagcgaagcgcagatcgatgaaatgggatacgcatgatgaacgaagggctcgaccagatttctgaggatgcgcgaggcgatgcgctcgcctgcggcagggagcgcgagcaggagcggctcgagcactggcgttcccaaatcggcgatgcggacgccgtcatgtacctgcggacgcgcggggtgtcgctgtccaccgctaagaaatggggcctcggctacgaccgcgagcgcaagcgactcgtgatcccgtatgcgggaagcgagtacttccacgtcgaccgcgacatcaccggcacggccgaggaaaagtacaccgtcccgagcaccgacgagctcggctcgcttcccctctacaacccgagcgcgttcgactcgcccgccttctacgttgtcgaagggccgctcgacgcccttgccatcctcgacgagggaaagccggcaatcgccctgtgcggcaccaactacgaggaagtcgtcgcggcagccgcgagccgtggctaccgcggcacggtcattgccgcgctcgacagcgacgcggaggggcgcaaggcccaagagggtttcatgctcgcgctcaagcaagcgggactctacggggtcgagtactcctaccaccgcggggcgaaagacgccgccgaggcgcgctgcatcgagccggtgcagttcagcgtggatatcgcgcgcgcctacgacaaggcgctgcagagccggcgcgaaaagctgctcggcagctaccacgaggcgctgcggcacctgcgcgtgcagggcccgggcgacgtgctgcgcggcatctgcttcaacgaggacgcggtgcatcccgtgcccacgggctttcccaaactcgattcgtggctcgagggcggcctcatgccggggctctacctcgtcgggtcggcggcgaccgtgggcaagacgagcctgtgcctgcagatcgcggaccagattgcggaggcggggcgtcccgtcttgttcgtctcggtcgtgcaacgcgccaacgagctcatcgcgaagagcgtcgcgcgctacctgtaccgcgagcgtcccgagcgcggggcgcagtcgctctctcccaacgagatcctggactgccagcgccgctctaactggaccggggcgcagtcgggcagtgtcatcgagatctcgcgctggtacctgtcgcacatcgcgccgtatctgcgcctcgccgagggcacgggcaggccgagcgtggccgacatcagaagcgccgcagagctcatgtccgagaagtacgatggcaccatgcccgtcatcatcatcgactacctccagctcctcgccaacgactccgacgaggtcgggcgccttatgctcctcaagaacacgctcggcttgcggcagctcgcgcgcgacctgcggactccggtgctcgccgtctcgtcggtgaagcccggtgtcgaggccgatgacgtggagatgctgagctttgccaacgcagagatcatggcggacatctcggacgtgatcatcgcgctcgagcgctccaagcgccccgagtccctcgaaaacgggcttgtctgctaccactgcggcatgcaggtgctcaaaaaccgcacgggcaggatcaccgcgcacgcgaaggagttgccgctgtcctacttcccgcaggtctcgacatttgccgaggcgacgcttccgcccgagcacggttcgtttggcttctacgatgcgcgctagcttcgcgttcggcgtgctctgcgcggtggtgggcgcggcgttgtggggcttttccggcgcgtgcgcccagttcctgttcgcgcactacgagatatcggcgctgttcatcacggtcgtgcgcatgctcggtgcgggggtgctgttcggcatcgtccttttgacccggtggcgccacgagctcacgcgcctgctcgcagaccgcagctctctcgcgcgcctggccgtgttcggcagcttcgggctgttcctcgaccagttcgcctacatcatgacgatcgatttcacgagcgccggcaccgcgacggtcctgcaggggctgaacatggtcttcgtcgttgcggcgacctgcctcatcgtgaggcgtcgtccgcatggacgcgaggtggcaggcgtcgtctgcgcccttgcggcgacggtgctcatcgcgacgggcagcgaccttgggagcctgcgcatgcccgctccgggacttgtctggggcatcgtcaacgccgccgcggtcgcgttctacgtcatgtacccgcagcgcctgttcgagcagtggggcagcgttgcggtcacggggctcggcatgctcttcggcgggatggtagcgctcgtggtctttctggcccagggggcaggcgctttccatcccggcactcgatgcgcccggcgtgctcgccctgctcggtatcgtggtcgtcggaacgttcggtgcgttcgggctctacctgtacggcgtgtcggtcgtgggcagcgtgcgcggaagcctcatcggggcagtcgagccggtgagcgccatgctgtgctcgtgcctgtggcttgctaccccctttggcggcgccgac

SEQ ID NO: 3355 - DNA, 32759 bp, Unknown
  16S sequences of unknown bacteria
ttttctgttatcctgttttctgtctttgccccaaaatctcatctgtatttcctccataatatatttcttttatttcctccccctctgtgaggttggatttttccgcaagtccgacttctgtgcaattcgtttcaaccacttcttttcctcggctgacagctttttgtaattcagtttaagccgcttacagataaacgccatcgccacctgttccgggtcgctgtcctctctggcggtttcctcggcggtctgcaagaaatctcccagagggttgtcctccgggagactgaaaatatcgtctttctgcgcttcccgcaggggcgattctctcttaaatgatgtgcttggccacgtcgaactgctgcatggcggcgcagaggtgctcgcgcacgtacgcgccgtcgattgtgacggtctcggggccgttttccccggcggagaaggagacctcgtccagcagctcctcgatgagggtgtgcaggcggcgcgcgccgatgttctcgcggctgtcgttcatctccacggcgatgtgcgccatctcgcgaagggcgtcctcggtgaactccagcttcacgtcgtccacgcccagcagcgcctggtactgcttgatgagcgcgttctccggctgggtgaggatcttgcggaagtcctcctccgtcaggggcttcaggttcacctgcacggggaagcggccctgcagctccgggatgaggtccgtgaccttggccacgtggaaggcgccggccgcgatgaagagcatgtggtcggtcttgaccgggccgtacttggtgttgaccgtgcagccctccacgatgggcaggatgtcgcgctgcacgccctcgcgggagacgtccgggctgccggactgcgagcggccggcgaccttgtcgatctcgtcgatgaagaggatgccgtcctcctccgccttgtagatggcttcgctgacggccttgtccatgtcgatgagcttggaggtctcctccgccttgaggatcttgcgcgcctcgatgacggagaccttgcggatctttttcttcttgggcatcaggccgccgagcatgtcattgagggagacgtccgtgccgggcagggtctcgctgctggcgttgtcctcgacctcgatctcgatgatctcgccctccagcgcgccgcagagcaggtccatctgcaggcgctcgcgccgctgcctgcggctctcgcgctcctcgggcggctcgtcgggcttgcgcaccgggccgagcagcgcctcgatggggttgcggtcggccttcttttcgcccttttccttggcgatgagcgcgtccaggatgcgctcctgggcgttctgctcagctgcggcctccacgtccttgcccatgcgctccttgaccaggcgcagcgaggtctccaccaggtcgcgcaccatggagtccacgtcgcggcccacgtagccgacctcggtgaacttggtggcctccaccttgaccaggggcgcgtccacgagcttggccaggcgccgcgcgatctccgtcttgcccacgcccgtggggccgaccatgaggatgttcttcggggtgatgtcctcgcggatctccgggtccaggcgggaacggcggtagcggttgcgcagcgcgatggcgacggcgcgcttggcctcgtcctggccgatgatgtacttatccagctcctcgacgatttgccttggcgtcatggtgttcatctctctcacacctcctcgaccgtgatgtggtcattggtgtacacgcagatctccgaggcgatctccatcgccttgcggacgatctccctgggcgcaaggtccgtgttgcgcgcgagggcgcgcgcggcggagagcgcgtaatttccgcccgagccgatggccagcacgccgtcgtccggcgcgatgacctcgcccgtgcccgagatcaggagcaggttgtccttgtctgcggcaaggagcatggcctgcagctggcgcatacccttgtccatgcgccagttctgcgccagctccaccgcggcgcggggcaggttgcccgcaaactgctccaggcaggcctcaaacttttcgctcagggcaaaggcgtccgcaacggagcccgcaaagcccacgacgaccttcccctcgtaaatgcggcggaccttcttggcgccgtgcttcatgatcgtggtctcgcccatggtcacctggccgtcgcccgcgacggcggtcttcccatctttctgcaccgcgacgatggtcgtgccgcggaatgcgcttcgattttcttccataagagttcgtcctccgtacccatttctgacaatagcctatcacattttcaacgccggaaaaagagaaatgttgcgcgcgccggcgcagcgcggccaacctttacagttcgttcacgatttcgccgatcttttgcagggagcgcgcggcgatggcggcataccgctccttcttgacgcggatctttttcccggcaaggggcgcgagcaggccgaaggtcgcgttcatgggctggaagttgcggttcgcgctcgcgacgtagcggcccatggcgccgagcaccgtctcgtccgtccagtccgtgcgcggccggccgctcaggtcctggaacagggagaggcccgccaccatgcccgaggccgcggactcgatgtagccctccacgcccgtcatctgcccggcaaagtagagcccctcccggaagcggaagtggtcgtccagcagcatcggggaatttaggaacgtgtttcggtgcatgacgccgtagcgcgcgtactccgcgtgcgccagggcggggatcatgccgaagacccgccgctgctccgggaacttgagccgcgtctgaaagcccacgaggttgtagagcgtgccggccgcgtcgtcctggcggagctgcagcacggcgtagggcatcctgcccgtgcgcgggtcggtaaggcccacgggcttgagcgggccgaaggcgagcgtctgccggccgcgagccgccatgacctccacgggcatgcagccctcaaagaccttgtcctgctcaaagccgtgcaccggcgcggtctccgccgcaatcagcgcgtcgtaaaaggcgttgtactcctcctcggtcatggggcagttgatgtagtcgtcctcgccccgtccatagcgggaggcgcggaaggccctgtccatgtccacggattccagggtgacgatgggcgcggcggcgtcgtagaaggagagtccctcctgcccggtgagggcgacgatcgcctgcgcaaaggcgtcgctggtgaggggaccggtggcgatgatggtcggcccctcgggcagggcggtgacctctccctccacgaccgtgcagagcgggtggctgcgcagggccgcggtcacgccggcgctgaacttctcccggtccacggccatggcgccgcccgcgggtacgcgcgcggcctccgcgcagtccatgatgagcgagcccacgcgccgcatctcctccttgagcaggccgaccgcgttctcgagccggtccgaccgcagggagttggagcagaccagctccgcaaagccgggcatgtggtgcgcaggggtgaacttctgcggcttcatctcgtacagcgcgacctcgcacccgcgcttgaggagctgccatgcggcctcgctgcccgcaaggcccgccccgatgacgttgaccttcatcctcttcctccttgtttctctccgtgctccggccgctccaggccctttgcgtcgtagtattcgtcggaaaagcgcagcgcgcccgcgtcgaatcccgcctgcagcgcctcgatgtagccgtaggggtcgtccatgggcgtcagcgccagctcccgggcgatggtctccagcgcctgccgcaccgcggggcgcaggcggttttccatctccgtcttggactgcacaaacgccgcaaactgcgcccgcgtcatgtccccggcctccgcgatggcggccgtgccgccggtcgccagcagcaggcgcaggaaatcgcggaagttccgcgccaccgggcggacgttttcctcgccaaggggcatgggattgacgcagaaaattgtctcccccatgccgtctatgcggcaaaagtgcacgccctcgacgtcccagcccagcgcgtgcgcgcccagcggcgtgcagaaatagccgccctgctcctcgcccggcgcaaagccgatggcctcgccgtccacgcccaggcgcaaaaaccgctcgtattccgtcatgtccgttccctcctgcaagaaaggggaggtgacaaatcgtcacgccccctttctggattttattccgcctcgtcctgcgcgggggtctccacctccacgcggtgcttgcagctctcgttcgtgcagacgtgccaggagatgtccttcttccggtcgcgcttgagcaccatggggctgccgcagaccggacagcggtcgtccacgggcatgtcccaggaggtgaagtcgcactccgggtaccgctcgcagccatagaacacgcgcccgcgcttggtgttgcgcacgaggatcgcgccgccgcacttggggcagtgcgcgtcgatcgcgcggacgatgggcatggtgttgcggcaggccgggaagttcgggcaggccaggaacttgccgaaccgccccatcttgtagaccatcatggcgccgcacttgtcgcactggacgtccgagacctcgtccttgacctcgaccttctcgatgttcttctccgcggcctcgagctgctcggagaaggggccgtagaacttctcgatgacctcgtgccagtccttgccgtcctcctcgaccgtgtccagctcctcctccatgtcggcggtgaactgcatgtccacgatggacttgaagttctcggtcatcatctcggtcaccagcacccccagctccgtggggaccagggccttgttttcgcgcgtgacgtagccgcgggcgaggatggtggtgatggtgggcgcgtaggtcgagggccggccgatgcccttttcctccatcgcgcgcacgagggaggcctctgtgtagcggggcgggggctgggtgaagtgctgctccggcgcaaggtccgccatggtgacgctgtcgccgacggcgaccttgggcagggcggtctccttctcggcgggctcgtcctgcccctcctcgtagaggacggtgaagcccgcgaacttcttcttcatgccgccgaagcggaactgcgcgccgccgccggcgagctcgatgttcagcgtctcgtagacggcgggcgtcatctgggaggcgaggtaccggtcgtagatgagcttatagagccggtactggtcgcgcgtgagggacgccttgaccttttccggggaatagagggcgtgggtcgggcggatggcctcgtgcgcgtcctgcgcgttcttgcggcccttgaagacgttgggcgtctcgggcaggtattccgggctgaagttgtcggcgatgtactcgcgcgcggcggtgagcgcctcgtcggaaaggcgcgtggagtccgtgcggatgtaggagatgaggccgacgctgccctcgccctcgatgtccacgccctcgtagagcatctgggcgatctgcatggtcttcttcgtcgtgaaggagagcttgcgcaccgcctcctgctgcaggttggaggtggtgaagggcggcggcgggttcttgcgccgctccccgctctttacggcggtgaccgaataggtctgcccgagcaggaagtcgcggacctccttggcctgcgcctcggaggtgatctcggttttttcgtcgcccttgcccacgtacttggccacgaatttctggtttccatcggtgaatttggcggtgatggtccagtattcctggggcacgaaggcgtcaatctcggcctcgcggtcgacgatcatgcgcgttgcgacggactgcacgcgcccggcggacaggcccttgcggaccttggcccagagcagcgggctgatcttatagccgaccaggcggtcgagcacgcggcgcgcctgctgcgcgtccacgagctgcaaattgatgggccgcggcttcttcatcgcggccttgacggcctgggccgtgatctcgttgaactccacgcggcagtcggaagccgggtcgatcttcaaaatattggccaggtgccaggagatggcctcgccctcgcggtccgggtcggtcgccaggatcactttggacgcgccgcgggcctccttgcggattttctccaagatctcgccccggccgcgaatggtgatgtagcggggctcgaaattgtgctccacgtccacgccaatctggctcttgggcaggtcgcggacgtggccgttgcaggcctcgaccttgtagcccctgcccaggaacttgccgatggtcttggccttcgcaggggactccacgatgaccaatttatatttgctgctggctgctgccatactctacccccgtaaactccattgcaaatcaagattttgtcgcataggtgcgacctgccgactggtctattattcccttcaattccagcattgtcaagagcgaatttaattttgccgcggaaaactgcgtccgcgcgatcagctcgtcgaaggagagcggctcccggcgcagggcctgcagcacccgttcctcctcctcggtcacgggcggcgcggcctgcccggccggcgcggcctgccgccccaccgcgggcggcccgtcctccccgtcctccgcgtccgccatcccaaacgcctggagcacatcgcggctgcaaagcaccgtttccgcgctcgtgcgcatcaggcggttggtggagtagctcgcgggcgaatcgatgttgccgggcacggtcatcagctcccggccgtattccacggcaaggccggccaccagcagcgtgccggacctttgcccggcctccgtcaccagcgtcgcgcgggagagcgccgccagcagccggttgcgcggcaggagcgtcgcccggctcgcgcgcgtgcccaaggggtattcgctcaccagcaggcccttgcgcgcgatctcctcctgcagggggccgaccaccgcggggtaggcgacgtccaggccgtttgcaaggacggcgatggtctttccgcccgcgtccagcgccgcgcggtgcgccacgctgtccaagccctccgcaaggcccgacacgatggtaaggcccgcgcgcgcgagctccgcggcgagcttttccgtgatcctgcggccatagctcgtgtgccggcgcgtgccgacaagggtgagcaggcgctcgccctggagcagtccgaggtcgccccgggcgtacagcgcgcagggcgggtcgtagatgtcgcgcagcgcctccggataggcggggcttgcgggcgtcaggatgcgcacgcccgcccggcggcaggcccggacgtggtcgttgatctcctcctgccgccgcgcctcgagcaggctggcggccagcgcctcccccacggcctcgcgcagctccggctcctgcgcggcgaggagcgcctcttcgcccccgaagaactccacgagctggcgcgcccttcccgcgcccaggccgcgcacgcggctcagccagatccaaacgccctctgccctcgtcatggtgcatccctacttccaatatttttcgttcgttccccgataggaagccgcctcggccacgtgctccgcctgcacgcgcgcctccccggccatgtccgcgatggtgcgggcgatgcgcagcacgcgcgcatagccgcgcatggagagctgcaagcgccgcatgcacagggcgagcgcgtcccgcgcatccttggtcgggttgcagatctcctccaggcggttggcgggcaggcgcgcgttgcagaagaagtcctcgcccgcatagcgcgcgttctgcgccgcgcgcacgcgctcgacgcggcggcgcacggtctcgctgtcctccgcgggcgcggccgcagggccgaacacctcgtccggctccacggcgtccatctccaccaccatgtcgatgcggtcgagcaacgggccggagatgcggctcaggtaccgctggacctcgtgcggcgtgcagcggcaggtccgcgtgcgcgagccgtagttgccgcacgggcaggggttcatcgcgcagacgagctggaaccgcgccgggtacacgcaccgcgcgttgacgcgggagatggtcaccacgccgtcctccatgggctggcgcagggcctcgagcaccgcgcgcggaaactccggcagctcgtccaggaacagcacgccgttgtgcgccttggagatctcgcccggcgccgcggcgcggccgccgccgatgagcgccacggcgcttgtcgtgtggtgcggcgcggagaagggccgccgcgtcatcagtcccccggaaacctcgccggatacggagtggatgaccgtcgtctccagcgcctcctgctcggtcatgcgcggcaggatgccgggcaggcagcgcgcgagcatggtcttgcccgagcccgccgtgccgatgagcagcaggttgtgcccgccgctggccgcgatctccagcgccctgcgcgcggcgtactgcccgcgcacggacgcaaggtccacctccggccgcacgtcctcggcaaggtctgcgtaccggaccggggtgagcggcgcgatctccgcctccccgcagaggaaggccgcggcctgccgcaggctctcaacgggatagagcgcgatgccgctcaggcacgcgcactcccgcgcgttctgcgcgggcaggagcgcccgctcgatccccgcccggcgcgccgcaaggagcatgggcagcgcgcccgtcaccggcgcgagggacccgtccagggacagggtgccaagggccagcgccccgcggagcctctcctgcgggatgcggcccgaggccgcgaggatgcccagcgcgatgggcaggtcgtaccagggcccctccttcttgatgtccgcaggggccaggttgatcgtgatctgcgccacggggaagggaaagccgctgttgcgcagggcggtgcgcacgcgctcgcgcgactcgcgcaccgccgcgtccggcaggcccacgacgtccaccatgggcaggccgtcgcgcacgtccacctccacgcgcatggggtagccctcgattccctgccggccgcagctggttacggtcgatagcatctcccttccccctctctcttttcgcctgcgctcagccgcgctgctcccggaagaccaggagcttgttgcccacgaagttgaccgccatggaccccacgaccgagatggccttgccgatgtagcggttcatctgcaaccgctcctgcgtcagcaccaggattcccgtcgaggccgccagcgccgccaggttcaccgccaggaagcacgcgagctggcgacgcgtcatcggctcccgctgggcaaaggtccagcgcttgttcagcaccaggctgttgcacaggcccaggctgtagccgatgatctgcgccagaacgtagttttccgcaaagaaggggatgaacagcaggagcgtataggaaaggtagtccaccagggtgttgaccacgcccaccaggccgaactttacggcctgcacaaagagcgccttgagcttctccacgatgcatgcctcccttctcagtacagcgtccacgagggcagccagttcaggagcgacgcgtgcagctccgtcatgggcacgcccgtgagcaccgggtagaacagcaggaacagcgccagcaccacgcccatgaagacgaacatggccgtttttgcccaccgcttcttgtcgtacaggccctcgaagaacagcaccgtgcacaggacgatgaagggcacggacgcaaagtagtggtacacgaacgtcacgcgcggcacgagcacccagggcaggtagttggcgcagaacccgatcagcagccaccacaggcgcgggtcgcgcttgccgtagccccggaccgcgcgcaccgccgcccagatcaggcacgcaaggcctgcccaccacaccgccgggctgcccagggccgaaatggacgagacccaccccgccggcatggagtcggagacgtagtaccagatgttgcggatgtccagcggccactgccaccacggcgactcaaagggatggctgtcgaacacgcccttgtggtagttgaacatgtgcagctggtagttccagacctccttgaggccgtggtgcggctcgtcgatgcgcaggaactggtagtaggagccgatgtagatggccagcgggatgatcccgaagaacaccacgcaggcgaggatggtcttgaccgccttgcccggaaagaccgcggcgatgtgctcgcaggcttcgcggcgctcggcggagaggttgcccgccgcaaggtcgcgcttggccgcaagatactcctgcacccgcgtgccgaagatccagaagaacagcaccgcaaggcccgcggccgcgtagatgccgatccacttgctcgccatgccaaggcccatgaagaacccggacagcgccaggggcacgaaggtcttccagagcttgtcgtggtagaagctcatgtacgcgtagcgcagcaggaacgcaaagctcaggatgatgaagagcaccgggtaggaatcgatcgtgcccaggcgcgtctgcgcaaggtgcatgaagtcgaacgtcatcaggaacgtcccaaagaaggcgaacaggggcctgcggaacagcgtcttgcacagcaggtacatcgccggcaccatgagcacgcccgcaagcgtccccgcaaagcgccagccgaacggcgtcatgccaaaggccgcgatggaccaggagatgaacaccttgcccagcggcgggtgcgtgttctcgtaccactccatgttgtggagctgctcgtaggcggtgcggccgtggtagacctcgtcaaagtacatgctgttcctataggagatctccgccggcacgatggactgctcgtcggcgagggcctcggccgtgcaggaggcgatgggcagaatcgtcccatcctctccaaagagcgcgacctcaaagagcttgatctcgtccttggtcaccgtaaggcgcacatagcgcgcgtcctcctccagcgccacggagtgccacttgaacatgtcgtgcacgcccacgctctgctccaccgcgccggaccagttcgcgccgtctgtgctgaactccaccgtgaagtcgccgtaggggatctccccgtaatagcggaactccgtcaggcgctcttcctgcccaaggtcgaggaccgcgctgtcgcccgcttcgcccgtccagagcgtctgcggcgcagtcatgtccccgagctggtagaacgccagcaccgcgtacacgagcgtcagcgcgcccatgagcagccagtccacgcggcccatgcgcagggaagcccgctcccccgtgcccgcggcgtccggcaggcgcggcccgacgacctggcgcttgcacggcggcaggtcctcgtccgtggagagacgcttgccgccgaagcacaggtccgcagcggtgaggagcaggcaggccagcagcgcgaggttcagcaccgcgaccaccgtgcccagcgcctggttttccgcaagaacgtgctcgttctgcaggacgatgtagatgttcacggcgtttgtcgcgctaaagcccgcaaagatcccgtacagccgcctgtccgcgtagagcacggccgccagcagcagcagcgcgagcgccgggaacatgtaccgctcgtgcatgcgcacgccgaggcagaacgcgcccgccaggatcagcgccgcgcagagggggatggcgcgccggtcgcggctcttgaagaagaacacgaggcccacaacgacgctggccagcaggccgaccgtcccccagaccgcgtagggcaggcccaggagcgccgcgccctggtccacccagttcgcgcccgcggcaaagaagaagttcagggcgttgaccgtggcatacgggtaggaggagagcgtggagaggtacttctccacgaggaaggccggctcctggcgcacgaggaagggcagcgagatcgccgcgatcacgccaaggcacgccgcaacgccggcaaggagccgctttgcgccgcgcctggggtcctccaggatctccagcgcatagccgaagagcgggatcgtgcccagcatcagcgcctggggcttgaccgccaccgcgacgccgtagaggatcgccgcgcgcagcgtcttcttctgcaggaaggcgtccaccaccagcaggatcagcaggaccagcaccgcgtccatctgcccccacatggcgctgtccagaatcgccgcaggcatgcaggcgtaggccgcgcccgccagcagcgcccacttgggcttgccggcgcgcagcgcgatgcggtagagcaagtgcgccgccgcaaggtcgcaggcgatggccgggagcttgagcagcaccaggtacggcgcggtgttcgccgtaaggcccagcagattggccacgagcgcctgcaggcccagaacgtagaggtagccgggcggatagtcgcagaagccctgcgcgtagaagtccgcaggcccgacctgcgcgagcgtctgtccccagctcgtaaagcagttgatgtccacctcgtagcccgggttcacggccgcaaggaagaggcgcagcgcgcccgccgccgcaaggatcgcgccaaagaggcgccccgcgcgcgctttttcgatctccacgccgcgcaggcggtagacaaaggcgcagaccagcagcgcaaacgccgccgcgacgaaggtctgcatcggaatccagtccgcgccctccgtctcgtccgaggcggcgctcacgggcgcatcctgcaggctctgcaccgtcacgcccgcgggcacctcgtccacggcctcgaccacgacgtcgtcaaaccaggcggagcccacgttctcctcgccgtagaagcccacgcgcagggccacggtgatctctccctggaagaagccggtctttccatacaattcgaccggcacccactgcccgtccgtgtccgcatcgtcctgcgacacggcaaggctcccggagacggagaggttgccgcccgtgcgctcggggtcgccgccctccgccttcatgcgcgcggagatccggtaggtcgtgttgccccggacggcgaccgtctgctccagccgcgcgtcgttttccgaaaagttttgcaggcgcacgcagcggtttccgtccacttcctccgtccaataggtggagaccgtctcgtcctgcgtccaggccgcataggtccagcccacgggcaggccgctctcgtcccattgggaaaagtcgccgttttgcaccaggttttccgcagcctgcgcgccgagcggcagcaccagcgccagcagcaggagcaggcagcagatccagatctttcgtctcatggtttcatcctcgtcatacaaaatatcttccgcgcgcgagcggaaaggcgttttcgatgtggcgcacgtccaggcgcgcgccatcgaacccgaccgaaaccacgtcaaaccgcgcaggccggcccaacaggccatgctccgctagataaacgacggccgcgcgcgaaatgcgccgctgttttgccgcgtccacggcaaagggcgcgtcgtcccggtccttgcggagcttgacctcgacaaagaccagcgtctcgccctcgcgcatgagcaggtcgacctcgtcccgcccgacgcgcaggtttgcgccgacaaagcgcaggccctttgcctctaaataggcccgcgcggcgcgctcgcccatggcgccgcggtccccgtgggcgctcatttcggcgcaaaggccgagcggatgaagagcctgcggtgcgcagggcaggggccgtaggcgcgcagggcctcgtagtgggcctgggttccgtatcccttgtgctgggcaaagccgtactgcgggtactgcgcgtccagctccagcatcatccggtctcgggtgaccttggccacgatcgaggccgcggcgatggaatagctcaccgcgtcgccgtggacgatgccctcctgcggcacggaaacgtccaggccgcgctccgcgtccacgaagacgcgcgccggctttgcaagctcgatggcgcgcttcatggcaaggcgcgcggcctgcttgatgttgagggtctcgatctcctcgaccgaggccacgcccacgcccacggagacggcgcagcgcaggatctcctcgcagagggcctcgcgcttcttctccgcgaccttcttgctgtcgttgatgtccgggagcaggggctcgggcggcatgatgacgcaggccgccaccaccgggccggccagcggcccgcgcccggcctcgtccacgccgccaacgagcgcgcccgcctgccagaggggccgctcgcgctcggtcatgcgcatgaggcgctcctgcttagtctcccgtttccctgccattttcatcctccccttcgggcgcttgcaccggggcctccagcgtcaggcggcccatcttgccgctgcggaactcgtccaggatcagggccgaggcgcgctcggtgtccggccgcgcgccgggcaggagccagccgcggcggcggcaggcctcctccaggagctgctccccgctcttctccgcgtccatgtcgatcttcaggcgcgccttagcgccctcgggcgcgcggtcgcgcaaaaattccaggagttcggcgctcagccgctcgttgtccatgatctccccgcggatggagccgaggaacgccaggcgccgcgccgcctccttgtcctcgaacttgggccagagcatgccgggggtgtccaaaaactccaggtacgggcccacgacgatccactgcttgccgcgggtgacgccggggcggttgccggccttggcggccgcggagccgcgcaggcggttgatgaaggtggactttcccacgttcgggatgcccacgatcatggcgcgcacggtcttgttcacgcccttggccttcatgcgctccacgaccggccttgccgcgcgctccaccagggacacggcctccttcacgcccttgccggcgtttgcggaaaaggagatcgcgtcccagccgcgcgcgcggtaggcgcgaatccaggcgcgcgtcgcctccggatcggcaaggtccgccttgttgagcacgaccacgcgcggctttgtgccgaacaggtcgtcaaaatcggggttgcgcgtggaggccggcgcgcgcgcgtcgaccatttcgatgaccacgtccacgagcttgacgctctctgcgagcatgcgccgggccttggccatgtgtccggggtaccactgtatatccaaactgctttcctccatggtcatttttccctactactatacaccgagcgattcttctccgcaaggcttgcggcaaaaaaggccgcatccggagcggatgcggcctttttgcttcccgttttacttggagctgtccttgaccttggcggccttgccgaagcggtcgcgcaggtagtacagcttggcgcggcggaccttgccgcgacggacgaccgtgatgctgtccacgcgcgggctgtggatggggaacgtgcgctcaacgccgatgccgtaggaaacgcggcggaccgtgaaggtctcgcggcaggagccgttgcggcgggcgatgacggtgccctcaaaggcctgcaggcgctcgcggttgccctcgacgaccttgacctggacgcggacggtgtcgccgatggagaacttgggaatgtcggtacggagctgctccatttcgatggcgcggatgatctcgttcattgttgtttctccttccctgtgtagacgttcatgctcttgccggatcgcgcggaaaacagcgcggcggtcgaaacagcagcggaccgtcccattgatggtcaacggatggtattataccattggaaccggcaaaaatcaagcaaattcaaggattctccggtaaattttgtgcgctctcgccctcctgcggccgctttttcttgcggcgcgggcgctttggcggcatctcctcccagccgaggtacacgcggtcctgctgggtcaggggcgcgcgctccagcagctcgggccggcgctcccgcgtgatgtccaggctccgctcccgccgccaggtgcggatgttggcgtcgtggccggagaggagcacctccgggacctcgcgcccctcgtagacggcggggcgggtgtactgcgggtactccagcaggccctcggaaaagctctcctcctgcgcggactccccgctgcccagcaccccggggatgtggcgggagaggcagtcgatgacaaccatggccgccagctccccgccggtgagcacatagtcgccgatggagatctcctcgtcgatccactcgtccacggcgcgctggtccacgccctcgtagtggccgcagaggaagatgaggttctcctcctgcgcgagctcccgcgcgcgctgctgggtgagggtctttccccggggcgagagcaggatgtgccgcgcggggaagtcctgcaccgcggcgcggaagcagtcgtagatgggctggggcgtcatcacgagccccgcgccgccgccgtaggggtagtcgtcgcagcggttgtgcttgttcttcgtataggcgcggatgtcgatgggctcgatggagaggatgccgcgctcgatggcgcggcccgtgatgctccggcccagcaccggcaaaaacatctccggaaagagcgtcagaatcttaatccgcatcgtcatacaccgcgatttccgtcagggccgcgctgtccagctccatgcgcgcgccctcgacgtccacggcgcgcagcgcgcgcttgagcgcggggaagcggaaggttctcttcccccggacctcgtagacgtcgtttccgcccgcctgcatcacgtccgcaaggcggccgagctcccgccccgcctcgtcgacgacctgcatgccgatcaggtccgcgatgtagtagcggccctcgggaaggggcgccgcctccgcgcgggggacgaagagctcccggccgcgcagggcctcggccgcgtcgcggtcctccacgcccgcaaggcaaaggtaggcgtagccctcccgcgtgcgcgcggcgcgcaccgcaagcgcctccccgcccgtttcgtccaggaacacgcgcgcaaggtccaggaaccgctccggatcgtccgtgagcgggaggaccttgatctccccgcgcacgccctggggcttgatcacctggccgatcatcagatattccttcatgaagaacctccttgcttccaacgcgaaaaggggggcattcgccgcggcgaacgctcccccctttccctccccggctttcttcggggatgcgcgaaggggcggaaactgcgccccttcctcttccatccgcagcggcggcatgtgcgccgcaggcggcgttttttcgcggatcgccgtcagacgatttccacaagcacgttctgaccggtcttcaggcttgcggccttgaccacggcgcgaatcgccttggcgatgcggccctgcttgccgatgaccttgcccatgtcctccggagctacgcggagctccaggatgagcgcctggtcgccgggcacctcccggacctcgacgaggtcggggtggtccaccaggcagcacgcgatgtacttgaccaactctgccatgactgcgccctccttccagtgccggagcgtcgcggggagaaacgccttactcgatcgcgccgcccttgcgcagcacggtcttgaccgtctgggtgggctgcgcgcccacgctcagccagtacttggcgcgctcgacgtccagggtgatggccttgtcgtccttgacggggttgtaggtgccgatctcctcgatgaaccggccgtcgcggggggtgcggctgtcggccacgaccacgcgatagaagggctcgcccttcatgcccatgcgcttcaagcgaatcttcactgccattgtaggatacctcctgcgtatcgtttgaatttttttatatcattccaatcgcttggaatcaatatctcttagaacttgaacgggagcctgcgccccttcttgcccatcttccccatcttgccgaactgcttcatcatggcctgggtctgctcaaactgcttgaggagctgattgacctgctggaccgtggcgccggagccggcggcgatgcgctttttgcgcgaggcgttgagcagcgcggggttgcgccgctcccgcggggtcatggagaggatgatggcctcggtgtggccgaggttcttcttcatctcttcctcgtcgacctcggcggcgatcttgtttccgcccgggagcatggagagcatgtccgccatgccgcccatcttgcgcatctgctggaactggtcgaggaagtcctcgagggtgaactggttcttgcggatcttctgctccaggtccgcggcgcgctgctcgtcgaccagggccgtggccttgtcgatgagggtcagcacgtcgcccatgcccaggatgcgggaggccatgcggtccgggtagaagggctcgatctggtcgagcttttcgccgacggaggagaacttgatgggcttgccggtcacggccttgatggacagcgccgcgccgccgcgggtgtcgccgtccagctttgtgagcacgacgcccgtgatgttcagcttttcgtcgaaggtctttgcgacgttgacggcctcctggccggtcatggcgtcgacgacgagcaggatttcctgcggccggagctcgcctttgaggttctccagctcctgcatgagcgcgtcgtcgatctgcaggcggcccgcggtgtcgacgatcatcacgtcgcgcagggcgcggatggcctcgcgcttgcccgcgcggacgatctccaccgggtcgccctgccccatctcaaagacggggacgccgacctggccgcccaccacctgcagctgcttgatggccgccgggcggtagacgtccgccgcgacgagcaggggctttttgccctgcttgagcagcatgccggccagctttccggccagggtggtcttgcccgcgccctgcaggccgacgagcatgatgaccgtcggcgggttgcccgtgaactcgagcttggcctgcgtgccgcccatcagcgccgtcatctcctcgcggacgatcttgatgacggtctggcccgcgttcagggtggtgaagatctcctcgcccaccgcgcggtcggtcacgcgcttgacaaagtccttgaccacaaggtagttgacgtccgcctcgagcagggccatgcggacctcgcgcatcgcgtccttgacgtccttctcggtcagcttgccgcggttgttgagtttttggaacgccgcctgcagcttttctgcaagtccttcaaacgccatagacgccctccttctgcatttcctcgagtatgcgccgggccgcgcccgcgtcgccgcgctccagcgcgtcctgcgccagggcgaccgcgcggtggagccttctgtacttttcgaccaggcggagcttgccttccatgtcggtcagcgtcttttccgccttgcgcagggcgtcgtgcacggcctggcgggagaccccgaagctctccgcgatctcggagagggagaggtcctcctccacgcgcaggcgcatcatctcgccctgcttttcggtcaggagcgggccgtagaagtccaacagcatcgcaagctctgcgttgtgcgcgggttccatgcgctcgcctccgttccctgtgaagcaaaactgcttgacaccttgggcattatacacgctcgccccccggttgtcaagcagttttactttacgccgcgattttttccgaatctttcccgcattttcgggggccttccccccatcctctgcggcgtcagtcccgcagggacaggcgcatgtaccctttggcgggcgcaaaccccagactgcggtacagcggctcccccatctgcgtcgattcgagcagcaggctccccgcgccgcgcgcacgcgcatcctcgatgcaggcgcgcacaacgcgcgcggccacgccctgccgccggtattccggcgccgtgtagacgttcatgagaaacgcgcagtggcccgtcgggttggaacccatgggcagctcgtcatgggaatcaccgtgcccaccccaacaatccgctctgcgtcctgtgcatccgcgcggtgcagggcgatctgtgcgcgcgtcaaaagatcgcctcggcgtactcgtgggcgttgaagacctgcaggtcctccttcttctcccccacgcccacgaagtagacgggaagctgcagctcctccttgatggagatgacgaccccgcccttggaggtgccgtccagctttgtcagcacgatgccggacaggtccaccgcgtcgcggaagacgcgcgcctgcgtcacgccgttctgcccggtcgcgccgtcgagcacgagcagcacgtgcacgtccgcctgggggaagtcgcggtcgatcacgcggcggatcttcttgagctcctccatgaggtgggacttgttgtgcaggcgtccggccgtgtccacgatcagcaggtccgcccgcttcgccttggccgaggccacggcgtcaaagaccaccgcggccgggtccgcgccctcgccgtgggcgacgatgggcacgcccgcgcgctgcgcccagatggtgagctgctcggtcgccgccgcgcggaaggtgtccgccgcggccaggatcacgctctttcccccgtccttgaagtggcaggcgagcttgccgatggtcgtggtctttcccacgccgttcacgcccacgaccaggatcaccgacggggacttggggcggaagggctcggcctgcatcatgtccgcgacgatctccttgaggatgccgcgcacggcctccgggttcccctcgcggcggcggcgcacctcgtccttgaggcgggcgatgatctcctccgtggtcttgacgccgatgtccgcgccgatgagcacggcctccaggtcgtcgtaaaagtcgtcgtccagctccttgtagacgcccgtgagctggtcgatggcgtgggtgatggactcgcgcgtcttggtcatgccctcgcgcaggcgggcaaacagccccttcttttccctattctccgtcatggctctcctcctccaattgttcttccaaatcgcgcagctgcaccgagaccatgcgggaaacgcccttctcctccatggccacgccgtagagcgcgtcgcagcgctccatggtgcccttgcggtgggtgatgacgatgaactgcgtgtcccggctgtactgcttgagatagtctgcaaagttcgccacgttcgcctcgtccagcgccgcctcgatctcgtccaggatgcagaacggggagggccggatctccagcatggcaaagagaatcgcaatggccgtcagcgcccgctccccgcccgagagcagggagagcagttgcagcttctttcccggcggctgggccacgatgtcgattccgcaggtgaggacgttcttttcgtcctggagctgcagctttgccgtgccgccgccaaagagccttgtgaacgtgcgcgcaaagtgctcgttgatgcgctggaactgctcggcgaactgctcctccatcttcttctgcagctcgtccaggatctcctgcaggtcgcgctgggccttgcgcaggtccgcgcgctggcgctccatgtcgtcgtagcgcccgcgcgtctcctcgtactcgtccagcgcgccgacgttgaccgcgccaaggctgcggatctcgcggcgcaattcatcgatgcggccgcgcgacgcggcctcgtcgtagtccaggtcgcactccggccgcgcggtttccagcgtcagctcgtaccgctcccagatgcggtcctggagctgcttgagctccgccgcccaccgcccctgggcgagctgcaggcggtgcaggctctcctgcgcctgcgcggcgcgggtgcgctcgccctccaggcgcgcctccaggtcggcgatcctgccgcgcagcgcctcccgcgcgctggactccgcctccagcgtctcgttctgcgccgcaagggcctcgcgcaggcgggcgagcgcggcctgcttttccgcaaggcgcccttcgtccgcggccatgcgctccaggagcgcattccggctgcgctcgcggatggcggccgcggcgcgcagctcctgctcgctgccctggaagcgcttttcgtcgcgctgggccatctcccactcggcctggcggcccgcctcggtggcgcgcgcctcggccagatgcgcgcgcaggccttccaacgcctcccggcgctggaccagctccgccgtcatgcgggcgatgtcctcctgggtcgtggcggacgcgcgctcggcgctgcccgtgcgcgcgtccatgcgccggatctcctcgtcgatctccccgatgctgtcccggagctgctcctgctccagcgccgccttctgctggcggtcgcgggcggtctcctccgcgtcgcctgcgcgctttaggcgctcctgctcgcgggcgacggcgatgtcctgctggtgcgcgcgctcgcgggcctgggcgacctcctcctgggcgcgcgcaaggtccccgccgatgctctccacgcgcgcctgcagggcctcgccgcggctcttgagcgtctcgacggccgcgcggtgctcgtcgatctcccgctggcgcgaaaggatcgaggtggagcgcgcgctgacggagccgcccgtcatggacccgcccgagtgcatgacgtccccggcgagggtcaccaggcggaaggcgtgccgcccggcgcgcatgatggcgatgcccgcgtccaggtcccgggcgatgacggtgcggcccaacaggttctccgccacggggcggaaccgctcgtcgtaccccaccagctccgaggcgaggccgaggcagccgtccatctgcaggacctgccgctcggccgggctgagcacgcgcccgcgcacggagctgagcggcagaaaggtcgcgcggcccatgcggttctgccgaaggtactcgatcatgaccttggcgtcctcctcgcgggcgcagacgaggttctgcatcgcgccgcccagggccatctccacggcgcgctcgatctccttgggcacgcgcaacagccccgcgaccacgccgtagagccccggcgcgccgcggaagcgccgcagcacctcgcgcacggagttctggtacccctcgtagtcgcgctgcatctgctcgagcatcttcaggcgcgactgcgcctcgcgcagcgcgccggccgtgcgctggatgttgacgccgagctgctggctctccacctgcagggcggcctggcggtccatggcgcggtcgcgcgcgccctccagctccccgcaggtctcctgcgccgcgcgcagcagcgcctcggccttctcccgctcggctgacgcggcctccagggcgtcggcccgctcctgcgcgccgttttccagcgcgtccaggcgggcctgcaagccctcgcgcgtggcggccaggcgggcctgcgcgctctttacgtcgctcagggcgttgaaggagcggatcatctcctccttgccgcgctcgatcgtctcctcccgcgcggcgacgtcctgcgcggtctcctcggcctggccctccaagtcgcggatgcgcgcgcggatctccgcaaggtcgcgggcgtacttctcctgcttgctgcggctctcctgctgctggcgggccagggcgctgcgctgggactcgtccttttctttctcctgggccaggcgctcggcctcctttttcgccgaggcgatgcgctcgcgcaggaggtttgcgtcgccctcctggatctgcgcgctgcgcgtatcctcgagcacgcgggcgtgcagagcggacaggcgggcgtccgcgtcgaggatgccctgctccatctcggccctctcgcggcggccgccctcctccttcgcccttgccgcctgcatctgcgcctcggtttcggcgatctggccgtccacctgctccaggtttccggtcaggcggtcgtggttgtaggcaaaggagctgatctccaggcggcgcagctcgtccgtgagcctgcggtagcgccgggcgtcggcggcctggcgctccagctccggcagcctgcccccgatttcgcccaggatgtcctccacgcgctccaggttctggttcgtgttctccatgcggcgctcggcctcggcccggcgcgccttgtacttggtgatgcccgcggcctcctcaaagacgttgcgccgctcctcgctcttgacggagaggatctcgtcgatgcggccctggccgatgagggaatagccctccttgccgatgcccgtgtcgcgcagcaggtcgacgatgtccttcaggcggcagggggccttgttgaggcaatactcgctgtcgccgttgcggtagacgcgccgggtgatcatcacctcggcaaaggagacgggcagcgccccgtcctcgttgtcaaagacgaggctgacctcgcagtaggcctgggccttgcgcgtctgcgttccgccgaagatgacgtcctccatcttggcgccgcgcagggtctttgcgctctgttcgcccagaacccagcggaccgcgtcggcgatgttgctcttgccgctgccgttgggcccgaccacgcccgtcaccccgtcggggaagaccatctccacgcggtctgcaaaggacttgaacccgtagatttccaatctcttcagtcgcaatgctccgccctcacagtccctgccggctcagcgcgtcgcgcgcggcctgctgctcagcgtgctttttgctgctgccctcgccgcgcccggtgacggccccgcagagctcgacctctgcaaagaaggtgcgcatgtgcgcaggcccctcctccccgacgatgcggtagacgggcgtttccccggtcacggactgcgccagttcctggtactcggtcttgtagtcgtgcacgcgcggcgcgtccgcgatgggcacgaccgcttcgatcaggcggcgcgcatcctccatgccgccgtccaggtacatcgcgcccagcagggcctccatggcgtcggccaggatggagggcttttcgcgcccgccgccgcgctcctcgccgatgcccagcagcaggttttcccccaggtgcaggcggcgcgcggcgacctccagcgcgctctcctgcacgcagcgcgcgcgcaggcgcgagagcttgccctccggcaggtcggggtactgcttgtagagccggacgctcgtgcagagctgcagcaccgcgtcgcccaggaactccaggcgctggttgtgcacgtgcgtctccccggcgtaggagggatgcgtcatggccagcttcagcagggacttgtcccggaaggtgtagccgatggcctgttccaacttttcaaacattgcctgtcctttcctcgtccggcatacatcagccaggggcgcgcccgggctcatgtatgcctacgcaccgaaagaagcctgttcccccggtgcgtacgcgaatgatgccgattgatttacttctgattttcctcgatgtagcgcatggcgtcggcgacggtcttgagcttggtcaggtcctcgtccgggatctcgatgccaaactccgtctccatctccatcaccatcgcaaccacgtccagcgaatccgccttgaggtcctcgatcagccgggactccggctggatcgtggaggcgtcgatgccgagctggtcggcgatcattgccgcgatcttttcaaacacgctcttctcctcctctccgtctctatgctgtctatttcgccgcatcgcccgcggccgcgctgagctgcccggcgatgatgtcgaccaccttgccctcgaccatggtgcgcgcctgccggatggcgcaggcataggcgtgcgccttggacgagccgtgcgccttgaccacggcccccgtcacgcccagcagcgccgcgccgccgtactgctcgtagtccagctcgttcttcaggcccttgagcgcgggcttgacgagcagcgcgcccaccttggagcgcgtggaggagagcaggccgtccttgagcttgccgaggatgagctgcgccgcgccctcggtggacttgagcaggatgttgccggcaaagccgtcgcagacgatcacctgcacgcagccggtgagcgcgtcgcgcgcctcgacattgccgtagaagtccaccagcgggtggtcccgcagcagcgggaaggtcgacttggccaggtcgttgcccttctcgtcctccgcgccgatgttgagcaggccgaccttgggcttgtccacgcccatcacgccgcgcatgtaggcctggcccatgagcgcgaactggaccagatattccggcttgcagtccacgttcgcgccgcagtcgatgagcatgaccggcttgccggccgccgtgggcagcaggggcgccagggccggccggttgatgccgcggatgcgcccgatgcggaagattccccccgcaagcgccgcgcccgtggacccggcggtgaccgccgcgtccgcctcgcccgccttgaccgcgtccatggtcttgaccagggacgcgttgagcttgcggcggatggccagcgtggggctctcgtggttggtgatgacgtccggcgcgtcgatgatgcgcacgcgcgcctcgtcgtgcggccggctggccaggagcttgcgcacctcctcctgcgcgccgcagaagatgacgtggatgtccggcatttcccgcatggcctccagcgcgccgtccagcacgcaatcgggcgcgttgtccccgccgtagacgtccaccgcaattcggatcatgctcgttcctcccctatgcaaaaattcctctctcatgatagcagagaacgcggtcaaatgcaagattgccgcgtttttcggccctcaccgggcgcggctgcgcaggaagcggggcacgcccatctccacgttgctcccgatgacgccggtcgccgccgccttgagctcgggccttgcgttcgccacggcgtagcactcgtccgccacgcggaacatgggcaggtcgttcaggttgtcgccgaagcagacgatgcgcgggatgcccgtgagcttccggagcttgtccacgcccgtggcctttgtcgcgtcgaaccgggaaatctccagccagtaccactcgggcttgtaggcgtcgctggtgaagctcgtgtgggcgaagtccagcgcgcgggccttgggctcgagcggcaggagcgtctcccgccgcgcaaacgacgaaaggtagaacacctcgccctggaagagcgcctccatcgtcccgaccggccgcaggcgcgggtcgcccgcgcggtcgcgcgcgtactcgcggatgccctcgctctccagggaccgaagccaagagaccttctgcctgccgtcgatctgcgcgtagaccatgggcgacaggcccgcgtccaggaagacccgggcgacgcgctgcatctgctgcgcgtcaaagaggcagcggtcgatgtcccggcccgtgacggggtccacgaggaacgcgccgttgtaggcgaccaccgggtgtttcaggtgcagctggcgcacgatgggctcggccgaggtccaggaccgcgccgtggcgaccgtaaagggcagccccgcgtccagcatctcgttgagcagcggcacggcctcctccggcaggcgcggctgcgcgcccaggagcgttccgtccaggtccgagacatagagcgtatcgcgggcgaattccatgtacaggccctccttttttccgcgaaaaaataggcaaaagcccgacggaccgtgagtggttcgccgggctggtgttttccaagcttacgcctgcttttcttcctcgatcttgatgacctgcttgccgtcgtagtaaccgcacttcttgcagacgcggtgggcgagcttcatcgtcttgcactgcgggcaagcgacgatgccgggcatcgagagcttccagttggcgcggcgggagttccggcgggccttggagactttccccttgggtactgccatggtttttacacctccttatcgtctttgtcgtcgagcagcgctttcaatgcggaaaacgccgaccgctccagcgcgggatcgcacccgcaggagccaagattcaggttctgaccgcacaagggacacagtcccttgcaatcctcccggcagaggaactgcatggggaggtttatggcgatattggccaccgtaagatcggtcagatccacctcggaaccttcaaaaaggtacgcgtcgggatgatccggatcaggctgcctgacaaagatttcgtcaaagggcactttcatgtcgaaccgcgcctcctcgaggcaccgggcacagggagaaaccagggccgcggtcagttcgccatgcagcgcgacagaatcgccgattccggtcatgtatccgtgcagggcgacgtcgccggaaaacccaatctggtcggcctgaaactcctccacaggcgcagggacccgaaggtcgaactccaggttttcgcccggctgcttcagagccttttccacattgagcatcatacgctgtcacctcgcacacaaccattttccaattatagagggcaagccccgttttgtcaacgaattttttgcgcgtaacagaaatttagtctgtttttccgcgcgtcctgccttacgccttcttgccgcagagctcgagggtgtcgcgcgcgatggccagctcctcgttggtcttgacgaccaggatcttgaccttggaatccgcggcctcgatgaacccgtcggagcgggtgacgtcgttcttggcctcatcgagcttgacgcccatgaactccaggccctcgaccgccgctttgcggatgtggccgacgttttcgccgatgccgccggtgaagacgatcgcgtccacgccgcccatggccgccgcatagccggcgatgtacttcttcaggcggtaggtcatcatcttgatggccagcgtcgcgcgctcgttgccctcctccatcgcggcggtcaggtcgcgcatgtcggaggagatgccggagatgccgagcaggccggacttcttgttgaggatgttggtcatctcctcaatgtcgatgccgtcgcgcttcatgatgtactgcagggtcgcggggtccaggtcgccggagcgggtgcccatgaccatgccctccagaggcgtgatgcccatggacgtgtccacgcacttgccgtccacgaccgcggacagggaggaaccgttgcccaggtggcagatgaccaggcgcaggcccttgccgtccgcagagccgagcatctcggccgcgcgcttggagacaaagcggtgggacgtgccgtggaagccgtacttgcgcaccttcaggcgcgtgtagtagtcatagggcacggcgtacatgtaggcgtggggcggcatggtctggtggaaggccgtgtcgaacaccgcgacgttgggggtatcgggcatcatcttctggcaggcctcgatgccctggatgttggcggggttgtgcagcggcccgaggatgatgttgtcgtagatggcctccatgaccttggggttgacgacctggctctcggtgaaggacgcgccgccgtgcagcacgcggtggccgaccgcgtcgatctgcttcatgtcggagatgacgcccttttccttgtcggtcagggccttgacgatgtactccatggcctcggcgtggttcttgagcggcgcattgaacacgatttcccccttggcggaagactgcttgacgttgctgccctcgatgccgatgcgctcggcctggcccttggcgatgacgctctcgtcgtccatgtcgatgagctggtacttgatggaggacgaacccgcgttgatgacgaggatcttcatgtgctttctccctcttttttccgaaaatcaggagaagaggggcggagtttttccgcccttcctcccagatgttctgtttttgtctttttttacttctgctgggcctgcacggcggtcagcgcgcacagggagacgatgtcgtccaccgagcagccgcgggacaggtcgttgaccggacgggccagaccctgcatgaccgggccgatggcctcggcgcccgccaggcgctgcacgagcttgtagccgatgttgcccgcctccagcgaggggaagatgaggacgttggcgtggccggcgaccgtggagccgggggacttgagctggccgaccttctcgaccagggcggcgtccgcctgcagctcgccgtcgacgttcagctccggcgcgagctccttgacgcgggccgtggccttggcgaccttgtcgaccatgtcgcccttgccgcttcccttggtggagaaggagagcatggcgaccttgggctcggcgatctcggcgatgtcgcgggcggtcttggccgaggcgatggcgatggcggccagctgctcggcgtccggctcgatgttgacggcgcagtccgcaaagatcatgacgccgtcctggccgtaggccttgttcgggatctccatgacaaagcaggaggaggcggtggtgacgccgggctgggtcttgatgatctgcagggccgggcgcagggtgtcggcggtggagtgaatcgcgccggagaccatgccgtcggcggcgttcttcttcatcatcatggtgccgaagaacgtctcgtccttcatggtggccagcgccttttccggggtcatgcccttggccttgcgcagctcatagagcgtgtccgcgtactcctgcaggcagtcggccttggcagggttgaggatggtggcgcccgtcagatcctcgccataggcggcgatcttctcctcgtcgcccagaaggatgacgtcgcagatgccctccttgagcaggatggcggcggccttcacggtgcgctcttccgcgccctcgggcaggacgatgcgctttttgtcggccttggccttggccttaatgcgatccatcaaagacattttacttttcctccttgcctgtgttaccatatagagtagccccgcggggctggtttgcgatgggtcttgccggtttccattatagcgcgttttggcggatttgaaaaggcaaaacttgcgcaaactcgcctccctgcgcggcaaaatacgaaacaaagcacaaaggaggcgccgattttggagaaggtttgcggcgtgatctgtgaatacaatcccctgcaccgcgggcatgcgcatcacctggagcgcgcgcgggcgcttacgggcgcggatttcgtggtctgcgcgatgtccggccccttcgtgcagcgcggggagccggcggtcctggacaagtggacgcgcgcgcaggcggcgctgctcgcgggcgcggacctggtgctggagctgccggcgctctttgcggtgcgcgccgcgccggactttgccttcggcggcgctgcgctgctggcgggccttggggtggtgacgcacctctccttcggggcggaggatgcggaccttgcgcacctgaccgaccttgccgcgccggagagcgcggaggagtccgcgcgcatccaggcctacttagagggcgggcactcgcatccgcaggcgcgggcgctggcgcgcggccgccagctgccgccgaacgtgaccctgggcgtggagtacctgcgcgcgctgcgccgcctgggcagcggcatggagcccgtgcccgtgccccgcgaaaccgcccacaacgacgagcgtctgcacgcgctctcctcagctacggccgtgcgcagggcgctggcggccggggacgaggccggcgcgcgccaggcgctcccgcccgaggccgcggacctgcagctgcgcgccctgccgcagcccctgcccgccctctcgtccttctcctccatcctcctctacctcctgcgcacgacgccgcccgaggcgctgcgcgagcgcttcgccatcgcggaggggctggagaaccgcctctgccgggaggcgctcgccgcgccggacgcagaggcgctccttgcggcggtgcagtgccggcgctatccggcggcgcggctgcgcaggctgctcgtgcagatcctgctcggcctggacgccgcggccgtgcgcgcgcatccggcgccggagtacgcgcgcgtgctcggcttccgcaagcgcgccgagccgctgctgcgcgccatctcccggcaggggagcctcccgctcgtgaccaaggtcgcggacgcgcccgcaggcggcctgctctccctggaccttgccgcgcaggacgtgtgggacctggccgcgggccaccccggccgccgcgacttcaccgagcgcctgcgcatcctcgccgactgatccgccaaaacgccgcgcggacgccgcaaacattctgcggcgtccgcgcggttcgcgtgtcggcaaagccgacgcgccaaagcctgaaaagcaggcctgcggcccgcctccccggcttttcgccctctgggcttaaaacgctcgcctgcaggggcgctgacgcgcccctccgtgggcgtacacgccgccgctgcggattgcagagaaaaggggcgtcctgcaagctggccgcgcggcgttttcagccctcttttgcgggcgggatctcttcgtgcaggagctcccgcttctgccgcatggcttcgaggatctccggcatgcggcgctcggcctcctcgcggccgatgcggatgcactcctccgcctgcgcgatggaggcggggttgatgtgggagagcgccggcacgagcgtgaaatccgccatactgatggtgtgctgcatgacctgccactccatgatctccagggagtggaggatgacccgcgcgatgccgtcgcactgcgcgggctccccgcggtagcccacgtccacggccagcacaaagtccgcgcccatggcccgcgccgtggtcacgggcacgcggtccaccacgcccccgtcgacataggtgcggccgtcgcgcttatagggcttgaagatgccggggatggagatcgaggcgcggatgccctggtagacgaggccgtcgctgagcacggcgcgctcgccgcgctccaggtccgtggccacggccgcaaaggggatctgggtctgggcaaaggtcttgttcccggtgagcgtgcgcaccaggagctccacgcgg

SEQ ID NO: 3356 - DNA, 32759 bp, Unknown
  16S sequences of unknown bacteria
atgcccatgctactgcttttgcataccatgcgtctgctgttacgtcaaggaaaggtgctgcgtttacgggttcgggcttacctgctttgttccaaagtattgttgcagccattcctcttgtaagtgttccgttaggtgcgaatactccgtcgcttacgcctaccatccagcctttttcaaatacttttacgattgcgtcgtagttaggatcgtcgattgccacgtcgccgaatatgctctcttcttcaggagtctcgggcttcttgtcctcttccttatctttgtcatcgtcgtcttttctatcgttttctttctcttcaagttcgaagcttgaaccatgagacttattgtcgtcgaggtagtcttcgtattcttcctcgtccattacaacatagttaccgtctttgtcctttacaaggtgtttatcctcatcaacataatcgctgacatcatttgaaaactttccatcctcaatttcaatcatgcctgttgtttcttcatttacggttatttttccggtttcatcttttgttacttccgcaacatttcctttaacaacagcgtcttttattacaaggttaacatctctgctttcttcaacattctgtaatattatgttaccctcaaatgttccgtcttttattacggcatctatttcttcattattgctgttttcaatacataaggaattatcttctcctatagtaccgctgttcattacgaactcactgccgttatttgttttgttatcgacgtttattccaccccatgagttgcttccgtctgttgttatatcggttacttcaagctttgatgaatttgaaaccaccgcatatccgttacagtttttaattgttaccttatccaaatcagcctggctgtcgtatacgtttacgccgtgcttgcttaagttattaccgtcaattgttatgtcctttaccgtaacctttgcaccgtttactatgtttatcatgtgaacactgcctgctgtactgcctgctgaaacatagttgtcagccgctttaagcgtatgtccgttaccgtcaataattatattcttacttacgtttattgcgccgctgtttttgctgtttccgccgtctgtaacttctacacttttcgtaagcattacagtctcgccgtctttagcttcattaacagcttcaacaatactttcataagtatttcccgttgaagcgtttactgctgatatatcagaagtttcttcggtaacgccctcaacatatactgaaccgcttccgttgtcttctacttctccttcgacagttgaacctaataccgtcgtgtttccttcgtttgtgtttgttacattaccctctatagtagaatccgttactactatgtttgttttgctctgattctttacattgcctgtaataacagaattgtttactgtaagacttgtatttccaccgtcctcagtatctccgtcttctttaacatttgatatttttataacgtcgccgtcaatttttgctccgtcaacattaaccactattttattatcttcgtaattgcttccggccatgtttttgtccgaaacaactattgcaggtgcattttcagaattagtatttttaatctccgcaccttcttttatatttataaccaaatcgccgtagtatccggaacctgcttttcctgctactatagctccttttgttccgccgcttccgcctgctataaggtcttgctcatcactttcggcagtgcttattattgtaccgcccgttatttccatttctcctgccgcaatacggattgcctgctctccttttattgtaccgcctgttatagttgtctttccaacggcaggtatatacatacctgttccttcttctccgacaccgattatttctccgcctgatatgttaagagtatatccggcatatattcctccgctggcattagtaccgagtccctgtcctccggatattgtacctccggatatatttatctgaacagcttcattatcatatgtaccgtcttctccgtcatattttgagcccgatattcccgctactccaagaccgaaccaagtaagaccccagcttgttccgactccgtcggcatcttcattgccgttaaccgcagtacaaggaacaccctcaatattaccgccgtcaatgtttacataagcatttttgcctttccagtcgtcatttccgagccatggtgcaaaagtaaatatgggattaacacctgttacttcaccgccattgatatttaaagtaccgtagtttgctatagtcggcgaagcattatagtcaaggcatgtgttctctataataccgtcatttaaagtaacttcagctcctccgagtatctgtataagcctgtacttagttttagccgtaagattatcaacacttgaagatattgtgatttttccgttgttaccgctgtcatctatcgttaaactttctttaacattaaatcctacagtataatatgagattttaccatcgataacggatgctatcggatcaaacgttaacgtctctccgtttaaatcaattgttacatcctctgttacaattaaagcccctttaattgtaaaactgtcagttaattcaatatgtccgcccgaatttacagcttgacttaactgttctgcgtttgatacctgataaggacttgattttgttccatctccctcaagaggttcttcctcaaaaagagaaattcctatatctacttcatcaaaatcaacctcgtcctcgtcaatttccgtttcctgttcatacgcttcccatgcttcaatatcttctgttacgtctatttcatcataagcaaatgcatttactcctaatacgccaaatgccatcgatgtcgccaaaagatatgtagtcagttttttaaaccttcccatataatatcctcctttgtttacatttgtaaagccaatatttcagctttcattttacccccccccgacaaattctgtcaactgcaataattactatatttacaaactcaaaaatgttattttgactcataaattgtgcaaaataagtatattgttacttatgtaaacaaaaaaaggagagcttgtttatctctcctttcgttttatattattaggcttttttaaccgcaaaaggcagggataaatccctgccttcaacttttaatatttattcttctgtaacttcttcctctttaactgttattcccaattcgtcaagctgttttgcgtcaactacatcgggggcatttgtaagagggcatgaagcatcttttactttagggaatgcgattacgtcccttatgcttgttgcacctgtcataagcattataatacggtcaaaaccgaatgcaagtccgccgtgcggaggtactccgtacttaaatgcgtcaagcaggaaaccgaatctttcctgtgcgtcttcctgtgaaaatcccaaaagcccgaatatcttctgctgaatgtctcttctgtggatacggatacttccgccgcccagctcaaagccgttaagaaccatgtcgtatgccttcgctctaaccttagaagggtctgtatcaagcagttccaaatcctcatccatagggcatgtaaacggatgatgttccgcaacatatctgttttcttcttcatcccactcaaacatagggaattccgttacccataaaaatctgaaatcatcgggttttgtaagttcctgtcttcttgctatttcacatcttaacgctccgagtgcgtcaaatacaactttattctggtctgcacatataagtattaagtctccgggcttaccgttaagcgcgtctacgatttcctgtaatttttcaggagtaaagaacttggctatctgtgattttaaagttccgtcgtcatttacaacaatccatgcaagaccttttgctctgtatgttttaacaaattctacaagagagtctatctgttttcttgggtaatgtccgcagctttcagcatttatggctcttacgcttccgcctgcctctatagcgctcttgaatactacaaattcgctgtcttttacaatttcggtaatgtcgtttagttccatgccgaatcttacgtccggcttatcggaaccgtatctttccattgcgtctttatacttcattctctgcatgggaataggaacgtcaacatcaagtatttccttaaatactctctggataagtctctcgtttaaatccattatgtcgtcaacgtcaacgaaagaaagttccatatccacctgtgagaattccggctgacggtctgctcttaagtcctcgtctctgaaacatttagctatctggaaatacctgtccattcccgataccatcaaaagctgtttgtaaagctggggggactgaggaagtccgtaaaatttgccgttgtgtacacggcttggcacaaggtagtctcttgcgccctccggtgtgctttttccgagcataggggtttctatttccaaaaatccttcttccgaaaggaaatttcttataacctgagccgttttatgtctcattactatatttttaagctgacacggacgtctaaggtcaatatatctgtatttaagtcttaaatcatctttaaccgttatatcgtcttcaacctggaaaggagtagtttcactttcggaaagtattctcaattcggacgcgataatttctatagctcccgttttcatatttttgtttacatttccttcggttcttgcggctacaacgcctttaaccgcaactacatactcacttcttatcgtttccgctttattaaaaagcgctttatccgcattatttccgtcaacaacagcctgtacaataccagttctgtctctaagcgcaataaatataagctgtcccaggtctcttcttctctgaacccagcccataaccgtaacttcactgcctataagcgcttcgtttacatcacaacacatatggcttctctttaagccagtcatcgcttctcccattataaatatctccttaaaacaatattctacaacctttaatcataccattgtttttcaaaaattcaatagtatttcaacattcctttgcgtctccccatattctttcgaggttatagaagttacgctgttctttatcgaaaacatgtactataaggctgccgtagtccaaaagtatccatattcctccagagtatccttcggaatggtgtaatttatatcctgccttaaaaagcttttcgtttacgctgtcagccatagccctgatctggttagggttatttccgcttcctataacaaagaaatcggcaatattgctcaatccttttaagtcaagaacctttatatcttctccctttttatcctcaagtgcttctttagcgaggtttgccatttccagcgcttcctgatgtaaatctttattcatatagtcctcctcgattaaatctttgcataattattttttcaggtttttataatattcataagcttcttccgaataaggatgaagaagtctgtttctttccttaacatactttatcgtgctgtcaagtatatattccatggcctcgtccaaatttttatacgccagttctcttgccttctcaagcccctcaaaaggggttctgttaggctctatataatccgcaataaaaatgattttctccaacacagacatattttttttgccggtggtatgccattttattgcctccagaatatccgtatcttccgcaccgtattcccttttggcgacttccgcacccaaaaacggatgtataaggtctatctgttttttcataatatcgtctgtctgtatatgatattcctttgcaaaacgtcttttcatgtcaggcggataatcctttgcgcagtcatgtagaagtccggcatactcggctttttgggcaagctcttcgtctccgtagcgttctgccagctttctcgcctcttctgcgacgcctagcgtgtgtatatatctttccgttgacaacgccgacataagtttgctttttacagtatctttatcaagcattatttttaccttctttatataaatcatggtcagctatatatttttcggtttccttcggtataaggtattttacatttttaccgcttcttattttttcacgaagctccgtagaggatatatccagcgaaggaacttccagaaagaatatattgcatccgtatttttttcttatgctgtctatcttatttttaacttcctcattgtcgaatcccggtcgcgtaacagctataaaatcgcacattttaagcagtttttcgggctgtttccatctttccacagaggttatctcatcagcgcccataacaaaatatatttccgtattaggattattttttttgatttcggacaatgtgtcgaccgtataggttttaccctttctttctatctccatggaagaaacagcaaaagccggattatcggctacggcggcttttatcatttcataccgttcctctgccgtggctgaactcatatttttatgcggagcctccccaagaggcattataacaaccttatccacgtcaaaactgtcgtagactgtctgcgccgttaccaaatgtccgtaatgcagcggatcaaacgctcctcccattatggcaaccctgcggcatttcccaaaatcgaagtctgtcatcgtattatctcattcctttttagccttcggaagttctattatcggcttttttgccggtctgtaaagcacaaatctgttccctataacctgtaccacatctgaatgggttcttgcggctattgtctgcgccgcctctcttgtatccagcaggcagttatcaagtatattcatctttaatatttctcttgcctccaaggcggaatctacagcttcggtaagttccggagtaactcctgcctttccgatatgaaaaatcggctctaagccgtttgccatgcttcttaaaaatgctctctgtttacttgttaacatagttttctccttttttacgtaatatatttagtataaataattgttctgctttttgcaataacaaagctgtttttatgccatttaaaacacataaaaaggaccggatttgttccggtcccgtttgttttacttaattatcagactatcaatcgtcataatctacatctttgtcaagaatttttcctgtttctgcatctatcttatattcatactctgttccgtcgtgtctgaattcgatttcgtatacggctcttccgtcgtcatggtcaagagtagctttaatatatcttatatctttttctttaattccggcgtcttttgcagctattgatttagccttattgtcgcttatatatttgccgtccttatcatcgtcaacttctttttctgtttttctgctgattatttttcctgtgtcgatttcaatttcatattcatactctgttccatcgtatgcaaattctatttcgtatgtccatacgccgttttcataatctttgtcaactcttatatactcaacttttttgccgccgatacctgcgtctttgagtatcttatccttaagttcttcaagactgaattttcccttaccgctttcaaatgaatccgcatcagttactgtacggtcatcatcttttaatgtaacggttttttcgtctccgtcccagattacgtcattatccattatctcgcctattgccctaagcggaagatatgtggatccttcgtaaagaagcggatatactctgtcgccgttagcgtctttaaacctctgctccttgttgtcgattactattttaaagtcttttcttatctgtacgtctatgtcctctctgctttctctcgaaggtttagtagtatttttatactcgtctctgtctccgcttattgtaattgtttttgtcttttcatcccagtttacgtttttgcccattatctcgccgatagatctcaaaggaagatatgtggagtcatcgaaaagtatcggataaatataatctcccgaagcatttctgaaatatgttctttcatcgtcgattataatacttatgtcaggtctgagttccgcctctctctcttctatttcagcggcgcttactgaaacaaccgatgacacacacattactccggcaagcattgtacctaaaattttcttcataatctatccctccgtttatatttctaaatcctattttctttaaatagaatatatcacatttttatataaaaattatttttttaattaaatcttaaaacaaaattaataagcgtttcattatccgaacaaaaaaagagatttcgaacacaagccaatttttctcacggtaaattgtgtacgaaatctcgtataatttttagcggtagtaagtaaattccatatcgtatactcttactgtatcgccttcttttattcccttttcatcaagagcggcaataatacctttttctcttaaatatttctggaagaacgcaaatcccttttccgtttccagatttgtatatcccatcatcttttctacgcctacgcccgtaacaacgtaatagtttccgtcgaatacttctatctcgaaaggctcgttgtttccttccatagcttcaaattcttcatattcttcttcaaaaactatatcttccggatagtctttgagtatcaatgatatttcgtctattacgtccgtaaggcctctgtttgtagctgccgatatgggaataacttttattccctgcggttcaaattccgctttcagcctttcaacattttcctcggctcccggaatatctgttttattggcagctattacctgcggacgtttcataagttcgggattatatttgaaaagctcgtcgtttatcttatgcacgttttccacagggtcgtctccctctactgccgcagcatccacaacatgtataaacgccttcgttctctccacatgacgaaggaattctatacccagacctacgccttggcttgcgccctccactataccaggtatatccgcaaggacaaaatcattgccgtttttaagctgtacaacgccgagattaggagcaagtgtagtaaagtgataattggctattttggggttggcgtttgtaaccatagaaagaaatgtcgacttacctacattgggaaatcctataagtccgacgtcggcaataagcttaagctccaaaacgacgtcatattccttggatttctgtcccatttccgcatatctgggagcctgtcttgtaggtgtggcaaagtgctgatttcctcttccgcctcgtccgcctctgataacgaccttttcctctccgtttttggttatgtccgccataatcttgtttgtcgcagcttcctttacgaccgttcccttaggaaccttgattataaggttttccccgtccttaccgaaacggtttctttttccgccgtcctgtcccggttctgccttatacattcttttgtatctgaagtccatcagagtattcatattttcatcaccgacaaaaataatgcttcctccttttccgccgtctccgccgtcaggacctccgtgggttatatatttcgctctgtaaaacgaaacgcagccgttgccgccgtctccgccctttatgtggattttaactctgtctacaaacatgctttttcacctctctgtactaaataaaaagcctatgtgtttaatcttacctttcaacaatataattatgccgtaagttcgccaaaaccgatcccatcgactgactttggccagcttaagacaaaagaaggtttcaaatgactccatttgaaaccttcatgcttgattattctgcgatttccactgtttctacaggataaacagaaacctgttttttgtctttgccttttctttcgtatttaacacgtccgtcaataagagcaaagagcgaatcgttgccgccgatgcctacattgttgccgggatggatttttgttcctctctgtgtatataagatattaccggctcttacaacctgtccgtcagcgcgttttgcgccaagtctttttgactttgaatcacggccgttctttgtagaacccataccttttttatgagcgaaaagctgaaggtttaattttaacatttcagtgcacctcctcgtttatcgatatatagcaaccatattctttttcaatatcgttgagtccgttcagcattgcctttaaaagcaactgaacgtcgcagtttgcctttccctgccttgtatccggcagattaaggctgagatatccgccttttttttcatcggtctcgcattcaaaattttcggaagtaaaaagctcgatacaattgattgtatttattgtaagcaccgacacggcggaacatacaatatcgcttccctcttcggcaaaatccgcatgacctttcagacggaaaccgtaaatatctcctgttttattacgaaatacatttacacgaatcataataattaaagagcgattgagtcaattttaagcattgtgtaaggctgtctgtggccttttttcttatggaagccttttttagatttgtatttgtaaataacaacctttttagccttaccatcgccgataacagtagctgcaaccttagcgccttcaacgtaaggagctcctacagaaataccgttgtctcctgaaactgcaagtactttatcaaaagcgtaagctgaacctgcctcaacagcaagcttctcaactttgattacatcgccttcagatactttgtactgctttccacctgtctcgataattgcgtacatatatacacctcctcgcaatttactcgccgaatacggtatccgaaccctttgtccgaattttcaacctcttcgagcggctaaacacacttagatataatatcatagttgaatttatgtgtcaacaatgcttcctcttattttttcgattttcccatattttttgccatttttaattttacaagctttccaaacgcacccatagacttatatgccgatgtcagaagtcgtttaaactcttcctctcttccgcaaaatgagtcggcattttctattctctgagccgcttcattatatttttcatcttttatcaaagcattgcaaccgtttattaccatatcgcagtatttttcatcttcttttccgaacagtcctgcgtaaagttccgccgctttatcatacatggttacggcgtctgtgtacctttcctgtaacatataaagttctccggcttttgcaagtatatccgcaaactccgtattttctccgtaatctctccttacaatgagagcggtctcgcttaaatattcggttgccttcgtatatttattaagttttgcagccgtttcggaagcttttttcagaaagtcacagtattcctctgtcggaatattctctcttgcttttgcctccgcaagccccttctcaaaataatccgttgatttttcaggttcgttttcaaatgccgctcccaaaaggcagtatacttcagaagcatactttataaaatcggagctttcttccgatattgacggaagcaacttttcaagtctttcacccacttctttggctctgttcaaagctgtcatcgctttagccgcaagtatttccgcctcgcatttttctcctgtgtttttagcatactccaacgctttgaccgccaagtcggctgcgttttcattttttccgagtattttctcggcttctgcccattttaatgttacgttgtacatgactctcttattttctttatccaggtcatcgtatattttctcgaatatctcggccgctttttcgttgtctcctcccgaaacaagttccgatgcaaaatcagccttttccgcagcaataacagctttatcaataccatcgcttcttgaagctataccctctgccctaaatataatttcttcggctttctgcttgtacccgagtatatattgagttttggcctgcataaacataagctttaaaaactccgtattgtcagatgagtattttttatgcagggatacggcttttttcaatttatcggcagcctgttcatattttttcatcttatacaaaactttacaatgggtgcaaatacatctgataaaaaacggtgtgtccgttcctatcatagtttccacaatttcctctgccgattgcagatattcctcggtcttgacatataaatcaagctttatcagcagttcggcgctgtcatataaagcctttgcgtatttcggatgtctttttccgtattccgactccctgtattcaatcaatttttcgcaaaaccgaaccgttttatcggattcgcccatgttacaacaagcctcggccataagccttatattttccgcatagcctcttacttttatgccgcctgttattataatgtctttgttcattataagggactgcataaaaaagccttgcgctctcagattatcgccttttttcatatacagtcttccgagcgctatcagagactccccgaccggttcgcttatctcgcccatattttttcttttcaattccaaggctttttcctgtaattctatagccctgtcatacttttccgatttttcataaatttcggcaagactgataagcgtaagtatataatgcggatgattctcaccgaccagtttctctttcatttccaacgcttcgttatggtattctatcgccttttccaaatctcccaaagcacagtagtctacaccgatatttgttataacatcaccgtaaaacacatgattttttcccagcatttcttcaacgagcgaaagaacccttttatgtacatccaaagctttctcatgttctttattcagattatacatcaatgcaaggttattaaggacggaaataaaatcaagatgttttgtatccatcagcctttcacgcacagctacagcctgttcatactgctttgccgcgtcttcaaacctttccgccttttggcatacaagagccgagttcagaagatatgtcattttaaaatagctgtctgcctcgtttattttttcggatattttagccgctcttccgtactcgtcgcgcgctcttctgtagttaccgtattttctgcacgcatcggctaaactgacatgtatatccaaaaaatcgctcatttcataatttttgatattctttgcgatttcaagagtattcgtcaatatttcaacggctttttccgtttttccccaatctgcgtacatattgccgagattatataaactgtcggcatattttacactgtgctcgccttcattttcctttatccttccgctgacggttttaagcactttctccgccttggaaaaatctcccgatgaacttaaaagaactccgaaatttgtcagcgtattcagataagacatgctgttttccccgagcagttctttttttatcccggcagcctctttgtacagttctttagccctgtcatatatatgaacatcatcgaacactatcgcaaggttgtttatatcatcggcgtaagactccgtattacaagcgttgttatttttataaagctccgttattttattgccgatatctattgcgtcggcatatcttttctcattatatgaatctgtaaagtctttcctaagattcaccaattctctcaaataataacccattttctcctccgaccatgaagttaaataatgctgaacaagggaaaatccattggattttcccttgttattataatattatattcctttttccgcaaggctggcaacagcggctttgattactccgtaggagaatccctttctttgtaaaaatccgtaaaccctggataattcttttctgtccatattggcgaaatcttcatactttctctcaagcaaagcttctgccaacggctgttcgtctatttccgcctcttccaaagcctcgtctatgacttcttcttttattccacgctctttcaattccatttttatgaggaatttccccttcggtctgagtttcatggtttcctttatgtactttctgcaatactcttcgtcgtttacatattcgtactttttaaggaattccattactctccgtattatatcctcaggatactcatattcccccagcttgacggcaatttctttttccgtccgcattttatatcccaaataccttatggccgcgtcctgcgcctttatatacaaagtcgtgtccataatatattcataggttgccgtcggtatttcttcgccctctttcagcttaaaatacagtatgtcctccattataagtccgaaagcgaactccccgtcgatataaaccgaatacctggatttattttttttctgctgctctattctcgttactgtcatggtttcggcttattcctcttcatatcgctcttcgtcttcatcttccagagtatatgcgtccgacggaattataagtatatcctcatcgtcttcgcttattacctcggcttttttagcctttttgggcttttctgttttttctgttttttcggcttctgcggcaggcttttcaccgttgtttgcctcttcattaagtccgtagtggtctcttacctgcttttctatttcgtcaagcacttccgggtgttcatggagatattttttcgcattttctcgaccctgacctattttttcatccttataggcataccatgctccgctcttattaattatgtcaagttcagtagctaaatcgagagtatctccctctcttgatattccttttccgtacataatatcaaattccgtagttttgaacggaggcgcaactttattttttgctatcttaacctttgttctgtttccgacaagttcgttattcacttttatcacgtcggcttttcttatgtctatacgcacggaagcatagaacttaagtgcgcgtccgcctgttgtcgtttccggatttccgaatgtaacgcctatcttttctctaagctgatttataaatactaccgtacagttcgatttgtttgtaaaagccgtcaactttctgagcgcctgggacataagtcttgcttgcagtcccatatgggattcacccatttcgccctgtatttccgcacggggtacaagagccgcaacggagtcgacaatgacaatgtctattgctcccgaacgaaccattgtttcagctatttccaacgcctgttctccgtcgtcgggctgtgaaagatatatattatttgtatctacgccgagattctttgcataaatcgggtcaagggcatgttcggcatctatatatcctgctaatccgcccattttctgcacttccgctacaaggtggagagctattgtcgttttaccggatgattccggtccgaatatctctattattcttcccctcggtactccccctactcccagagcaatatcaaggctcaaacatcccgtaggtattacgtccacatttgctttcacaggctcgtcgccgagtttcataacggcgccttttccatactgtttttctatataagcaagggcggcttcaagagctttccctttatcgtcaaatttactgaaatccttaggattggtttttttctcagccacggcaatcttactccttccaactataacgaaattatgttctcattatagaacaggtatttctattagtcaagtatcaattttcttcttaaaaaatcaagggcagagtatgctgctctttccctgattacgtttctttttcctgccagatgcagttcttttacatacgacttaccgcctatgtataccccgacataaacaagtccttccggctttccctcggacggtccgggtcctgctacccccgttgttgaaacgcctatatccgcgcccgacgtcattgctatcccttttgccatctcggcggcagtctctgcgcttacagctccgtatgcgcttaaagtctcgtcttttactccgagtctgcgttttttcgcctcattgctgtaggttacggctccctccggcaaaacctcggatatgcccggatattctatcaattttgcggcaacaagtccgcctgtacagctttcggcaactgcaatcgtaacttttttgtcgataagtattttcgccacagtctcctgaattgaggtttctccctctgcataaacggaatctccgaaacgcctgtatatttcttcggcaatcggctcaattattttctcggcttcctcagttgtctttgcactggccgtaattctcaaaatcgactccgtatcctttgcatacggcgctatggttgggttgctctgtctgtctatcatgtctctgaccatgctctccattgcgctttctccgactccggcaattctcagcgttctcgatacaagggtatggttctgcttcaacgcaagatacggctttacctgcttggaaaacataggtttcatttctttcggaggtcccggcatcataatcagaattttattattgtcctctattattatccccggcgccgttccgttttcgttatacataacggtagaatttaccggtaccatagcctgtttaacattattatcggtcatcggtcttttcattttatcgaaaaactttttaattctgtcaagggctttttcatccagaataagttttcgtccgaaatattccgctcctatttcctttgtaaggtcgtccccggttggtcccaggcctcccgtagttattataatgtcggctctttcaaaggctatgttcatggctgttttcattctgtcgggattatcgccgacaactgtttggtaaaatacgtctattcccagttctgccaatccctgcgctatatactgtgcgtttgtattaacaatgtctccgagaagaatttccgttccgactgcaagtatttccgcattcatgctaaggcctccgaatcagtttttaagtacgccgatgttcttcactatataatcaacgcccgaaattaccgtaaatacagttgcgagtattataagaatatttcctataattccgcctactccaagcagtactaatattatcataagcatctgcgtaaccgtttttatttttccccaccagcttgccgctattacgagtccgccttccgcggcaataagtctgaatcccgttataataaattctcggcttatgattataattacaatccacgcaggaaggaatcccagctctatcatacaaataagcgccgaagatacaagcagtttgtcagccagcgggtccataaattttccgaaattagtaacgagattatattttctcgctatatgtccgtcaagataatccgtaaatgaagcgacgcagaatatcactacgccgacatatctgttaacaggttcgggaattatgcccgacatcaacgctataataaatacgggtatcaatataactcgaaatatagtaagtttattaggtaaattcatagacatcagtaaacagcctcccctataagatcgtaatcgctggcttcgttgattttaacgtctgcgaagtctcccgacattatttcataatcgcttttaaagaacacaagtccgtctatgtcgggtgcgtctttataacttctgccgcaatatatgccctcttcgggaatttttccgtcaacaatcactcttattgtctttccgttcatatcggaacacttttcggcagatatagttttttgaagttccataatgtagtccttacgttcttcttttaccctttcatctatctggtctttcatctcggcagccggtgttccttcttcgggtgaatatgtaaatactcccaacttatcaaatctgagttctttgacaaaatccgcaagctcctcaaattcttcttcagtctctccggggaatcccgtaattatcgtcgttcttatgcaaatatcgggcatagcctttctgagcgccgctattttatccgttatcagctttcttgacgatcttcttcccattcttttcagaaccgtatcgcttccgtgctgtatgggaatatctatatatttgcaaatcttatcctcttccgccattgcctgtatagtttcgtccgtaagagtttctgcatagcagtacaacagctttatccactctattccctctacggcgcaaagctttttaagcagttcgtgcagcataggttttccgtaaatatctctgccgtatattgaagtatcctgcgcaaccacaagaagctcttttacgcctgcctccgcaagctgttttgtttcttccacaaggctttccatagtccttgaacggtgtttgcctctcagtttcggtataatacaatatgtgcaatggttatcacagccttcggatattttcagataagcgtaatgtcccgatgtggaaataatgcgttttcccgcattttcctcattcatatgcgtatctatatcctctattacttttatcctcttttcaccgccgagtattctgtccgcaacatccgcaaccgattcgtatgcggcagttcctattacggcgtctacctccggcatttcttcaaaaatctctttttcatatctctgtgcaaggcagcctgcaacgataattcctcggcatttcccctcttctttgtattgagccgtttcgattatcgtttctatgctttcttcaagggcgtctttaataaaacagcatgtgtttataactataatgtctgcatcgctttcgtcggaaacgggattatatcccctttcctttaatattccgagcattacctcgctgtccaccctgttcttgtcgcacccaagtgaaataaacgctatgtttgctttcaaacaatatcactcccaatgttaaaatgtcttccgtttgtaccgaatatataaaacattttgttttagtatttcagcaatataaaacaaatttattcgccgtttctgtatgcctccaactgcactttattcaaaagcacctttctcggcttacttccgtcttcaggaccgactattcccgcatcctccagttcttccataagccttgcggctctgttataacctattctgaactgcctctggagcatggaaaccgacgctttctctttatttactacaagttctgcggcgttgtcaaaatattcatcatgctctcctgcgccgcctcccgttttaacggcggaagaaatttcttccataaccgtttcgttataatctgtaccgctgctttcttttttcagaaaatctacaatattttcaacttctttgtcagttacaaacgctccctgtattcttacgggcttgctcatgcctgtcggataaaacagcatgtctccctttccgagaagtttttccgcaccgttcatgtcaagtattgtcctcgagtctattcccgacgataccgcaaaggcaagtcttgacggtatattagcctttattactcctgtaatgacgtcaaccgaaggtctttgtgtagctataataaggtgtattcccgcggctcttgccatctgtgccagacggcagatactgtcctctacttccttcggagaagccatcataaggtcggcaagctcgtctattattataactatctgcggcataaaatccgactcgcccttttcggctttcatagcattaaaaccttttatatcccttacggaatgttctgcaaaggagttgtatctggcaagcatctcccttaccgcccagttaagagcgcccgccgcttttttagggtctgtaacgaccggtatcataagatgcggtataccgttatatacgctgagttcaaccaccttagggtctacaagaataagctttacctcatcgggttttgccttataaataatacttgtaataagagtatttatacatacgctctttccggaaccggtagcgcctgcgatgagcaaatgcggcattttcgctatatcggttacgaccgcatttccggctatatcctgtcccagggcaaacgccaattttgaagggaactttttaaactgttccgactccaaaacggttctgagatatacggactgctgttctctgttaggaacctctattccgacggcggcctttccgggtataggcgcctctattcttattccgcttgccgcaaggttaagcgcaatatcgtcggcaaggttgactattttgcttacctttactccgtggctcggagaaacctcatatcttgtaaccgtagggccttgatttatctgcattacctttgcgtctaccccgaaacttttaagagtgtcttccagtttctgtgccgttgccagcatctgtgctttcgactgagtcgttcctgccttggggtctttccctaaaatgcttatgggcggaaatttataatctgttttcacaggtttttcaggctccgccttatctccgtccaaccccattaccgttttcatttcgtcgggcgtatatatgtctccgccgattataccgctgtcaatactgttttctccgagtttatgaggcatatacccttctttggaagccccctttgtaataatttcattttcggtttccagacattccctttctatttcatcttcggaaacctcttccaaaacagcgtcctcgggtattccgtttatttcaaattctatttcgttctcatcttccgcagaatcctcatcaaaatcaccgttgcttatgacgcattgtatccctctgtctttattaaactgtattacggctccgttatcgtcattttttatatccatttcgggctttgccgtaccggtatgccttgctatgtttcttacaaggtaatccgatggcatctgtccgtcgggatacagttcttcctctttttctccgccgatgactattgagtcgttgcctcctgcaaatccgcctttttcccctgcgtcaaagccgtctttatccataagtatgttgaatacttccttgcgtttttttactctttcggctctttccgcctgttttatctctctctctgtttcttttactttcagtttctcggctcgtaccttcacccgttcttctcttcgtttgccgctgtcgcccacatagcgcgccgcactttcaactccgtcaaaaaacgaaagtcccgttcccattacaaccgaaactataataagaacggcaagtattatatatgttcccagtttatcgaagtatttcaccatagttcctccgataatacctccgacaagacctccgttgccggcgcttccgttcgcaaacagattagccgcctttacaacctgatccccaagcgttatggcgtgggcaaatgaagccatacatactacaaaaagagccgaagctcctattttaaactttattccgtacctttcctcactgaaaagcgaccatacgcatagaacgattactataaacggcaggaaaaaacctcccagaccgaaagtgcctttaagcagacttcctataaagtctccgactatgcctattttatctgtaaacaaacttatgatagctactattgatacagctattataataagacttattacctcatcaaaaacgccgctgtcatcatatgcgttcggcgttgtttttcgtgtattcttttttgtattctttgacgaagtcgtctttcgtcctccgtttttcgtattcgtccgttttttaccggtcgatttgacattggctttttttgttgttttcttggccgccgtctttttctgtgccattatatcacctcataaaaatccagttggattacataattaacctattatagcattataacataaacaaattaaaaaatcatttaatttatctcatttatatgatagactgagtaataatttagttttaggaagtgaaatttatgggtaccgaccaaacaaaaacccctctggtagacgcattgaaaaattttgataaaatatctcccgcctacttctgtataccgtcccatcacagaggtaaaggagcctcctcgtcttttacggaagttttcggcaaaaccgttctgaagtatgatttgacggaaacgcctcttacagacgatttgcacgaagccgacggcgcaataaaagaagccgaaagcctcgcttccgagcttttcggttccgaccgtacttttttccttgtaaacggtacaacatgcgccaatgaagcaatgataatatcatccgtatgcgaaggcgaaaaaatacttgtagccagaaactgtcataaatccgttctcatgggtctgataataagcggagcctctcccgtttacatagaacccgaaataagcggtgttttctccgcattcggcagtatatctcccgaaaaagtcgaactcgcatttaaaaatcaccccgatataaaggcattcatacttacaagccccacatactacggaatcggaagcgacttacaaaaaatagccgatatctgccactctcacggcgctttgcttctggttgacgaggcgcacggctcccactttgctttttccgataaactgccgaaaacagctctttcctgcggagcggatatggtttcgcaaagcacgcataagacccttaattccatgacgcagagttccatgcttcatgtaaaaggttctcttgtcgatatttcaaaggttgacgccgctttaaaaatagtacagtccacaagtccgtcctatatacttatggcttctttggacgcggcaagacaaaatgctgcgctgaacggaagaacggcggtatgccgtatgctcgatatcacctcatacatccgttccgctctatcgtcaattgatggcgtaagctgtcccgaaaatgttgacggaaacgaagttttttcatttgataagaccagaatcatattttcggtcaaaggaataagcggtttttctctgtcggaaattcttcttgaaaagtacaatatatgctgtgaaatggctgacaattataacgtagtctcgataataggcagttcggattcttatgaggacgcagaccgtttaataaacgcggtaaaggaaacagccgctacagtaaattcgggaaaaattaaggagttctcacttcctcccatgccgccaatagctatgacgccaagaaaggcattttttgcaaaatctacccgtactaactttaaagattctgtgggaaaagtaagcgcggaaatgatagctccgtatcctccgggaatacccgtaatatacccgggcgaagtcataacggaagaaatatatgaattcatatcggaagcgataaaagacgagcgtcatattcacggtttttcagataagagtatggaaacaataaaaataatctccgaatgatattgaacccttaatttcaaagaactctcttcaatttataatcggttttatatacagcacaaaataccctgtatcgttatataaaacgatacagggtatttttaattaacgaatatccgtaacaacgtattcattttcggattcttcctgaacatattcaatctttatattatctcctacgttctttctcaatatatcaacatggtctccggctttaacagaatataatccgtcatcgccctcaagcataatataaatatatgtgtttccgtcgacaacaatatccttaaggagcgttattttaccttccgccgataatttttctccgctttcggttatattaactccgctgtctttcataagattttcataggattttacacattcgttaacggtatctcctattgctactatttgatacttctgtatatttaccatggcatactttttcacaagacctgctccgtctttaagcgcaataaaatatgtcggttctcctcctacatttaacaacagtgggaatgtagccgtatatccgagatgctgtacctgtccttccgccgatgacatagccgaaaattcctccgctcccgcaatctcataataatttgtttcctttgtacgctgattcatcaaaacaaatccgacgtttgactggtctccgctgacggaagtaacgcccgtatatacccatacgtcgtcatgcaaagctatatagttatatccttcggtcgttctgagacagttcttctgggcaaaaaggctgtttataaatccatttgacagagttccgtaatagtcatactgctgcataagaagattagcgtcatacactctgtctatccactgaggaatatccttaacctcataataaacatgctctcccgtaacggcgttaagcacaaccgcgccttttatatcagtacctccgaaaagacctatcgtatggtccataacagggcaaatccaatacggcgttccgttatcgtctatttcaaaatatgttcccctaaacatagccgtagggtatctgaaacgtatatatctcatcaagtctctgccgaaatactccgaaggagaaatttttattccgtcattcagctttacaagttccgcattctgggtagacatatctataagtatatacgcaggtattcctccgcctctgtttgttatccactttattgtactggcatatttcagcggtattaccctgtacggtctgccgttatagttgatttgtgaagaatactcgcttacctcaaactgggaaaccatatccgtcatcgttcccatttttctttcggctataagcgaagccgaattgctgtcaagtatcggtatcttattaaagtcggcctcttccacatcttcttcaaaatttcccgtattcactttcataaggctgctgtagtcccctgctctgaatattggcatagaaatcgcatttcctataagataaacagccgcaaacaccaacgctgctttcgccagtatctttacgccttttgtgccttgtgaaatacttccccgtaaattacgcaggtctatctggcttataatcttatatgcgtttataacaagccccgttacaaccataaaaacaagaaagccccaaaactcctccgcctttatgtttatcggcggaagataggcataatatcctatcgcccaaacaatgattgttgcgaaaaaagaaaaatattttttcattcaattcctccttaataaaaatgtgatgtcaatgtaaataataatttattgacaatttcaaagctttacagtaatatcctatttacatatagatatttattacttatactataggtactttccgtttgcaaatgtatataaagtctcaccggccgaatatgcatttgtatatcgacagttacaaaattcagttacggggagggaaatctatgaagatagaaaagatcagcgatacccaagtaaagtttatactcacccaagatgatttgaccgataaaaacatcaaactggaagatcttgcagtctctaatgataagaccaaggagttgtttcaggatatactttccaaagctcttgacgaatgcggctttgatatcgatgacgcgcctttaatggtagaggctttacctgtagcgcttgacagcattatgataatcgttacaaagcttaataccgaagacatgcagtccaaggattcatcgtctgcccccattatatctaaagatcttcatcgatacaagagaaactccattacagtacataattcggaaggctcggataattccgatacgaccatatattcttttgaaaatcttgataatgccatagacgtatgccttagattatctactctgaaatttgtcggaagttctctttataaaaataacggtaaatattatcttgtactacagacagacagcagtgataatgaaagcctctcattcatcctcagtgaatacggcgaaagagagaattcaaatattcttgtaaaataccatttgatggaacacggtgaaacaatcatttcggaaaatgccgttgaaatactcgccgaaaacttcatgtaattattatgtcaaaaaccgcggagaaataatcttccgcggtttttggtttaaatatctttaaaatacataaaaaacggcttcaaaaattcaaatccttttcgtacttcatcaagcaacgagcgttcaaataaactctcatctattttataatccgatgaaaacgctaaattcctatattgataccattctttaagttcttcgggcgttccttccggcgcaaatttctttttatacatctttacgtccggatgaaaagtcttttgccccttcatttttttgttaagcctcgcaagtcctgccgtatcggcagtcagcttttttctgtatcgcgccatgtattccgactttgcgtcataaaatcccatgcctgcgcaccaaccttcgggtgaaatctcaaaatagaagcaacatttttcctgccatcttccctctccatagttaaagacagtccacattctgtccttatagggagatttatcctttgaaaaccttatgtccctgttggctctggatatagacggaaagaatatctcgcccatacccatactattcagcatatcggctgcctctgcggcaaaaagcttcatcggagctttaagcaggttattatatctgtctctgttttccgaaaaccactccgtattattgttcatcctaagttcccaaagaaaatcaatatactccttcggaaatccgtcaaaatatttttccatacaaaccacctaaaaaggcagccgtttcggctgcctttaattaataaaattaaactaaaaatccgtttccgttgtttataagcgcaaataaaggtgcgaatacaagtgaaacaacagtcataagcttaataagaatattgattgaaggacccgaagtatctttgaaaggatcgcctacagtatcgcctacaacggctgctttatgggcttcgcttccctttccgccgtggtttccttcttcaatatatttcttggcgttatcccatgcgccgcctgagtttgacatgaatatagccataagaacacctgtaacaagtgaacctgcaataagtccgccgagcgctcttgttccgagaataactccgacaataataggcgccgctacagccataacgccgggaacaagcatttctttaagagcggcttttgtggatatagctacgcagctcttgtagtcaggcttatctgttcctgccataattccgggatatgctttaaactgacgtctaacttcttcaatcatctggaaagctgccttacctacagactgcattgtaaatgcagagaaaaggaaaggaagcataccgccgatgaaaagaccgacgataacctgtgtgtcaagaatatcaattccttcaaggttaactgcctgtgcatatgatacaaacagcgcaagagccgtaagggctgccgatccgatagcaaatcctttacccatagctgccgttgtgtttcctactgcatcaagtttatctgtgatttcacgtacgctttcgtcaagctcgctcatttcggcaataccgccggcattatccgcaataggaccgtatgcatcgacagctactgtgatacctgttgttgaaagcatacctacggctgcaagagcaattccgtaaagtccgccgaaaccgtaagctacaagaatacctacggctataagtattataggagcggctgttgattccatacctacggcaagaccgctgatgattgttgtagcggctcctgtttcggactgatccgcaatcttcttaacggatctgaaatcgcttgacgtatatctctctgttattataccgataataacacctacgataagacctgcaattatggaaatcgcaaggctgaagctcttaaagaaataattacttaaaactattgataaaataaccactatagcgctggctacataagtacctgtcttaagcgctttatgaggatttgatttttcgtcgcctcttacaaagaagcatccgatgatagctgcgataatacctacgcctgaaagaacaagagggaatacggctccttctgttccgaatgccacaacgccgagagttacggctgaaacgatagcacctacataagattcaaaaaggtctgcgcccatacctgcaacatcgcctacgttatcgcctacgttgtcggctataacagccgggttacgagggtcgtcctcgggtattcccgcttctaccttacctacaaggtcagctcctacgtcggcagcctttgtataaatacctccgcctacacgtgagaaaagagcaacggatgaagctccgagactgaaaccgaaaagaatatttgtatcgcctgttaccatgtaaacgatacttacgccgagaagaccgagaccgacaacagacatacccataactgcgccgccgctgaacgctattgaaagagctctgttcattccgcttgttctggctgcgtttgcagttcttacgttagcttttgtagcaacgctcattccgaagtatcctgcaagaatagagcataatgttccggctacaaaggcaattccggagccgacgccgatacctacggcaataagtacaaataatacaacaataaaaataaccagaattctgtattccgctgttaagaatgcgtgcgcaccgtcgctgatggcttccgcaatctctttcatcctatccgtacccgcttcttccctagaaactttcttggaaaggaaaaaggcaaagataagggctataacgcctactatgggcgctataaaaatccagtttcccatttttagaccccctgtttagataattaaattagtaaaattatatataaatcgaaccttaaaaaacgcgtctttaaaataacggttaaaatatataattgcgcgcgtaatatcggttcaaaatatatcttctgaataatatacataattattccaaatacttttttattatattctaataattccataaaatcaagctatttattaaggttattccgcattatgctgtatacatataccacattataaccggattcttacagtgcatttaaattcaaaaactgtcgatttatgtatacaaaaatccgtttctcttttattctgttttaaatcttgcgatttttataaaaaaagctcaaaacagtagctttttattacgatatgttttataatactgaactataattatgtgataacattaagtcaaagaggggtatatgttctatggagtttcagaatcattcaataaataaagatattcctattcctttgtattatcaggtaaagcagattattttggacgaaataaataacgagggcgtaaaagccggagacgcaatccctacggaaaaaacattctgcgacatatacgggataagcaggacaacaatacgacaggcaataagcgaacttgtcaacgaaggctatctttacagagtaaaaaacaaaggcacatttgtatcccagccgaaagtaaagaccgaccttgtaaatatgtacgacggctataacatggaacttttcaacatgtccatgactccttccacccaagccatagaacttacgctcgttaaggcaaattccgagcaggcacgcgctttggaaattaacgagggcgataatgttatttatctgcttaggcacagatatgccgacggtatggcgatgggttatgtcgaaagctatttcaggtatcctctttgttcatttttacttaaagaggacgaggaagcgtttaactcaacatccgtatatcaaatattggcaaaagataaatctactaaaatcaaaaaaatattgaaaacaatagaggctgtaggcgccagcgaagcggaagccaaactgcttaacataaaaaaaggcagccccgtaaatatgtgtactaatatatgctactctcaggagagcggcgtcccggttatatatgagcttcttaaataccgcggagataaaaataaattttcaatagaaataaatatagactgatactgcgcagtcatggcaaaacgcccctaaagaataaaaaataaaacaattttgtcggcggattctttctttgacctcttttgaccgaaattcgcaaagaaaccgttaagtcctaaataggatagttttattgttcaaatttttcttaagcggcgtttttttatacaattcggaaagggagtgaatatgctgaaaattttaatttctccggctaaaaagatgaatatagactccgacggccttcaaggcgtcagcgttccatatttcatcgagaaagctgaggtcctaagaaatatacttaagtccatgtcatacgaagaactgaaaaagttatggaaatgtaatgataaaatcgcagctcttaattttgaacgtctaaaaaatatggactctaaaaacgcccttactcctgccatactttcatacgacggaatacagtacaaatatattgcccctaatgtatttacatacgatcagcttaattatataaacgaacaccttattattttatccggtctttacggaatgttgcgtccgtttgacggcgttataccgtatcgtctggaaatgcagacaaagctgagcggagaaaattttaaatctctgtacgatttttggggttcgtctgttgcagacgttctgagcaaaaaaacagatacaattataaaccttgcctcaaaagaatactctaaggttgtctccgacaacatcggtaataatataaattttataacatgttcttttgcccaaataataaacggtaaacctgttgaaaaaggtactctctgcaaaatggcgcgcggtgaaatggtaaggtatatggcggaaaacaatataaaagactataaaaacattaaaaacttcaacagaatgaatttttcttattccgacgctctttctgatgaaagtactttcgtttttataaaaagtaattaacgtataaaaaggccgaacataaaaagttcagccttttttcatcttaaaattaactatgaatttgttatctcataaacatgttagttcttctttccgtttccagagtagtagacggaccatgtccggaaagcactttataatcgccttccatatttttaagcatttgaagagattcgttcattttcccccagtcgcctgtagggaaatcggttcttccgcagcttcccataaacagcgtatcccctgccgccattatatttccgcttatataacatacgcttccgcatgtatgtcccggtgtaaatattgttttgaacgtcatattcccaaccgtaaattcttccccgtccgaaagatatttatccgcgctgaaagactgtcccttacctatcatagaagtaaggttgatattggggtcttccagtacctttttttcatctgcgcctgcataaacctgaataccgtattcttttctgagtccttccatagctcctatatgatcgaaatgcgcatgcgtcaaaagtatgcaaacaggcttcagtccgtttgacgatatatactttatatactgctccgctctgccttcggggtctattataacgcagttattttcctcatccgaaaaaatataactgttagtctcacacattccgcttacaaaagttttaatatccttaatcatttaagtcctccttaaccgtattatttaaaataacattttcagcctgtcttactccgtctaccgcagcggaaatgattccgcctgcgtatcccgctccctcgcctgttggatagagtccttttatacctatgcagacaccctgtttgtctctgactatccttaccggtgaagagcttcttgtttcaacacctgtcattaatgcgtcaggcgaatcgaaccctttcagttttcttcccattgccggtattgcctcttttaaagaatcggagataaattcaggcaatacttcgtttaagtctgcaaattttatgctcggtttatagctgtgttttacaataccttcgcaacacgttactctgccctcaacaaaatctccgtatctctggacaggggctgagtaatcctctcctcctgctttgtatgccgcctcttctatttttctttgaaattctattcctgccaaaacgtcgtcagagccgaaatcgtcgggatttacctggacaagtaccgcgctgttggcattttctccgtctctggcgtattcgctcattccgtttaccgcaagccgtcctttttccgaagcagcggaaacaacatatcctccggggcacatgcaaaacgaatatactcccctgccgtcctttgtcgtatatgtaagcatataatcggcaggaggaagtttatcggcaaaaaagccatactgagccgtatttatattttcttgtctgtgttctattcttacgccggcggcaaatggttttctctccattttgacgcctatatcgtttaacatttcaaaggtgtctctggcgctgtgccctatagccagtattacgttatccgtttcgattttgctattaccgtttacctctgcgtacttaaccgctccgcctgaaactcctattttggtgagtttactttcaaagcgtatttctccgcccaagtctgttattttatttcttatgttttttactaccgttttcagcttatccgttcctatatgcggcttcgcctcgtacgccgtttcctctggagctcctgcctctataagttccgaagttacatagtcgcatctgccgtcctttattcttgtcgtcagttttccgtcggaaaatgtgcctgctccgccctctccgaattgtacgttgctttcggggtcaaattctcctccgttccaaaacttttccacatcttcggttcttttatccacatctttcccacgctccaatacgatgggcgaaagtcctttttcagccaacaccagcgccgcaaacatccctgccggtccgaatccgacaactacagggcatttttccgttttccactctccctgcggcacgtatttttcatacgttgatttgcaaacatttttatctctgtttttcctcaacagcttttcttcatcttttaccgatacgtccacagaatacagataatgtatgttatcttttttccttgcgtccagagattttcgtcttattttaagttctttgatattttctttctttattttcagtattcttgcggcttcgt

SEQ ID NO: 3357 - DNA, 3750 bp, Unknown
  16S sequences of unknown bacteria
cttatcatgcaagcatgaacggctttttgaccttttgaccctggcatcatcatagaatagatgaaaaaataagggcaaggaggaacaacaatgaatgttatgaaggcaggatatgagattctgacaccgatttcggagggcggaaaggaagagctgcagatgatcgagcggatcggaagagtctgctacaagtcggaggataagattactgaggatggtgagagtgcaaagaaatttgtgcggatgcttattaatgcgcaccatgaagcgatgatcgagcacagtacactttctgtcatgtttaccgtagaccgcggcgtgtcacatgagatggtgcgtcacagaattgccagctttgcacaggagagtacgcgctatgtcaattattccaaggacaaatatggcagtgaaatcaatgtgatcgatctggcacctggtatcgcgctggaccggagaatgcaggatatgccggcggagacgatcgaggcgatcttaaatgagtgggagctggcgatgctcgacgcagagaagcactacatgaagatgattgagcttggcgcgacggcacagattgcacgttctgtactgccgaattcgacgaagacaaatatcacgatcacggccaattaccgtgagtggagaaattatttccggctccgtaccgcgagcgatgcgcatccgcagatccgggaagtgtcagtggcgctgctgaacgaactgaaggagcggattccggtgatttttgacgatatcgcgtaagaaaggaagtagcagcttgaatatcatagtagcagcagataagaactgggcgatcggggaaaatggaaagcttctcgtgagtattccctcagatatgaaatttttccgtcagatgacggaacacaaggtcgtcgtgctggggcgaaagacgcttgcgacattcccaaacgggcttccgctcgtgaaccgcaaaaatattatcctgacgcggaatccggagatgaaagtgaagggagcgaccatcgtacattcggtggaagaagccttagaagagctggcgggatacgaggatgaagatatttttatcatcggcggcgggcacatttatgaggagtttcttccatattgtaaggtggcgcacgtgacgaagattgaccatgcttatcaggccgacacctttttcccgaatctcgacgagacgggggagtgggagatcacggcagacagtgacgagcagacgtatttcgatctcgagtatgcctttttgaaatatgagcggaagggtgaagcaaagccgcggattcggaagtaaaaaagacagagcgtttataaataacggccgggaggactcagatatcctcccggccggctgctttttcggatttattttttcttcttgctgctctgatatttttcttcacagtactggcagcggtagatctcacgctccttgtcggcaaggaagaatacctgatcgagtccctgctcgatcgaggtgatacagcgcgggtttttgcaggagatgatattcacgagcttcttcggaagattcagctccttctttgcgacgatcgttccgttttggatgatattgaccgtgatgcggtggtcaatgaagccaagcacgttcagatccagctcgtcgatcgggcactcgaccttgataatgtcctttttccccatcttgttgctgtgtgcatttttgatgatcgccacgcagcagtccatcttgtcgagtttcagatatttgtagatcgacatactttttccggcctcgatgtgatcgagcacgacaccttcatttaaacgtccgacatttaacatacctctacctccagtaatgtaagaatcagtgccatacgcacatagacaccgtactgagcctgtttgaaataaactgcgcgcggatcatcgtctacctctgtcgcgatctcgttgacacgcgggagcggatgcagtacgagcatatcgtctttggcaagcgcgagcttcgccttgtccagaatgtagaaatccttcatgcggacatagtcctcttcattgaagaaacgctccttctgtacacgggtcatgtagagcagatccagatccggaagcgcatcctcgagacgtacctcttcccggaagtcctgattgtttgcctttaagacatcgtcgcggatgtaatccggcagtcggagctcctccggcgagatcaggacgaagcggatgcccggatagcggataagtgccttgatcagggagtgtacggtacggccgaacttcaggtcgccgcaaaggccgatcgtgaagtgatccagacggcctttttccgaacggatcgtcatcaggtcagctaaggtctgggtcggatgctggtggccgccgtctccggcattgatgaccgggatcttggaatacatggaggctacatacggagcgccctccttcggatgtcgcatcgcgcagatgtctgcatagctggagatgatacggattgtgtcagctacgctctcacccttggatgccgaactggaatcggccgaagaaaaaccaagtacgctaccacccagattcaacattgctgcttcgaaactgagtcgtgtacgtgtacttggttcataaaataaagtcgctaattttttaccatcacaggcgtgtgcgtattttttcggattggctttgatgtcagccgcaagattcagaatttgctcaagctcttccacggataaatccaatggactcattacatgtctcatagtatcctcctttttgtgtgctgtcacttcgaccggcgaccggtcggattgcattgcacctatcttatactatccgaatgaaaatttcaagaacaaatttaaaaaatttaggatcgcttatctgtgttcgaatactgccaaactggtcagaagttttgccttgtgtgctttacggaaaaggaaaatacgattataataaaaagaagtgaatacacagaggaaagcgaggatattaagctatgacttatacagaaaaaaagcgctggacattttttggactgccctggacctttacgacttatacagtgacggatgaggtcattacaatcaattccggatttttaagacgggtggagaacgactgctatctctataaggtagtcgatgtgcggctggagagcggactgatggagcggctcttcggacttggcacgatccactgcttcagcggcgatgtgaccgatccggacctgcggctgatgcatattaagcatgcgaaggagatcaaaaactatatcctgaagcagtcggaggaggagcgcatccgcagaaagacgttaaatacacagagcctcgacggcaatccgatgatgaacgagatggggcgcgtggacagctgcgaccattaagggccaaaaaggtcgttgacagtgtttctcaaccttggtagaataggcaggatgagataaaatagagacagactgcggtggtataccgtttttaggaggagaaacaacgttgagcaatataagagaagagatagagaagcgccggacctttgcgattatttcacacccggatgcaggtaagacgaccctgacagagaagtttctgctgtacggcggagcgatcaatctggccggctccgtaaagggaaaggcgaccgcacggcatgcggtgtccgactggatggagatcgagaaggagcgtggtatttccgtcacgtcttccgttctgcagtttaattatgacggctactgcatcaatattctggatacaccgggacatcaggatttctcggaggatacctacc

SEQ ID NO: 3358 - DNA, 10476 bp, Unknown
  16S sequences of unknown bacteria
ctacaaagcctgttcctgcattctgtgaaaaatgcggctcaagaatgcattctaaaggacatgatatccgaaaacccgtccactctatgcttcaggatggtttcaaacttgtcctcgtatacaaacagcgccgctggaaatgcaccaatcccgactgtgctttctcatgttatgaaaaaatcagtttccttaaaaagaaccgcagatgcacagaccttgtcgatatgatgattgtagacagttttagagatatccgccttacagcaagccagatcgctcagaaattccatgtttctgatactgctgcaatatacacatttatgcgatatgtggatatgaaaaggcttcctcttacaaaggccatatgtatagatgaagtccacataggctctcaggactgtcgatatgctgtaatcattcaggatttcattaccggggagcccatcgatatgaaacaaagcagaaaggattctgtaatgcagccatacctgctgtcaatacctaaaaaagaacgtcttaaagtggaatttcttgtttctgatatgttcaatgcttacatctcctatgcaggcaaatactttccaaatgcggtttccgtcgtggattcttttcatgtcgttcagatgatcaacagcaaactgaaaacatatatgatatcaaaggaaaaggaattcaaggcaagggataaagaacgtgagcgggtacttcagctggaaaaaggcaatcccggacttcatctgcctatgtcggatgaagtatatctttatggaaggtgcaggtgggtaattctcaagaaccgtgatactcttacctgtcagattccacataaaccggacagacatttccgctatttcatggatatatatgattatgaagaaaagttcagaaaaacagatcctcagcttatgctgatgcgtgacctcaaagaagaatatatacagttcaactcacgcaattccggaaacagagataatgcagaaaaagaacttcctcttctgatagacaaatacctttcttcaggtgtcgatgaatttgctgatattgcacgttcattaaagaaatattatgaaccgatacttaattcattcatcactcttgaacgtaccggctccaaaggtccataccacagcagactttcaaatggtcctatggaaggattgaacaggaagccgaaagacatgaaacgtatttgcagaggatttgacaattttgagcatttaagaaacaggttcctttttgctgaaagaaaaaacgctcctgtacttgcctctccacgcagcatttcccaagtcagagatgactcgtttaccggagcaaaaagaggaagctatacaaaatcgaaaaacactctgtttaaagattctgagccataggcttaaatcaagccaccaccgaaggtggctgtgccattgacggtgaatttaatgaagagttacaatatctgatattctgatgggaagttcccgcatatctgtttacgagttcttcaccatcggcattatgcttcaaaactcttcataaagagctgtcaatggtggcgaacccagttaattattttaaatcttttccggcaaaaagaggtgacaaatcgctgccacctcttgcatttttttaattgtcagcccccgaagtcagacccccaatcaagtttggaatttctgtacataccccgaagtcagacccctaattaagtttggagtttttgctcaaaccccgattaagtttggttacccaagctgctttagtctaatattcaatatcctccggcaccgctatgccaagatgtctgtatgcctgttccgacaccactctgcctttctgggttctgtggagaaaccctgcctgtatcagataaggttcatacacatcctcaattgtaactctctcctcgcctattgaggctgctatagtatcaatgcctacagggccgccgttaaatctggtgattatagtatcgagaagctctctgtcaagagcctcaaggccatattcatcaactccgagtgccgcaagagcctgctgcgttatctccggagtaatgctgccgtcaccttttacctgtgagaaatctctgactctcttgagtatcctgtttgcaactcttggagttcctcttgaacgctttgccatctcctcaagcgaagcctcatcagcatccactccgagtatacctgctgatctgcgtatgatttttttgaggtcatcagtatcatataatgtgaatttgctcagcaccccgaatctgtccctgagaggcgccgaaaggcttcctgctctggtggttgctcctatcagcgtaaactttgcaaggtcaagacgtatggaccttgccgacggacctttgcctataattatatccagcgcatagtcttccattgcagagtaaagcacctcctcaacagaacggttcagtctgtgtatctcatctataaagaggacatcgttctcattaaggtttgtaagtattgccgcaagatcccctgctctgtcaatagcgggccccgatgtgatcttaatctctactcccagctcgtttgcaattatacccgccagagtagtcttgccaagccccggaggaccataaaacagcacatggtcaagaggctcgcctctgagcttagctgcctctataaatattttgagattgtctgtcgctgttttctgacctatataatcctcaagcgtctgcggccttaaacctatttcggatttctcctcgttgaagcccgcagatgtcgctgttattctttcttcgtccatatctatacccttctaaaacagatttttaagtgcttttttgatgtattcctcaacggttgcagcctccgcgccggcaagtgcattgaatgcctccgccctgctgtagccaagagccacaagtccgtttacggcctcagtccttgcgtcatctgatactgctgaaaccgtctgctgctcaggaactgaaacgtcgtctgccgaaaccttgtccttaagctcaagcacgattctctgtgctgtttttttgcctacgccgttggccgtggcaatagccttgtcatcttcaaatgcgatagcctgtctgagctgtgatgaggtcagagccgaaagtaccgccattgcggccttcgcacctactccgcttacagttataaggattctgaaaagctcaagactctctctgtccgcaaagccgtaaaggctcacatcgtcctctctgacaatcatagccgtataacatataacctcgtctccctcactgcgaagataaagcgatgagttacccggaactgatatatcatagcctatgcctccggtctcaactactatccctgtatcaagcttcattgcaagtgtacctttaatataatgtatcatttgataatcttctccattcgttttcgtgatgaggctgtattgccgtgacatatggccgccgccagcgcatccgcagtgtcatcgggctttggaacctgtttaagattaagcataatctttaccatctgctgtatctgcttcttgtctgccctgccgtatcccacaagcccctgtttaatctgaagcggcgtatattcaaatatctcaagtcctgaattggcgcaggcaagtatggcaacgcctctggcttgtcccacaagtatggcggtcttattgttggtgttaaaaaacagttcctctattgaagcctgctggggattgtatttatctataatctccataaggccgttgtaaagcaccttgagtctgtcgggcatatccataccagcctcggtggtgactgcgccgtattcaatggctttgaaatgattgccctcaacatctataattccgtatccgagtatcgcataccccgggtctattcctaatatcctcatagttctcctctaaaacttatgttcgtcattattttatcacacaaacagatgtttgtctattgttatctgcccttaaattgtcacacacattacattttgtactgactgccattaataaatttaggtttaccgctgttctttcatatattattatatactcacaaatcaagaatagcgaggtattaccgatgaaagtactttttgccgcaattatatcagtcatcatcttatttatcataatattttttaaagatgtgcttaaaaacaaagaaaaaatgtcttcagaaaacggctctgcattatactacattattgccgaatttatagtatggtttgcagccaccttcggcatatcagactccgctctgaatacaattgctctaagacacaaggcatatgtacctctggatattctgcccgaaacatttgttgtcggctctacagtccctatttccataataggccttggctatatgaacacatatcccgcaaatcggagtaatcctctacagcagcatcagccttattgcagacagaagaaattagtatgttttaagtaaaaaatgttatttttatttatcatttttacataaaaactcctcatattatgtatttttaatgttttttattcattttgtgcatatttatacttccttattcaataattttgtgatataatgtctttcacagtgactggtcgttagaacagaactgatgaaagacacatgccttttgagtttatcattatggtgtactgtctgtagaaataagacttgggggaaatataactatgcgttatgcaagacaaaataaaatactggagctcatcaaggaaaacgatatcgacacacaggaaatgctggttgcacttctgaaagagagcggctttaatgtcactcaggcaaccatatccagagatatcaaggagcttcatctggtaaaaaatctttctgccagcggcaagtacaaatattctgtggcagcctcaaccgaaagcaatatgtcaaacaggtatctgagcatacttcgtgacatagtcaaaaatgttgatgccgcaggaaacatcattgttgtcaagacgcttcccggctgtgcaaatgcagcagcagagcctatagactgccttgaccttcctcatgtgataggcactattgcaggggacaacactttaatgatggtaatagattcagacgaaaacgtaccggcgcttgtggcaagatttaatgaactgctttcataaggagtaaaaaatgatatcacacatcagcattaaggattttgcaataatcgaagatgtacagattgattttcatgaagggctcaacctgattacaggtgaaaccggagccggcaaatcaataattatcgaagccgtaagccttgctctcggagcaagagccgatacggcttttgttcgctcgggaaaggacaaggctgttgtacagcttgcagcagaccttgacgatgaggaatatgtaataacaagagaggtttcatcttccggcaggaacctctgcaaaataaacggtgaaattgtaacactgggacaggtaagcgctctttgcagccgcatcgcagacattcacggtcagtacgaccaccagtcgctgcttgatacagagcatcatattgaccttgtggatctttattcaaaggatacaatcagccctcttaaagctcaggttgcagaaagctatgcagcctttcgcaaagctgcctcggagctttcttccctgctttcaggctttgccgaaaagcagcgcaaaaaagattttatggcatttgagcttgctgaaatagacgacgccgatttaaagcccggtgaagataccgaacttgaaaacagaatttcacttctccaaaacagcgagaaaatatatacggcgcttgagtccgcctacgatatttcctataattcagagcagagcgcatcttatgctttatctaaagtgcttgcgctcattcaggatatatcacagtactcaccagagctcaagtccctcgatgataggatatccgacatatattacagtcttgaagatgtatgctcggatataaggagtatcagggacaaatcggagttttcaccggaggagcttgatattgccataagcaggcttgatgaaataagcaggctcaagatgaaatacggaaattcaattgaggagataatcgcatacagggataatcttgaaaagagcatatccgaggttgacaatatagatgagctcaaagaaaagctcaccgcagagaaaaagcaggcggaagcagagcttcagaagctttcggcgcagctttcggaggccagaaaaaaagcagccctgtcattgcaggaaaaaatactgtatgagcttaaagatctgaatttcaaggatgccgatatggttattgatttcagacaggcagaccagtattccgcgacaggtaccgatattgtcgagtttatgattacaaccaacagaggcgaggctttaaagccacttgcaaaggttgcctccggcggtgaaatgtcaagaattatgctggcattcaaaaaaatagtcggagattacgaccatatccctactatgatttttgatgagatagatacaggtataagcggtataaccgcaagcatagtcggcaaaaaaatgtgccagattgcgcagagccatcagattatctgtattactcacctgcctcagattgcagcctgcaggggtcacaatttcaaaattgtaaaggagacccgcgacgacgccacatttacaaatgtaattcctttaaactccgaggagaaggccgaagaaattgcaaggcttctcgggggcataaatataacggaaaccacaatacaatccgcaaaagagcttataaaggcttctgaataataacctgattatatatcagagagtttcaaggcaaatcagctctatttgtcttttagactaataacaaggcagccggaacaactgtcaaaagtatgtccggctgcttattcatttaatatattttcaatccgcaatttctacaggtttcttccttgccggaagctgggcgattataactgccgccatcatcagcgcgcagcctataagctctcttccgttcatggtttcattcaggaaaagaaagcccgatacagccccaaacagcgactctgtgctgagtataattgatgctgttgtaggatttgcgtatttctgccccataacctgcaaagtaaacgccacagcagatgacataataccggtataaagcagactcggcgcacagtctacagccgccgcaagagtgctgtcctctgttacaagagaaactataagacttataaagcctgccaccgcaaactgcacacatgtaagcttggccgcatcaaccttaggcgcaaaatggtctactatgagtatgtgagccgcccagccgaacgcccctataaatactattacgtcaccctttgctatagtgaattcagtagtaatacagaggaaatacagccctgcgacacctatcaccgctcctatccagttgtttatatttgtcctgtgctttaaaaacattccgattataggcaccagcagtatgtaaagagctgtaataaatgccgtcttgcccgcatttgtataaacaagacccacctgctggagatttgctgcaaagaaaatcacaactcccgccgcaataccgcctttaaacagcactttcctgccgtttcttttttcttcgatgctccggtgatactctgcgtctgcatttttacttttaattctgtcgcccacaataaatacaggtattaaagccagcgaacctataaacattcgtatggcgctgtacataaacggccctatggtatccatactgtccctctgcgccacaaaggcaaagccccatattactgccgttcccaaaagacatatgttagatttaaatgttttgttcataatttcctcttttccgatataacttgcgtgaacttaactatatattttacttcaaaacctccgcctgcgccatcagtttttttcttgccggaagctgcgcaattataatggctgtcatcatcaggccgcagcctaaaaactctcttccgctcattacttcattcagaaaaacaaagcctgccagcgcgccaaacagcgactctgtgctgagtattatagatgcagtcgtaggctttgcatatttctgtcctacagtctgcaatgtataaccaattcccgatgacataataccggtataaagcaggctcggtattgacgatattacagcctcaatagtattggtttcagttatcagcgcaactgtaaggctcaaaagccccgcaataaaaaactgcacgcttataagcttggccgcatttaccttaggcgcaaaataatcgattataaatatgtgcacagcccagccgagggagcctgccaggagcagtatatcccctgtcgcaactgtaaaatcagattttacacacaggaaaaaaagccctgccgcgccgatgcctgcgccaatccagttattgatattagttcggtgttttaaaaatatgccaagtatcggtaccagcactatatataaggccgtaataaaagctgttttgcccgcatcagttgaaacaagagcaacctgctgcaaattcatagataaaaatatcacaacgcctgcaataataccgcccttcaacagagtgcgccctgcggctttcgtctgctccaacgctttgtctgcctcgctgcttctgcgttttattctgtcacttataataaataccggcacaagagctgccgatcctaaaagcatacggattgcattatacataaacggtcccatcaccgacatactatctctctgcgcaacaagggcaaaaccccatatcaaagccgttccaagaaggcataagtttgatttaaaagttctgttcatattccgtcctcctctgctgtcatttcatattacagattttatcattttaccgtatcaatttgttttgtaatttctttagattttttacaattttattttgatattctacaaataatttgctaatatatacaataaagacagataaaaaaagaaatgaggactattatggctttaacagtaagagatatacccgcactgcccggtcttgaaagtctcaggctgctgtcaggcagcggcggtcttgacagaaaggttgtaaccgcaggtattgcagactatgaatttgctcctgacgtggaatttcgggacagcgccgattttgtaaaggatagcttcgttataaccagcctgctgtttgcttacaataaccccgacattataattgatgcagtaaaatcactgcacgcctgcggagtatccgccattgcctacaaggacgtaatatttgacaaagttcccgatgaggtgctgcagttttcggatgaacacaatctgcccatatattcctttggcaaagagctgtattttgaaaacataatatttgaggtaatggcggcgcttcatacagatgatgacgcttcgcttaacccagacaacatacaggatatgataaactcctatctgtccgctcaggaggttacagcaatctgctacggcatatcactggagctcaagcggtatattaccgtagcctatattaaatatacagatgacgccccgatgaatgcagaccgcatatatatgtcgctttcaagaagcaggagcctcaaggataaaattctcacctgcggctttgacaacggcctcttcataattataacctcatcaaaggatgacatattaagccatgagataatacttaaagaagctctcgaaagcctgccggttgataccggcagactggcggtttctctaagcgatgtgcatattgcatttgagcatctggatctgggctttaaggaaagctactactgccactgcgcctccgaagccgaaaaaaaggatttcagatattacagcgatatcggtatatacaagctgattaccccgcttatcaaaagcccttatgtgcttaaattctccgaggattacctgagaggcatcaaggacagacccgaatattattcaacagtcctttcgtattccagaaaccacggtgatttttcagccgtatcagctgaaatgaactgtcacacaaacaccataaggtacagaatatcaaaggccaaggctctttccggccagcccgacatagccgatactgaattttacagaaatgtttctgttgccatagccatagacaacattaaaaaattctttgtataaacagtacaaagaattttttattgctgtatcagaacttcaccgggtattttctgtaaagtatccagcttatagccgcggtaatcacctctgcggctataaaggcataccatatgccgtccattccgaaaatccctgaaagtatccacataaacggcagcagaagtccaagctgcctaagaacgtttataaggaggctgaagcccactctcttagtcgactgcatcagcgatgccaccatagtcgctatagacgcaaacacatagcttatgcacataatgcgaagcgccggcaccccgaatgacagcattgcaggcgatgcgttgaatatggtaagcacctgtgacggaaacagccacagcactgctatactgacgcctgtaagtataatgcctatgatatt

SEQ ID NO: 3359 - DNA, 12965 bp, Unknown
  16S sequences of unknown bacteria
ccgaatagctgcttcgcagcttatcaggagtggcttggaccactcctgatacaagtaagtccagtctaccttattgcttcaccccattgatacaggggacttacttgattcggttaaaaaatgctgcaaaatcctcgttctttccgaataaatgcgcatactgcagcagcgcatatttctgcagtccctcccagctcgatgcatccagcatttccccggaatccgcatagagcccatccgactgaataaatccgagtgtatcaatgaccggcacctcttctgagagattcagtagaaaattctggtatgcattcaccggcacccctgccacctgcaaaagctctgctgccagatagttggccgacaatttttcgatctgtgtttcttctatattatagttcgcccagataacaaacggcgtcacatatttgttctgatttttctccagttcattttcagtatctgcctgatttgccatgctgtttatgaacgcattattcagccgcggccagtggtcgccaaacatcaggatgaccgtcggctcctcctcctgctcaaaatagtttaccagctgttcaaaggcccgatcggattctctcaacagggaaagatactcttccacatcatcggatgtctgtccaccggtatactgtggtgcatcctcacttcggtagccggaaagatagcccccatgattctggatcgtgacattaaagcagaagaaatgctccgatatcccggaatccttccacgcctcatactggcggcatacctcctcataatctgcctgatcggatggatagccgtgaatctcttccagctcaccgacatccgtatccgtaagaaaagtatcaaatccgagcagtggatacacctgatcccggttccagtttgatccgctcgcaaaatggcaggccagtgtctcataaccatactgtttcagatacgaggctaaggatggcagctcccgtttgacataagcctgatacggcgtgcttccggttggcagaaactgcatcgtgcttcccgtcagaaattcaaactccgtattcgccgtaccgcctccgaataccggtacatataaatttccctttacggtattttcctgtaaagaatcaataaaaggcaacagctgcttcgatgtctgaatcccgcccacacttgcaaagtcggtaaaagactcgttcatgatcgcaatgatattcggcagctgtccggtcgaatcattctgcccggatctttctgtctgctcctgtatcagctccgtcatcagctgctccactgcttccgcagaatatccctccggtttttccaccttttgatagttctcataaatataggtcgccagaaaatatccgtacttctcatacgacgacgtgagattccagaaaaatcctccgtttttcccggtcgacaggatcgactgcgactgaagatacccaaagccccctgcagtgagcaccgcgagcacacaaaaccagacgacacgctgctttccggtatagcgcacaaaacgaatcttatgctcaactgcaaataccgtgagcatcaggaaaaaagcggcacacatcgagatcggcaaatcaaacttgtatgcactgctcacttcccctgccgtcccaatgctgagcaggtctgccggatgcaacgggcttccccggaactccagcacataatactccgccacaccgatcacaaagcaaaggactgtccccgacctcaacagccagccgcctctccaaagaaatacagacagcaccgcaaacaggaagaaacagaaaatgcaattgtaaaacagcctctgcccgatcaatgtcatcaacgtatttccggccgcaatctccagcaaacacaccccgagcacgacatgtacgaccagaaaaagcggcagaagatgcgtcttccataccggaatcagaggatacagtaccgcataaaaaaacaacagcaccgtcatccccgcaaacagccaccacagcggattctgcgtgtaataagactgataaacaaacaggccgtacagcttttgctcctgtgcctgcgcattgaccgtcagcgctcccagctctccttcagaaagacacggcaacgtctgcagctgcggatattcatctgtaataccggaaaaagaaatggtatacacatattttttcccgggctgtacgcggatatgaaaagaaataccctgcgcgccattttccaccagtgcatcgcacggcagctcccgcgtcgccaggatcgcgccatccgcatcctgcaaggtgataagcatactcccggtcgtcccgtgcgcaccgatcgacacatagatcagctccagtattccatcctgtgcatagaattcctgtgaaatcaccgtgttttctccgagctccggtatgctctgcggctccaccgatgtgtcccatccgattgcggtctgcgtttcctcaccgtaaaaatcctgacgccgaagtcccgtaataaacgcacatacgagaagcatcagcatcaggatctttcgaaatccgctccatgactcttttgcccatatttttttcatcgttttgtacctcttgcagatttttctcctgccatcatagcacgcagcaggtaaatctgcaagcggtctttcgcatggtgtttccccagcgcattcctgtcactttgcagctaaatctgccagcagcggcgtagcttttactattccgcgcaagtcaaagcggatattcgcaatccatccctgcagctctgctgacagggcctagcttcgctacttgcaggatttcccgctaggcttctctgatgataccaggcttacaaaaacccggaaatacgccacttttcagtctttatttatccttccttgacagcaagcaaaccgtctccacatgcactgaatttccaaacatatccgtcgggcagcagcgcgtcagctcatagccatgatggcacaggtacttcaggtcgcgggccagagtcgcactgtcgcagctgacgtaaacgatacgcttcggagccatctgtatcatggtcgcaagtacgctttcctcacagcccttgcgtggtgggtctacgacgatgacatcggcggtgatgccttccttttcatatttttccggtaggacttcctctgcctttccgacaaaaaattctgcgttcgtcataccattcagcgcggcattggcttttgcatcctcaatcgcggccggaacaatctcgacaccgtatacctgtttcgcgcgctgagccagaaaaagggagatcgtgccgataccacagtacagatcccataccgtctcttcaccggtcagccccgcatattccagcgccttattgtagagcttctccgtttgaagtggattgacctgataaaaagagagcggtgagattcggaaacggacgtttccgatcgtatcctcaatgtacggctgtccccacagcaattttatttcacgtcccatgatcacattcgtctgctcacggttgatgtttaatgtaatgctcgccatcccccggatcgtgcgcagcctttctaccagcgcgtccgcatgcggcaggctatcagcattcacgatcagacagaccatcaccgctccggtcgcaaagcctttacggatcattacgtggcgtacaaggcctttccctgtcagttcctcgtatgggcggatatgatattccttcatatgctccagcaccagatccagaataacccgattttcctccacaccaagcagacagtcctcacactcgataattgcatgtgtccgtccggcataaaatccggcaatgatacgcccatccttcgacatcccaaccgggaactgcgctttgtttcggtagcggaacggttcctccataccgatgatcggctccatcggcggatgttcaaattttccgatgcggaccagattgttccgcacctttgcctctttaaaacgcagctgtgccggatagctcatcgcctggatctgacagccgccgcactgacgcgccaccggacaccgcgctgcaatgcgatccgggcttggtgtaataagacgggtcagccgtgcatagccgtatgtctttttcagcttcatgatcttcgcctctgccacatccccgatcaccgtatcttttataaaaaatgccatgccatcgtaatgcccgacgcccagaccttcactgcttaaatcttcaatggtcactgtaataagatcgtcttttcgcatgctctctcctattctacagctctgagctctgacgcagatttgactcaaacaggcgattgtagccgagccagtccttggatgtcccggctccctttaaaatctcacgcatcgtctcgagcttcgcatctgtattgtccgcataatttaatgccattgcttctgccagcgccggcttcttcggagaaccgtattccagctcaccgtgatgggctaaaatgcaatgctgcagctcgctcatcagcttcttcgggaaatttttgatatggcggcagccaaatccgacaagctcacaccccatcacgatatgaccgagcagctgtccatcatctgtgtaatcgttttcaggaaagccggatatctccttgagctttccgacatcatgaaacagcgctgccgtaaagagcagatcccgcttcagatacgggtactgttttacataaaaatcgcagagctttacgacgccaagcgtgtgctccagcagtccgcctacaaatccgtgatgtaccgtcttcgccgcagaatggctcttaaatgctgagataaacgcctcattttctacaaagtacatctgaatcagcttctgcagatacggattctctacctggctcatgtagcccatcagctcccgatacatctcatcaatgttcttctcactgaccggaagataatcctgtgcgacatactcggactcgtccgccttgcgcactcgcttgatattcagctgcagcgttccctgaaaattcgtgacatctccggtgataaagacataatccatcacctcaaagtctccgatcccggaagaattcgggtcccatattttggaatcaatcgttcctgtcttgtcctgaagaatcacgttctcataggcttttccgtttttcgcggtcgccgcctgcttatatttgcaaagataaacctcgttgatcttgtctccttcacgaaatgcttcaatatatttcatattctgctttcctctcttctatctgtttcctgaattgaatcccccgccgcaagcagcaggcagttgccaaatatgcccgtcagaaaagctgccagagggcagagcaaaacaggatgacggcccatagaactgtcatcctgcatttctttttggctattctattatagaagataatctgcatcttcgcaatcccaaacgtgagaagattttcatgcctgcgcaaaatcagccaccgaattcagcattactgcaccggaagccatataacgatgccatgcgaatgctgtatctttataacgattcagcaccacggtacgcttcatactcctcccacgtcatctccggctgaaacgcatcgcagatgtgttccaccagccctgcctgctgcagcagatccacggcggtcgccgccagaatctttgcagtctccaggtagacgcgcggctcatccgcgatctgcattgacttgccgtgaatgatacccgtgataccgccgtagccgaactgaatgcacggaataaaagcaccgagatcaccgatatccccggccgccacgcttttttcgtcctttagaatagcttcctccggaacaaaagccagcatattctgatgtgccacctctgagagtgcatggcatgggtgaaatggcagatagcccggtgtatcctccacctcgcaggtgccgccgatcgccattgcacaatgactggccgcatttgtcagccggttggaaagctgctgcatctgctccgtattaaaagaacgcacatatccctcatatacgacccgctccgggatcgaattgaccgtctggccgccttccgtcacgatgccatgaaaacgattcttatcctcgtccacaaaggtctcccggagcatccccgctgcactctggaacagtgcaaatgcattcagagcatttaccccgagatgcgggagtaccgccgcatgtgcgccgcgtccatggaaaatgaatttcttgtaaatgaaacctgccagcgatgaatccactgcaaaatggtactttgattcacccatcgcatgcatatgcaggcacacatccacatccttcagcacaccgtctgcaagcatctgaatctttccggccggatactgaatttcgccctttgcgatcagctcctttcgaaattccatgtccgtgtattcctctgcaggggtaaaaaacaggctgaccatcccgccatcggctaccgctccgctgtcctttaatgccagcagtgccgccactgcaatcgcacactggctgctgtgtccgcagctgtgcgctgcctcctgatctgcatggtttgccatcggatgccccggcgtcggaatcgcatccatctccgcgatcagtgctatatgaggatgtcctgacccgatcgatacctgaaatccggttcgggcatattcctgctgtactgtaaagccttcctttttcagaaattccagcagtagcttctttgtctcaaactccttaaatccaagctccgggtgagcgaacaaggcgcgtcccagctcaaaaatggcatccgcccggctgtcaattgaggaaaagcactgctgcttgatacctgaaattttttctttttccactttaatatccctccccttttccgttccagtcatttttctgtactgcatatctctttacgatttctacctgttcacctgcaatccaatgatgttggagtcaaaaggtattttgccccctatgatacacggattgcttcgcatttcatgctctcgcaatcctaaaacacctcaaatccgctcatttaagatcttcaggttctccataaagtacgcattatacgcttcgacatccacacagtgtccgagcagccgcacatttgcatgctccgcatctgcatcgtccacaattgtcatcccctgtgtatatttgcctgccgtctcgatctgtaccttacatggcttttccacaaaaagctccgggtgcagcatatgcataaccgggacgagatcaaagaccggagactgcggaacgttccgacgacggttgtacaggctgaaaaactgtaaaatatcatgcgccagatcctgtaccttgccctgtcccttcaatgcatcgatcatcgtgtgcggagtcgcgcattccagacaaatctcgatgtcgctcatgacgatcggtacgccggactcaaatacaagcttcgccgcatgcggatcctcataaatgttaaactctgcacgcggaaggatatttcccgagctgcggcttccccccatgagcgtaatacattcgatcttttccttcagctccggccaggtcttcagaaataccgcgatgttcgtcagcggagcaagcgctacgatcgtgatcttttcatgcttcactgccatctcatgcagaaactccactgcatgctgattgatcggctgtactgtcggctccggtaaagtcgggccatccagtccgctctcaccgtgagccgccggctgcggatccggatcgagcacgagcggtgcatcatatccgactgccacctttccatcctttccgagtgctgtcaacacctgacagagattacgtgtaaccttgtccacatagttattcccacatacggtcgtatatcctaaaatttcaagctgttccggatgtgccagtgcattcatgattgccatgatgtcatcatgtcccggatcacagtcgaagatgatttttcttttttccatatctgcattttctccttagtcttactgcttattgccactgcctgttgcgccattgaagcaggggatttgcttattgctttgcgccattgaagcaagggacttgcttgattcggttaaaaaggccgctgcattgctgcagcagcctttctgtaatcttatcttgcacgtctttttctgtattctttaatggaaagtccgatcagaccaatcaatacgcatacatatggaatcgtattgatcaggtcagacggcagggcggtaagggccagcttgctgacgataccctgtgcgatagcaaatactccggtcgtcaaggtgactatgaggaagttgccgccgcctactgcctgtgccgcaataccgatccatccacgggacgcggtcatgttgtttgagaagatggacagatatcccatcgagaggtatgcaccgccgagtgcggcaaagatacccgacatgataaccgcaatcagacggacgcggtctaccttgataccgacggaatctgccgcatgtgcatccagcccacagacctgcatatgaagaccgaacggcgtgcgatatacgaggatcgcaagcaatattgcaagaatgatgcacacataggtcagtaaataatgaccggaaagaatcgtaccgagtaccgggatatccttgataaatggaatatctaccgtcggaagcaccttggacggaaggttcgctgtcgttccctttgatccggtccatacaagcagaagccatacgctgaaatccgtcgcaaacaggttcagcgcgataccgatcatgatcgggtctgccttcatcttcatcgtaaaaaatgcaagtacaagcgcgagtactacaccgactccgatcactccaaggagtccaagccatgcgctgctgaataatgcactgaaatatacgccgaacagcgcaccgaacagcataataccctcaactgcaatgttcgggatgcctgcaagtgccgccacataagcggacatggaacagaacatcagcggtgtacccacacgaattaccagcgccacaaaatccgctgtaaagaatgagctcatatcttctcctcctttaacaattgtctctctctccagcctcttaagaagtactgagaagaaatcagcagcgtcagaattacctcaacgacagataccagcttgatatcaatgaccggtgaactgttcgccagcagctgtgcagacgctctcaagtagctgataccaaatgcggcaactgccacaccgatcggatggtttttaccgagcattgccatcagcgcaccggtaaatccaagtcccggaagctgtgaccaggtgaagctctggtatacgccgagcagctctacggctgaacccatgccgccgatgaagcctgccagaaaatgtacaaccatgaacagcccgaacgcacccattccggagtagcgtgcaaagttctggttcagtccggtaatgcggattgcatagccaatctttgtcttaaacagaagaatgtacacaaacactaccatgatcaataccaggataataccactatgtacctgcgtcttcggaatgatcgttgtcagacgcgcactctgtacgaacggcgcagatgacgtaccggtaacaccggtcgtcgccagatatgtcttgatgatccagaatccgataccaaacaggatattattcatcatcagggagataaccatctcatctgcctggaattttgcctttaagatacccggaagcagtgcgatgacaccgccgcagagtcctgcagcaataatgcagatcgcagagtcgataaatgcatttccggtcagacgcgtctcagagaccgcaaaataggtacatgccacacctgcaaagtagaaaataccctccgtactcaggttgaacaatccggtgcggaaatacagcagtgttgcaagtcctgcaaaggtcagcggcaccattttgacaagtacataaccaaagtagaacagattcttgcacggatacgtcatcagtgcgataaacgtcgtccatgcattgccaaggcgctgtggaagagaatctccctcaattaccacgcataatacaataaacgtaacaaccagcgcaatcaggatcgaaacgataatccgcagtgcctcaaacggcgcctcgtctgtgatccggaagcgctttttctgtttctcagtcgtcatagctagcctccctgatttctttttcactctgatgctccacgccgagcatgtaaagtccgagctgactctcggtcacacccttcagcgacgggaagtatgcaacaatttcaccctcatacataactatcagacggtcggagagcttcagtacctcattcagatccgcgctgacaagcagtacagctgctccgctgttccgcatgtcgatcagctgatgatgaatgtacgccgcacttccgatatcgataccacgggtcggctgctccgcaatcatcagcttcggcttgttgttccactcacgtgcgacaacaaccttctgaatatttcctccggaaagcgcgctcaccttttccttttccgactgcgtcttaatgctaaaacgctcaatcagctcctgagactcttcacggatcacattctgcttcagaaaaattttcccggaatattttggctgctcatagcaggtcgagatcaggttgtcctggatgcttgcagccggagcacttccatcgatcatacgatcctccgggatgtaagacataccggcatcacgcttctgtgcgatattcattccctgaatctcagtaccggccagctttaccgtaccatcctggaacggaatcagtccggtgatcgccttgatcagctgctcctgtccatttccctgtacgcctgccacaccgaggatctcgccgccacggattgaaaagttcaccttatcaaccttcgtcacgccatgctcactgtaatgcagatcctttacatcaaggatcagctccggattctcgaccggatgcttgaactcatcgtaggagtcctccagcttcgaaccgatgatcagctcggtcaggcgatccatcgtaatgtccttcgcatcgtaagtaccctttgtctcaccgagacggataaccgtgatacggtcactgatctgcatgacttcattcagcttatgggagataaatacgatcgtatgtcccgtctcacggaacttctccagctgttcaaacagcgcctcggtctcctgcggagtcagcacggccgtcggctcatcgagaatgatgacctccgcattccggtaaagtgtctttaagatctctaccttctgcttttcactgaccgtcaggctggaaacctttcttgtcacgtcaatgtcaaaattatatttatgcgccagctcctgagtcttgcgcaccgcttccttcttatcaataaagacggatctggtcggctctgcgcccataacgatattctgtgccaccgtaaaggacgggatcagcataaagtgctgatgcaccattccaattccgttgttgatcgcctccatagagccctgataattgatctcttcgcccttgtaataaatcttaccggacgtctgcttttcaatcgcaaaaataattttcatcagagtcgactttcccgcaccattctcaccgacgatggaatgaatctcaccttttcgcagttcgatattgatattgcggttcgccactgtgccgttcggataaatcttggtaatatcctccagctttaaaatggtatcactcatgtcattccctcacatatcatgaaagtttacaaagaatgctccatcttttggaaagacagagcattctactttgcttatgaccgtatcaatcgtaatgaccggttttatttagcagtcatctcaaggtaagtatcatatgctgtagcgtcggtcagctggtcaactacctttgtctcaccgctctttaccttatcagcaagctcttttacctttgcaagctcttcctcagtcatgttctccttgtagtaatcattctctgcaaggccaactccgccgtctgcataggtaaggatctcctgctgaccatacggtgcagtaccatcaagcatcttcccgatactgtttttgattgcgacatcacagttcttaacagaagaggtcaggattgtctttgcaagatccggctgctcggagagagacgcatactggtctgtatcaacaccgattgcccatacgccatctgctgccgcaactgcctcgaacataccgtttccggcaccgcctgctgcatgatacagcacgtcagcaccctcgttgatcatgttcgttgccagctcttttgcaacaccggtatcctggaagtttccaacgaaacctgtaatgcacttgatatccggatttgcatcatgtgcgccctgcataaagcctgcaaggaactgtctgataccatcgttatccattccgccgatcgcacctacgatgccgctctgagacttcacacctgctacaatacctgcaagataaccaacctcgttggatgcatatgtaactgcatatacattgtccttcttgtttgcctctacgtcagagtagtcaaagttcagaaacttgatatccgggtagtcagctgctacagtaagcatagcactttcatactggaagttaccggagatgatgatgtcatatccctctgcagctgcctgacggtttgctgcctcccagccagctgcatcggttcccatctcgatgagctgtgtctgaactgcatcgccgtactcttcattaaccagatccagccctcgtgcggtaacatcaaaataagactggtctccgatgtacgggagcaacaaagcgattctggtcggatcttcctcagcgaaagcagatgcgccaagtgccagagtcatgcctgctgccataagaaatgcaattgcttttttcattgtgttcttcctcctaaaattgtaaaggtttgttaacgttttctaaacttcattaaagcataattcagaagcaaagtcaatgcgatatttatccggtaaaacgaaatatgtcgatttaccttttctccgtcgggtaaagcggacattcgcaatccatccctgcagctctgctggcagggcctagcttcgctacttgctcatgaacgcagtcgcttcgcgatctgtcagt

SEQ ID NO: 3360 - DNA, 3447 bp, Unknown
  16S sequences of unknown bacteria
cagcgtggaagccggataagagctttagccataatcctgtcggaaagcggttcggacagaccgatgccccgccggaagcaaagccggaaaaggcggtagaaaatgagccgaagcagtaattttttagtatccgccctgcagaacatgcaggcattaagaaagatattgcaggcgtttttaaggggcggctggaaagcggcggcgcttgaagcggtaaagcgatattggccgtatattttaagcgcggcggtagggctgattttattgccgacaataataatggcgtcactgccgtcggttatgcagagcaaagcgccggagcaggcgacagatgaggatattacggatgtgtatatatcccgaatggatgaaatactttgcgtttcggaggtagggtctgctaatgagataagggttgtcggtcagccgcttacatacaacgagctgtatgcagtatgccttgtgctgaccggcaacaatacagaaatgattacaagagattttctgcttgggtgcgtaaacgattcgcttacctgcagaatagagcgggagggaaataatacaggaataacaaccgccgttattcgttatctgaatttggaggagctggcacagcttaaaggaatttcggacgcggatattgagtggatagggcttgtaattaaagacttagaagacaataaaaaatcctcaccgagtggtgaggaatgaggtcaaatgggtttactttcaacatagcaatattccgggcttatatctaccttgttggtccagacattttcgctgtcaatatgggggttgatatcccagcataaggcgtttgcgtcatctatatatacgcgcctgaaattgcttatgtcattgaagctttcaaaaacgccgccttgctttagtgttggcttcatatccagcctgcggcgttcgccgttatcaaattcaagcgtgaccgaaaaatcatcgtttgccgtagcctttataatgctctttctgccgtttgcaaaatactccgcatacggcagagcaaagcctttttcaaggtaatattctactgtacgcatagcttaaatctccttttaattatcttaacggatctatcgggaaggtttcctgcttgttcatagcaagctcccagttttccattagctctgtttggtgaaacgcaccccagcccaaaagcatttgaagctgctttttcggcattgtgcctgcgagcacttccatatcgttaatggaaacaagcacctcatcactgccgtatttcgcgtgaaaatgcggcggcatatggtcgttgtaattgatataaatttttatgccgcggaacattgaaatagtgggcatttgtatcagctccgtttttgtttattttctcgctctttgcgaatttctttaaccatttcgacaatatcatcgtcgtttgtgattccgaggtctaatgaggtcaaatatctatatcttcgtcattatcgttttcaggggcagcctttgaaatttcggcttcgcaaaacgcttttaattgcggaatattttcggtggcggtgctccaaataacagacaaattcatctgaccgtaattgtgcgcgaaaagatttcgcatagcctttatagcgggccatggcatatggctctttgtgctttgcctgtattcttcggaaagatgaccggtaagctcgcctatctgaagtatattcatactgaccgaatctctgaaagcaaggtcggctttaaaaacctctatgtcgtttccgaaacgggaaataagctcggctatattgctgcagtatttaagaatatgacgaagaatgtctatatccgcattaggacagtttctcataaatcagcttttcatcctttcgcatattccgtattaaattccgcgtcataatatcgcttttattctggcgcagcgtatcggtggtaacaaggtcgagggatttttttaacgcttcttcaaggtcggcataaaatccgccgagagcaaacaggttaccgagctgtccgccatctacgcgcagatctatgtcgcttttttcatctgcgtcgccgcgggcatacgagccgaataaataaagctttgaaacatcatattttgccgctatgggggcaacaatatccgctatttgctctaccgtataaaccgggttgctcataatacataccacctttcattttcagtatatcacaaaccgaaaaaatcttcaagtataagtataggaggaagcttaatggaagaaataaccgtagtaatacccgtgaattttaccgacgccgggcggctgttcgggctttttgaaatacgcaacgctgtagaggcagtatttatatgcgtgcctttggcagcgcttctaatgcgcatattgccgttcggtcttttatggcggataggaattgtaagcgccgtcaccgttattgcaggcgggtttgcgcttataggcatcggggatatgagccttttggaatttttaaagcagtatatccgctttaaacggcaggcgaaaattttaacatataagggggtgtaagaaatgaaccttaaaaatattctgttcgggaacgtagataaaaatacagaggacggcacggaaaggttagtgcctgtaaaggaaatatacggcggagcaattgcgcttaaaaacggtaaattcgtgaccgtgttagaggtgctgccgctgaatttctacttaaaatccgagcttgagcagaagaacattatatccggctttgcggcgtttcttaaaacagcgtcggaggaattgcagattattgtagaaacaagaccggcggatatatccgcgttttgcgaaaggcttcaaagctattataattcagagaaaaacgcaaattgccgccgtatgatattcgaggacgcgcagctggtaaactttattgccgaaaccgaaggcttatcccgccgcttttatatcgtcttacactacacgggtcaatcctccggaatttcagaggttgccgccgagataagcgaaaccgcattaaccgcaaaacaatatcttgaagcctgcggacttgaaaccgtaaggcatagtgatgaagacgaatttttaataaaccttttaagaaattatttcagaccgttttcggcatcatcggaaattgcaagtacagatttgccggaagccttaacaccggacagcgccgaccttaccggcagcggatatatctgtattgagggggaatatcgctcgtacctgtatatttcgggcggaggttatcccactactgcggggcttgcctggggcgcgccgtttgttgaggcgggagacggaataaatatctcatttgttcttaaaaaggaaagccgtgacaaaatattacccaagataggcagcacggcaatgttcaaccgttcgcgccttaaagatgtgggcgatacaaggcaggattttgaacagcttgacgacgcggtggaatcggggctgtatatgaagtcgc

SEQ ID NO: 3361 - DNA, 1911 bp, Unknown
  16S sequences of unknown bacteria
ataccagcgccgcagacggatcagcatgttctccctgcgcgcgcaacgtgttccattcctcttccatcgaagtacccggcgcaccgcgcagcgctgcaatcccctgagccatcgcactgtgcagcgcagcacagttctctgcacgccgccttgtttcggcccgcagctgttcctgcagggtctgatagcggccggtgccaaacagatcgcggaaaatcttgcttcgctcctcggtttttgcatgcaaaagcttcaaaaaggctccctgggcaatcatggccacctgggaaaactgactgcggtccagcccggtcagcgccacaatagcccgcgttacctcccgagctttggtcactggtgcccggccgtcgggaaagataagcgtagcgtcagcgcgttcaagcaccataccctcgccccgcaccttgggccgctcatactccggattgcgccggacagtatactgttttccgcggtacaggaattccagttccacataagtgggcgtaccgggggcggcatatttgctgcgcagcatatcggcttcccgcgccgcgccgctggcctcaccgtacagagcaaaagtgatggcgtcaaacagggttgttttaccggcgccggtatcgccggtgatgagatataaaccgctgctgcccaaacgggacaaattgatcaccgtttcccctgcatagggtccgaacgcagacagagttaatttcgtcggtctcatgcttcctcctcccacacgcgcgtcatcagctcctgtaaaaaggcgctctgctcatcgctcagcggcgcattgttctgctgttcgtacaaggctccgaacaactccagcggcgaacgcgaactcccttcctctcccagttccaccgtctgacactcccgagtgcggcggttatcgtagcgcagccgcaggagattgggataaattgtgcgcagtttcgccatggcgtcgggtacatcttcctcatcggtcagcgtcgccagaagataatcttccactgcagtgccttcataggtttcccggcgggccagatccagataatttccccgcacttcccgcaggccatgcaggggggtcagcggaatggcagtccgttccacgcagcctttttcgcccagcgttactatggtgaccgatttctcctgccccgcttcagaaaaggaataccccagaggcgttccgcagtagcgggcgttgacgcccacgttctgcgccgtgtgaatatggcccagagccacatagtcaaacgcctcgtataccgccgcgtccacattgtccaggccgcccacactgatctcttcggattcacagcgcactgcgccggtgacaaactggtgcgacagaagcacgttgcgcgcagagggatccagcgggacgtgagaaagcacacactgcagggcatctgaataggtttccacgctctcctccggccagacgcggcgcaccacagcaggcttcagaaacggcagcagccatagatgcaccggcccaaagccgtcctgcagcgtcacgcagcgcactgctccatcgtacaccggtgcaaagtacacgcctcggccgtccatgagctttgcgccaaaggaaagccgctcggcagaatcatggttgccggcaataagacatacgctgcagccttgtccggccagcacagtcaaaaactgatccagcagcgccacagcctctgccggcggcactcccttgtcgtacacatctccggcaatcagcacggcatccactgcctcacgtgctgcgatggcagcaatttgattgaggatgtaggcctgatcttccaagagtgaaacgtcacacaggcgctttcccaaatgcagatcggacaaatgcagcaatttcactgccctctcctccctttcgttgtcatgcacctcattatagcggattttttg

SEQ ID NO: 3362 - DNA, 2467 bp, Unknown
  16S sequences of unknown bacteria
tcttcacatagcgcataatcccttttgtcgaatggcgtctccttctcccggtcggccttccaaacggaaaaatgtctttccagaacaggacgacaaccgcaagaattgcaccgagctggatgacgacttcaaacatactgtaaaattcatccgagacgtcaagcttcacaaactcattcagcaggatcatatggccggtgctgctgatcggcagccactcggtaataccctctacaataccaaacagaaatgcctttaaaaattcaatcatggaaaactcctttccttactgctgcttcacgggaagcgtaacatgccctttctcatacagcttctgaagtgacataagaatccccagctttgcgtgtggccaagtcagtccgccctgaaaatataccgcatacggcggcttcaggggaccgtccgcactcagctcgatcgaagatccctggataaacgcaccggctgccataatgacatcgctgtcatagcccggcatcgcccacggctccggggtcacatagctgtcaaccggagcagcagcctgaataccttcacagaaagaggtaagcccttctgggaatccaaactctaccgcctggatgatgtcatggcgggactcgcttccattcggaaccaccttaaatccgagtcgttcatataaatttgctgcaaaaatcgccccctttaacgcggccgccgtcacggtcggagcaaggaaaaatccctgatagaaggaacgcatcacaccaagagatgcacctacctcctttccaagccccggacaggtcagacggtatgcagcccgctctacacactccttcgtacctgcgatatagccgccgatcggagccagcccgccgcccggatttttaatcagggatccgacgatcatatccgcatcaaagtcgctcggctcaaggcgttcgacaaactccccatagcaattgtctaccattacaatgacatccggccgccgctctttgataaaagcgatcgcctcgccgatctgtgcaactgacagggtcggacgggtctgataacccttagagcgctgaatctcaatcagacgggtctgcggacgcagtgccttctcaatgccttcatagtcaaagcttccgtcttccagaagatctacctgggcataagtcacgccatattctgcaagacttccgcaggatggacggatgccaatgacttcctctaaggtatcatacggcctgccggaaatagacagcagctcatcgcccggacgcaggttgcctgccagcgcaattgccagtgcatgcgtaccgcacgtgatctgcggacgtacaagcgctgcctccgtatgaaatgccgctgcatagacctcttcgagcgtatctcttccgatatcgtcatacccataaccgctcgacgcattaaagcattctgcactgacatgtgccttctgcatcgccgctatgaccttgagctgattgtactccgccgtctcatcaattgcggcaaatcgttccttcagcgcttcgaggatgccttctccatattcgtatacctctttgctgattccaagtgattcatataactgtttcatatcttttctcctgtgtttccatattatctgcttattgttttgcgcaattgaagaaggagacttgcttgattcggttaaatcccgcgctttgcaagctccggaagcatatacgccagcagctgttccggttcatagcctatctcctgcttattgacccagatcacatcgcgttcccgcctgaaccacgtaagctggcgcttggcaaaatgtctggtatcccgcttcaaaacacggacagcttcctcataagagcagcgcccatccagataatccagaatttccttatagccaagcccctgcattgacaccatgtctctcgtacagccctgtgcctgcaaacgccgtacctcttccacaagtccgtgctcaagcatcagatcgacgcgacagtcaatattcgcataaatccgatcccttgcatcattgagcacgaaatatgcaaactgataaggcgatgccttccggcgttcttcttcattgtgctcagaaattcgctccccggtctcccggtaaaactccagcgcccggatgacccgtttgacattgttcgcatgaattgcctccgctgatgccggatccactgaagcaagcatcgtatgtaaatactctgccccgtgttcctttgccagtgtctccagttcctcgcggtagctgtgatcacttccgttttctgtaaaatcaatatcatacagaactgactgaatataaaatccggtaccgccgaccagaatcggtatatgtccgcgctcctggatctcccggatatagcgcttcgcatactcctggaagcgcacgacatgaaattcctccgccggatcaaattcatcgatcagaaaatgcggaataccctgcatttcttccgctgtcacctttgcggaaccaatatccatt

SEQ ID NO: 3363 - DNA, 3580 bp, Unknown
  16S sequences of unknown bacteria
cgaataccagcgcattttttctgccgcggaacgcggcggcgtccgccgcaaacagacgggtctccagcgcggccttttccgctctgagcgccgcgttttcatccgccaggcgctgcacggcagccgctgtttcattgatcttcgcgctcagcagaccggagactgcctcggcgttctgaaacttgatacagtgatcctcatacgcccgcataccgcacagcatggtaacgcgggttccgcccttatagctttgagaggacgtcagcttgatgctgcccacctggccgcagcgttccacatgcgtgccgcagcaggcacagacatccacattcgctaccgtcacgattcgtatcgcgcccgtcagctcctttttgctgcggtagttcagctgcgccagctccgaaggcgcgggccaagctatcgtcacgggcgcgttctgccatatcacccagttggcagcgcgttccacatcggccaactccgcatcggtgagcggaccggaaaaatccaccgttacatcctgcgcgccgatatgaaagcccacattgtcgtagccgaactgagcgtgtacgatgccgctgacgatatgctcgcccgtgtgctgctgcatgtgatccagcctgcggcggccgtccacatcaccttggaccatttctcccacacgcagcggtgctgtgaccgtatgcaccactacaccgtccttttcgtgcacatccagaacgcgcgcaccgcccaaggctccccggtccgccggctggcctccaccctcggggtaaaatgccgtggcgtccagcgttacggcaaaattgccgtccgtgggcacgcagctcagcacagtagcgcagaactgtaaacaggcgccgttttcgtaatagagctttctcgtctctgccatgccgttttctttcctttcaatgaacaggccgatttttgatatcggggatattgtaacataaaaattcagcaaaagcactaaaaaaagctccaacttttcgttgtccgaaaccccggaaattgtactataatgcatataaccgggccgccggaggcaaagctctgaaacagagcctttccgcggccttcggtgagcaaccgcccggcgcttgccgggcagcaagggaggaaaccatgcgcaaaagcggcatcctgatgccggtggcgagcctgccggggccttacggcatcggctcgttgggcaaaccggcattcgtgttcattgattttctgaaaaaggcggggcagaaagtgtggcaaatgctccccctttcacctacgggctttggggacagcccctatcaaagctgttcggcctttgccggcaacccctattttatcgatctcgatatcctgcgcaaaaaaggtcttttgaaaaaaggcgagtacggggcaaaggaatgctgcaccaacgagggcgcagtggattacgcggctctgtaccacagccggtacggtattctgcgcaaggctttcgcccgtttttccacttggtacccggacgactactaccgcttctgctacgagcagggctggtggctggaggattatgcgctgtatatgacagccaagggcctgtatgaagggaaaagctatctggagtggcccgagcccgtgcgttcccacacgccggaggccatccggcagctgtatgccgagcatgaggcggaagttcatttctggaaattctgccagtacgagttcagcctccagtggaccgccctcaaggcctatgcaggggaaaacggtatcgagatcatgggggatatccccatctatgtggcggcggacagcgcggacgtatgggccgcgccggagctgtttctgctggatgcctgcggcgccccaaaagaggttgccggctgcccgccggacgcattttcggacgcaggccagctttggggcaacccgctgtacgactgggcccaccacgaaaaaaccggctttgcctggtgggtgcggcgcatccgctatgccctgaatttttacgatattctgcgcatcgaccatttccgcggcttcgacacctattatgccatcccctacggcgcgaagaccgcccaaacgggcgagtggcgcagcggcccgggcatgaagctgtttcgcgccgtgaagcaggcgctgggggatgtgcccatcgtggccgaggacttgggcgagctgtttcccagcgtatatgagctgttggcggagagcgggttcccgggcatgaaggtactgcaatttgctttcggccccggagacagcgagtatctgccccataaccatcccgtacactgcgtggtgtatacgggcacacacgacaacaccacggctgccgcctggtacaggaccgccgccccggcccagcggaagaaagccgccgcttacctggggctgaaccgggaggagggctttgccgccgggctggtgcgcggtgcgctggccagccccggagagctgtgcattatccctctggcggattatcttgccctgggggccgaagcgcgcatcaacacgccgtccacgctgggcggctcgaactgggtgtggcgcgcgctgcccggccagctctgcgccgccaacgccaaaaagatcgcggcgctggccgtactgtacggccgcgcctgacattaaagcacagcaaaaaaaacagggccgctgacatgggcggcatcccgtaaagaagttaagggcaaggcagaccacaatggtttgccttgccctttcatactgcgtagcccactatgatgctttcggggaaagtgcccgtggaaaaaacggtaaccggacgcttcatttgccgattgcaatttctacatattggcttccgacaacagttggcctatgatttcttgtttgcttgcggtatagcgcttccggtcgtctgcaaaccgcactgctgatttccgcttgaactcgtcgtacatcatcgctttttcagggtttgcgttcagatagtcccggaaactgatataattactccaccctgttccgttccttttcacgatatggatatggtgtgttcgtatatcgccatcttccattacaaaaaatacttctcctgcaacagctccttcatggaaaaaaatattatgctgtttcaggacttcaatataaggcaatatatcctttatgtcgtggacagcaacggcaatatcaataatcggctttgcgtgaattgagcaaatggccgtacttcccacatgctgaatatcaagtgcagtatctcccaagagttgctttaatacgctgattacattttcagcattttcatgccattcctcttgatgctgcaccaactttaccgttccgctttttaaccctatcataacaatgctgtcctctcgagaacccgagtcgttggtcaatttattataaaacaacacccgccgaaaaacaactttgtcagcgggtgtcagcttccttatgatagaccgcccaaagcgcggccctgttttttcatcgtgtttcccgcactgctctcagcagcctttctcgtaacgcatgtatgcgacatcccagcccatggagtactcgtatgcagcacacgcttttacaagatagttcagaaaattctttttcataacagtaccctcctttaaag

SEQ ID NO: 3364 - DNA, 6085 bp, Unknown
  16S sequences of unknown bacteria
ctgaggatctgcagcccctccgcgcaggcgcgcaggagctgctgccagcgccgcagtgggaatttctccgccgcgattccaccgggggagaaatccaccgccaccggcgcggcccggaccggcgcggcggctgtaggcaccggggccgtactatgcggggccagcgcctcgatctggcagacataaaagccgctcctgggtcgggcagcaatatagccttcggattccagctgccggtaggccccgtcgacagtattgacgctgatattcagctgctgggccatggcccgctttgccggaagcttctgccccgcctggatttcgccccgggcgatctgcccccgcagctgccggtagagctgctgatacagcgacagcccgcccggctcccgggaaagtacgatcatgcttcttcctcccatcgcgccagcacagcggcgcacaataacacagcagccccggcgcgctgcagcgggccggagctgtataatctcttatgcctggctatcgccgcggcggacctccagcagcttctgcttgagctcgccttcgatcttgcgcagctccgcctgggcggccgcccgcttctgggcgccctcggtctggatctgcaggacctcgtccagcgtctcgatcaggctctggttcgtgtgctgcagcgtctccagatcgaccacggcccgctcggactccttggccgtctccacgctggccgttttgagcatgtccgcgttctttttcagcagggtgttcgtcatatccgtgacctgccgctgggcctccatcgccttttgcgcgtggctcaagcccagcgccaggaccatctggctcttccacagcggaatggtgttgaccagggaggtctggatcttttccgacatcagcgtatcgttattctggatcatccggatctgcggcgccatctgcaggcagatgacccgggtcagctccagatcatgcagcttcttctcaaagcgctggcactgattggcaaagtcgttggcccgctgcgcgtcctccgccaggccggactgctgcgccgcggcctgcagggcgggcaaggtctcgttctgctccttggcaaggcgctgccgcccggccaggatatacatcgtcagctgcttgtagtactcgaggttcttttcatacatctggtccagcagggccgtgtccttcatgagctggatctgatggctctggagctggcggctgatcttatccacatttgcctcggccttatcgtacttggccttcataagctgggtgccgcggctggcctttttgaacaggcccagcagccccttgcgctcctgctctgcatcgaagcccttgagctccacgaccagctcgctgaccatatccccgacctcgcccatgtcctttgtccggacattttccagggcattggcggagaaatccgcgatatttttctgcgccgccgcgccgtactgcagcaccaaattggtatcggtgatgtcgatcttctccgcgaaggccgctaccgccgcctgctcctccgggctcagctgcgccagctccggcccggcctccgggcgcgtatccggctggtcgttcaagggggcagtctgcagctctgccaccggtttttccgtcagttccggtgtctgtgtaagttccggagtcaaggtcaactgcgggattttttcttccatggtagcattctccttccggtcacctgccaagcgtggcggcaattattccgtttctagtataaagctccgggcatcggaagtcaagattttcgcgaaaacaggcggttgacagcctccggctctgtcgaatataatagccttgctgcgcattttgcgtgcaaatgcgaaaaggggcgctcttcaagaaagcgccccatcgaaacaaagcggaacggcctgcgccggagtggtctgagccagtgtgccgccctgggccttgcttctctaccgttctatgacaggcagcgacgatttgtgacagctgcggcagttctattgtttcagaattcggaggtattatgtatgattaagctcgctccctcgattctctctgcagattttgtcaatctgcagcgggatattgacgccctggcaaaggccggtgcggactatgtccacgtggacgtgatggacggcgcatttgtcccgaatatcaccattggtatgcccgtcgtcgctgcgatccggcgcatcaccgatctgccgctggacgttcatctgatgatcgatcgaccggtccgctatgtagaggaattctgcaaggccggggcggacatcgtcacaatccacgtcgaagccgatgccctggagcacaacctgcaggcactgcagatcatccggcaggcaggcgtccgcgccgctatcagcgtaaagccgaagaccccggcggaggctgtcgcgccgtatctggagctggtcgatctcatcctggtcatgaccgtggagcccggctttggcggccagaaattcatggcggacatgatgccaaagctcgcagcgatccgggaaatgatcaaccgccagaaccctacctgtgagttggaggtcgacggcggtgtcaatcttgaaaccgccaaaacttgcgtccgcaatggtgccaatgtcctggtggcaggctcggcctatttcaaagcgcaagatcaaatcgcctttgcagacgccattcaccacacggtttaagcgcgctgcttttcatagaaaaacggaaccaaccagccctggtcggttccgttttttcgtatcgttcagcgcaggaagcccagcgaacggatgatggcaggctccttagccttgccgctgcagatctggaagaagctgatgatccgcagcaccagcagaatgatcatacacacgccgccggcaatggggataataaatgtccagaacagcacggcggagatcagcaccagcaaaatacccacgacctcgatcttcagcgcctggcgcagatggaacgccacgtaacgtgactccttgctggccagcagcgcaatgataatgccgatccagcctgtgagatacatcagcatggcaaagaccttgttatcggaaatatcctgggtggaaaattccttcgtgtggtcatatgggtcgacatacggcgcggcctgcgccggattctgctggggcggctggtatgcagcctggggcgctgcccccggcgccggattgccctccgactggggcgctgcctgcgcttccgggccttgcccatcccgcagcggcgtgccgcactgggtgcagaatgccgcctcgtcatttaactgtgcgttacacacagggcagtttttcatattcgatgcctcctattgctctgttttctccagtataatgctatcttacgccagaatcaatagaaattttcttaataattcccctgccgctccgggccgaggagcgcgacgctgagatcattgacattcgtccccgtcgggccggtcttaatcaggccgccgcaggccgccagcgcgtggtatgcgtcgttccgggccagcacatcgggaattgagatcccttgccgcgccagagctgcttgggtctggccgtccacatagccaccggcggcgtccgtcgggccgtctgttccgtctgagccgaaggaaaaaatggcaagcgcccgctgccccgcgatctgcgccgccgcggacagggcaagctcctggttgcgcccacccaggcccggccccatcacatgcacgacggtctcgccgcctgccagcagcgcccgggggccggatcttaccagggcctcccgcgccagccagcgcccggcatcccgggcctcgctctgcaggcagtctgtcaaaatttccacgtcgtagcccaagcgcctgcacgtccgtgccgcggcatccaccagttggcggacgctgccggtgacgatgctttgggcgtttggcagcgcgcttggcgtcgggcggcgcaggcaggcaagcgcctggggtgagagccgcagggcgtatctgcttacgatttccagcgcttcttccgccgtcgagcggtccgggcaggccgggcccgaggcgatcatatccagccggtcacccaggacgtcggacaggacgacggaccagacctgtgccggggcgcagtgcagcgcaaaccgcccgcccttgaccgcagacaggcgttttcggatggtattgacctgggcgatcgccgcgccgcaggccagcagctgctgcgtcacatccgtcagctcctggggtggcaggagcggctgctcaaacagcgccgagccgccgccggagagcaggaacagcacctgatcggctggggtcaaatttgccgtcagcgccaacgcctgggccgtggcggcatacgtcgccgcgtcggggaccgggtgccccgcctccagcacctgcagcggcgcaggcaacggcaccccgtggccgtgctttgtgataacgatgcccgcgtgcacatgcccgtccaaggcctgcagcgcagcagatgccatcgggcaggccgccttgcccaccgcgactaaaatacgccgtccatggcacggcggcagctgcgccagcgcccgggtgaccgccgcctccggctgcaccgctgcgatggcctcgcgcaggatcgtctgcgcatccgcatagagattcatgcagtttcctcctgcgccgtcagcacgccgccgcccaggaccagatcaccgtcgtaaaataccgccgcctggcccggcgtgatggcccgctggggcgtgtcaaataccagcttcgcccagccaccggccagcggcgtgacgacggcgtcctgctccggctggcggtagcggatctttacccggcagcgcaccggctccgccggggtctggcccgagatccaattgacatcctccacaaacgccgcgcgccgataaagggccgcgctgtcagacagcacgacggtattgtccgccgggcagatcgcgcagacatagcgcttgaccggcaggtccagccccaggccccggtgctgaccgatggtatagcggatcatgccccggtgccgccccagcacatgccccgccgggtcgacaaaatcgccgcagggcgcggctttgcccgtcaagcgttcaatggcggcggcgtaatcgccgtcggggacaaagcagatatcctgactgtccggcttttgggcgttttgcatgccgccctccgccgccagcgcccgggtctcgtgcttttccatctcccccaggggaaacagcgtctttgcaagctgcgcctgggtcatggtgtagaggacatagctctggtcctttcgctcgtcccgcgctttgcggagctggtagcggccgttttcctgcgtaatgcgggcgtaatggccagtggcaatggcgtcgcagcccaattcctccgcccggtggaagagcttttcaaatttcagatagcgattgcagtcgatacaggggttcggcgttttgccctggcggtagctggcaatgaatttgtccatgaccttttcccgaaattcaacggagaaattgaacgtataatgccgcatccccagctgccaggcggcgctgcgggcatcctgcacatcgtcgagactgcagcaggtgtggcctcggctcaggccgatgtcttcattttgatagagcttcatcgtgcagccgatgcaggtatgccccgcgtcggtcagcagctttgccgccacgctggaatccacgccgccgctcatggccactaaaatcttcatgctgccgcctcccactgtaatttgcaactaatttagtatgttattcgcattataaaccggcggctgcccgttgtcaacggcaaccgccggtgtttactgtttttgcagatagtccttcaggaataaaactgccttttcatatcccgcaaagccgcagcccgcgtaggtctggacacaggccatcccggcataagacacctgccggaacgcctcccgggcgctgacatcggaaagatgcacctccaccgccgggatgtgcaccgccttgagggcatccaggatcgccacactcgtatgggtataggctgcggggttgatgacgataccgtcatacacgccataagccgcctggatctcgtccaccagggccccctcgtggttggactggaagaaggagacggacgcgccca

SEQ ID NO: 3365 - DNA, 6248 bp, Unknown
  16S sequences of unknown bacteria
gcctggaccgctggaatctcgaggattatgatgaattcgtcttctgcggctacggtgaaccgacggaacgcctcgacgatctgctgcaggtagcggcgtacgtgagagaacattcggatatcaaaattcgcatcaataccaacggactgtcggatctcatctgggcggaacctacggcgcataagctgaagggacggatcgataccgtttccgtcagtctgaataccgacgatcctgaagaatatctgaaaatcgtccgcccgaagttcggcgagaaatcttatgaagcgatgaaaaaattcacttcggactgtacgaaatatgtacccaatgtggtgatgaccgtcgtagatcaggtgacgagtcctgagcagcaggaacgttgcagggatatctgcagagacttgggcgcggttctccgggtgagaccttacgaagaggcatagaaaaaatatacgaaatttttataattgttttgattaaattcgctttttaagggtatttctatattattctaaataaatttttgtttgttaccgacatctttcgaacttatcaagaatataaatttcttttcagctgccccgcggacgggccgtatgtatgatacggcctgtcagagccgcgggaggcggcaatatcgttttttgctgtatccgcggatcttcgttatctgttgagatctccggaaaacagaattatttttatacggaaagccgataaaagtcacagacagtatttcaaatcagtgcgctccgcgttttcaggggtgagctttcagcgtggagacgggagatgtgaaagtggcttgacagacttacaaaaaaaggaagatgctcaggaatttatgttggaaaatatagggggttgtagatgcagttaagaaaagttacaggttcttcaggtttgagccagctggcaaatgaaatgacttaccgcagatatatgacaaacagggtcagtatcagcaaatatttcagttatatgacgattccggaatatatcgtgctttgtatggcggcggagccggggcagtcagaaaacagcgaggcccggaaagtctatctggcggatatcgccgagcgcatgcagatgccggtacgtcagacttccgccctgatcggaagactgagagacaggggatttatcacctggacgcacgatggaaacggcagtgagggaacttatgttcagattacggatctgggcagaaaaaaggcttccgaacaggaggaaatcctcagcggatattacggcaacgttatcgataaattcggaaaagaaaacatcgtccaccttctccagatgatgaatgagcttgactcgattatgagtgaggaaatatcggacgacggggaaggaatagaaaatgaagagtaaaattgacagttatgtagagaaacagacgattctctgcgcgcgcaatgattcgatttcgccccgtctttttgaagagtacggagtataccgcggtttgagagatgagaagggaaacggcgttctcaccggtctgaccggcatttcggatatcgtttcatcgcgaatcgtcgaaggggaaaaacagccctgcgacggcgagttgtggtatcgcggctatgagatcaaatccctgatcagcggcctcggcaacgaagaattcggatttgaaaaggtagcgtatctgctgcttttcggtcagctgccgaaagaggaggagctctcggagttcgaggaaatcatcgggcagagccgcgttcttcctgtgaattttactagggatgtcatcatgaaagcggtcagttcggatatcatgaatatgatgaccaagagtatcctgacgctggcctcttatgacgaaaaggtgacaggcggcggactgagcaatattctccgtcagtgtattcagctcatcagcctgtttcctgtgctggcggtgtattcttatcacgcttacaatcattatgaaaacgacgccagtatgtatatccatcggccgaaacccgaattgtccaccgcagaaaatcttctgatgatgctgcggccggatcagaaatttactcatatcgaagccaaggtgctggatacagcgctgatccttcatatggagcacggcggcgggaataattccacgttcactaccagggtcgttacctctaccggttccgatacttactccacgattgcggcagccatgtcttccctgaaagggccgaagcacggcggagccaatatcaaggtgacggaaatgatcgaagatatacgcagccatgtgtccgatatctccgacagagaggaagtcgcggagtatctgagaaagattctgagaggagaggctttcgacaggaaaggcctgatctacggtatggggcacgctatctatacggtgtccgacccgcgggaacggattttcagacagtatgtggaaaagttggcggcggcgaaaggccgggaagaggatatgcggttcttcaaccttatcgaagagctggctcccgctctgattctggaaatcaatccgacggcgaatatcagtccgaatgtggatttttacagcggatttgtatatgagatgctcgatattccgaaagagctttatacggcgatctttgctgtcgcgaggatcgtgggatggagcgctcaccgaatcgaggaactcgttacgacggataagatcatacgtccggcgtatatgagcgtgatgccgaagagagatgagccggtagaggatcaggacatatgacagaatgcggagtcgtccgctgcggcaggcgccgggaactgtttcggttagaatgaacatttcggtacgggagcggtgcgcttttgatgcggcgcgaaaaatcggcgcggtcagataaaatgaatcaaagagaccttcggaggttattccttttccgggccggattttctgtctgacgttcgggaaagaagccgcggggtctcttttttgtttcgtttttttatgcagccgtttttccttcagccgcccgagtaaatatttttcacggcgcaggctgcggaagagaaggcgaactgaagattatagcctccggtatctccgtctacatccagaatttcgccggcgaaccagagtccgggatgttgttttgattccatcgtcttgagatcgactgcgtccagacagactcctccccgggtagccatcgccgaggcaaaaccgccttttccgctgacggagaaaatatcctctgtcagtatccgcagaaacgacagccatttttttctgcctgtctgggcggcccgctgcgccggatccagtccgcagcgaagcagctgaagatccaggaacctctggggaagcggagttcccgcttccctgagaacccgcgctgcgtggagggagacggaagcttttgacttctctgcggtctctgtcagcgcgcgcaaaagcgcttccgttgaagaagcggaaatccagttgattttcagccggtcgcctgtctctatctgccggctgctgtcgatgatgcatggcccggaaagcgcgtcgtgcgtgaggagcagagaaccgcggcgctcttctttttttctgcccccgcggccgaatacgctgagagaagcgtcggcgaaggaaatgccggacaactcccggaaagggtatcgctggataaaaacgggaacgagggcaggcgcaaccggagagatgggaaagttcagttcagttagtacgcggagaaaagatccgtcggaacccgtttccggcacggaagctccgccggcggcgacgagaacattttccgcaagatattctctgcggccgcagatgactttccagcgggcagctgcgacgccggaaaccgcaatcggagcaggtttgctgcgggaggagagggaggagctgtccttttcctccgcattgccgagagggatcagaccggtgcacatcagatccgtctgaatggaaaaaccgttcttttcgcagtgtctccttaagatgtccctcacttctcttgccgacagggattccggaaaaattttaccgtcttcccgtacaaaagtgcgcagacccatggaggcgaaggtagagactacctgctcgttggaatgagcgtacaggagagtgcggatcttttttccggcctcatgataatgggcgggaaaattcttgatcgaaccgctgtgggtgatattgcactggccggatccggtgatcatgagttttttcccgggttccggttttcgctccaggatgagtccgcggtgttttttcggaaaagcagggcagagcaggccggcggttgcgcccgcatagagaccggcggcgccgccgccgatgacaataagccgatatacggcagaagtatcgttttttttcatttttcttcctcgtcgtatttattcaatttatcatatcacagcgataatcaaacaaaaagggcagagaaaatttctctgaaaaagagacttaaaatagggaaaagttcatgttatactgatattattcaatttacgagaggcggtgttttctctttcagaaggcgggacgcatgatatcgtagtggtaacatgagaggtatgatgtgtgatgttttatttgttcaataagtccgtttcgtatagtgtggcagaggcagataaggagtgaagatatggctgtaaagatcagtgcggatgaagccgcaggactcattcaggatggcgatgtggtggttttcgccgcagacgggctggtaagttttccaaatgagatcgtagatgcggcggagcgccgttttttaagagagggccatccggccggtatcacgagtctgagagctgccggcatggggaattttatcgatacgggagaacatggctggtgccacaaggggatgctcacccgttcgatttcgtcttatctcagcgtatgtccgaagctctgccggatggtggaggacgacgaagtgcagggctatatgtttcctctgggtcctctgatgcagctctttcaggaagttgggagaggaatgccgggagtgctgtcgaaaatcggcttggggacatttatggatccccgtttcgatggaggcaagctgaaccgtctgacgaaaaaagaaggagaagatctggtggaatacatccccgattttctgggcgaggaatatctgttttataaatcgccggggatgaacgtagcccttctcagagggacgtcggcggacgaacacggcaatatcagctgtgaaagagaggcgatcgatctggagcttctgtccgtggcacaggcggtaaaagccagcggaggtaccgtaatctgtcaggtggaggaaatcgtaccccttcacgatatccatccgagaatggtaaaagttcccggaatgtatatcgattatatcgtcgtcgcggagcatcccgaagatattccgcagaattttgaccgcagaaagaatctgaactacaatccggcgtttaccggggaaaaagtggtggagctgtcacaggaaaacgtgcgtctgccgctgaaccatattaaggtgatcgcccgccgggcggcgatggagctgaaaaaaggggataaagtgaatttcggtatcggaatgcctacgtttgtaccgtcgattctggcggaagagggggtacaggaggatgtgacgatgatttcggaaacgggtgtcatcggaggcgtgccgggagccggacgggatttcgggtgtcattggaatgcagaggcattctgcgatcacggcgaacatttttccttctttgacggcgggaatctcgatgtaggcgttttcggactgagtgaggccgacagagaaggcaatatgaatacgagtcatctcaacggaaaaatttcgggaatcggcggatttaccgatatttccaccatgtcaaaaaaagtgatttttatggggacttttactgcggtggggatcgagacggaggttcgcggagggaccatccggattgtcagagagggcaagtataagaaatttatcgggaagtgcagcagaatttccttcgtcgcatcggaatttctcaaaaaaggaagcagtcttctttatatcacagagcgctgcgtcattcgaagaacgcgggaaggcatgattctggaggaagtggctccggggatcgatatacagacacagattatcgatcagtgcgatctcgatctgatccttccggagggaggtccgaagctgatggacgcgtctctgtttacagaggatggattttctctctgcagatgatatccgcaaaggcagtgtaattcagcgccggcggaacccgcctctgagaacggcggggttccccccgggttttttttt

SEQ ID NO: 3366 - DNA, 32759 bp, Unknown
  16S sequences of unknown bacteria
gagccgcaaaaggggcagctcccaaaatgcacacccacgatacggtttctgttccgaggtatggttttagaaggaagtaaagtcctaccgctaccgcacaggcaagaacagaaaaaatgaactgtctgagtgacagtccaaaaaacattgactctgtgtaatttcgtatctctcggttaattttaacttccacagtttttcaccctccttagcaagctaatattagtttcaaatctgtcaggttctgcgtcgactcgaacatctccggttgtaatacaaacgatattctttttaggaacatagcaagaacctaaaagcaaatcggttataacgaaaatatcctcatcatctgctttttgaaaaagactgacgattgttttcttccctttgagttcgtaatcctcagccgcttgaatgacctcgccgttagcgaggtgcaagttatatatctgtatggttttcatttgtttttcctttctctgcgatatgcttgttttgcgtgacgggtttcatcagagcagacgcaggcgtcagcaaggcaaattactttgccgtttttctttcctccgtaatacacacaatatttgcagtcgcagtcggcaggcgtatagccctgccatctatcgttattattcttgtttttcttcatcagagaacctcccgttataagcccatcatttcacggataattcggtcgctcatcttaaccgcaccgacaagcacaagcatattgaataccagttctccgatatatgcccatacctgagtaacggctgctgcgtcagggttcactactggcggcgtagaagcaaatagggagaagatgatacaagcaagtacaattactgctccctcaagcaaaacggcacagtagctctttataaagctcttacccacattctgcgacggttctccggcaaaagtggaaagcggtatcggagcgagagccgtgtacatatacagcttgaaaaatcgtccgtacaccgtcattatcataatgaacgacaagaccgtgatgaacagtccgccgataagagtaaccgcccacaatgggatactctcaaaaaatccgcagctttcaatggttgttaccatttcagcaggtaaggttgtttggttgggcgtaccgaatcccgcagatgtcataatggttgaaatcgtaccttgtacaatgtcgaacagggcaagcataagctccagcccgtaggtaatcacacctttggcaatggcaaagcggataaacagctttaatgcgtgttccggtttctttacatcggtaaaacttccgcaggtgcgaaccacaccgacaacaaaaaacagaacgagtaaggcaagaccgatagcctgaaccgctccgttgatattcaccattaccgaccaaatactgccgcctttgaactgttgcggcgaagtggttagcaactgccatatttccgatagcttgctgttccaagtttcaagggcattttcgaggttctgaaccacccagttatcactcatctgtttgcacctcctttaagattaggggcatacctgaaatgccaggtatgccccgtttgataactgtgttctcttaaccggtaataagggtcaggatttcctttgcaaaggtaatgatgataccgcctgcaagagtcaggaaaccgttggctctctgagacgggtcgtgagacttcaaagagagaccgacctgaacgataccgaagccaagcaggataagaccgatagcacggataagaccgaaaatgaaatcggacaaattgttgactacggtaatcgggtcgcttgcggcaaaagcggtaacgctcataccgcaaacaagagttgctgctgtgattacggcgcagtaagcacggaagcctttctgaacctttccggtcataggcagcttctgagtagttttcttttcgttgttcttcttaaaaatgttcattatgttttcctccgttaatataagtttttatttacttcaaaatcctcatcggacagaagctcgtaattggtttctccgtagctttcctccggaagttcttccgggtcaatagaaagaacggaaattgatgagtgtttgatggtaacttcgccgtgtttatatgcagaagcctttccatcggttgtaagtgccacattcgggtgcttcaagatgtcatacttgaagtccataacggggcgttctccacgaataaacagaattgcatattggttatcaagcatacgaacctcatcaggggtaagaagctctcgaccgctaatctgataattggtggagtagttaccgcttcgcccggtactctttccgaaagtgttggtatcaatggtttccttgccgagaagctcggacacatatttgtgggtgctttgctcgttaccgccgagatataaaaactcgtcgcagttgccgacaatactttcccattgcttttcaaacaaggcttttaactgagccaagttctgcaagatgatacttaccgacactccacgggaacgcataaccgacagtatcttgtcaaagtcatcgggcaggctcacattcgcaaactcgtccatcaaaaaatgaacgggaacaggaagcgagccgccgtgaatatggtcggcagcataaaacaactgctgaaaaagctgtgtgtataggatagataccaagaagttaaagctggaatcgttgtccggtatcaaagcgaacagagcgacctttttctctccgagtgatgggagttcaagctcgtctgtggtagttaaagaagcaagactttcaagattgaacttttccagtcttgccgcaagggttatctgtatggactttaaggttttcgccgcacctgaatgataggaacggtaatacttcaaagcgatgtggtcgggatttgacatttccagttccgcaaacagttcatcgagaggagaaggtcttgtgtcctcctcgtcctcaatcgaaccggctctgagcatttccattaccattgcaaagttctgttcatcttcgggtgcttcgtaatgaagataaaatacaagtgcaagcagaagcattgaagccgaggtatcccaaaaggggtcttgtgcctgactgcctttcggagtggtactcttaaaaaggttcgtcacgagcttttgcacatcgttgtcgttctgcaaatagacaaacgggttatagcaatggcttttctccattgaaatcaaatcgagaacacgaacttcatagcctttgctttcaagcagctttccggtgtctctgagtatttcgccctttgggtcaagaatgacaaatgatgtgttgcactgcataagattcggcttgcagtaaaaccttgtcttaccggctcccgaaccgccgcacacaagagtgtttaagtttcttcggtgcttcttcgcattgagtccgatacagacattttgcgtcatcagcttattctctgaagccggagactgtctgtattttttatttacggctcttgcgttgccccatttcgcagagccgtgttcttcacgccttcgataattcttctgtgtcgagaagtaaatcccgatacccattgcatagcagagaagcaaaacgaggacagtttttaggctgtcctcgcatagctcaatatgaaatgggttgttgaacgctgttaataggcttggcagtatttccggcaatcctccttttacagagggtgcaatcagaagtgccagccatacgaccgggataataccgatgacggaaagaataattgcagactgcctctcgttatctcgattcacaggagcgttccttttcgataactctgaattttttctttggggcagttccgaccttaatgataaggtcgtccaccgcatcggtagatttcccttcgttcatcaaatctgttttctcatcgttgagagaacggattataatgccgtgttcataatcgtccaatgcgatatgatacatttcttccttcgccatagtctcaccttatctttcgtagtctttgcttcgttcctgctttttcttgtaaagctcatcggaaacacgggagtgaatatccgccatcgcatttctcgttttggaaagctcatagcgaatgtccttcggctctttgccggcaagcttctcaggaatacggttgatagcaaaattctgtgtatcgacgccgtacttcttgcaaagcatataaccgatacataccgcttgaaagcccatatccgctctgctgtaactgtcgctgttgatggagagctgtgcgtggccaagttcctgtgctacgcactgagcgaccgcaacgctgtctcccacatcacgcttcacatacaaggtctgctcctcgttgttgtaaaacgccgccatattgggatacggaagttcatttgtggcttccacttcaaccggggaagaatccagcataacggtaatgagagctttcgggtcacggtttacagtaggtgcaggcggtctcttgccattggtctgcgaaacatcaaagacctttttcacattgtaggaaatgccggtcgtaccgtctctcttggcatactcgacaggttcaagaatggaaatgcttttcgcacctttctgaattttcacattgtctttgctccagtcgtcaaagtttttgagctggcttgcttcgggaagctgcttgaaaatcagaagtgcgttgaccgcagaatatcggtcaagacggctctgcgtatcaaggaacgctttgaacttctccgggtcggaaacgatagcctttgcggtttcgtccgccatctgatatacggcttccttttctgccttcatcttatcggcgtattcctctttggaaagtctgtttctctgctgtcctgccttagcaggggtaaaattgtttgtcattgtgattacctctctttcacatttttgcttttgggtttcggctgctggtgtacggtctgtgccggggcgttcttaacctccggctttgatacctccggctctttgcgttctgcttctttctgctgcttggactgtgccttatatcggtcgagctttgctttcaccgacggctttctctgtctgtcgctgacagtacccttatcagtttgcatatctaccggctctgagttttgccttgacggagggtttttgtccgttttggcgactgtggggtttgactgggagtacccctctttctgaataggctttctgactgcttcctctgtgatgatttcgttcttggattttgtcggcttgtctttttccaaagcatcacgcttttcgacagccttctgagactcggtaacaatagcagccttatcaaccttgccgagttcaaatctctcaacgattctctgaattttggaagcgtcctcagcacgggcgataatatcaatcggtacattatcgccctttgtgtttttatccctgagtacgcagtagagaacgccgtagcgttttgcctgctcggtaaacttcttcaagtccttgttggggatagaaaacactttcagctccttgcccgatttaatcatattggtaagtcgagccttgccttttgttttttgttcctgtttgagaacagagactaaaagaacggcaatattctttgctgccgctccgcttaattttgcggctacttcaaagccctcaagcgatagcctgacgacctgttctgccgcatcacctccgtttgtcattacggttctgctcctttcgttcttgtttttcttcgtaagctcttaccgtttcaaggttggcttcaatgacctttaacctttcggctatgtcatcacaaagaccgacctcttttcggagagtccacagcttgctcgtgattgccgtaatctgctctttgacatttgatagctcatcgtcactcaaatttcttcttaactgttttcgcaggtgcgttctatcgtcagtcagggatttgatttgcgacaatacggactctttatatgagaaaagctgctcgtcggtagaaatgttctcccgtccaagcagccttgtctcctgagtgattttgtcgagcttcagcaaatcttctttcaaaagatagtgaagccttgcggtattctgttttttgtatttcggcagataacccagcttatagcagtaatgcagatacagcccatacagtccgccgacctttttgattttgtgttctcttgtgggcattcggtactgcctgactcttaccgtttctttggcaaaaggaacgatgagaaccttttgattttccgtcagcctacgcttgattgcttcctcggtataattctctccgagggatttaagtcgtatcggcttcttgtatcctttcggaacaatcgtccaatactttcggctgtcgctgagacaatgctcatagcccatctgcgtcaggatataatcaaaggtctttaagttagtgctgtgtgcaatcgcttcatcaatggcgtcacgggtaatggagtatcggctcggcataccggcttgttcctgcttgtagtaatatgaggattgcttactgcggttcgggttcggattgtaatacagtccgtacttttcacagagacggtcggcaaccaagcggaacttgaaccacgctttttcgtctccccataatcgcttaccgtccacaaaggaaacggaattgattacatagtggcagtgcaggtgctttgtgttcagatgagtagtaaccaccacctgaaatcttttgccccacacttcgtttgcaaattccattccgattttctgtgcaagctccggggaaatatcctgttccttaaagctcaggtatccgtgataggcttgaatgccatcgtctttgccgtatgcttttttcacagacacaaactggtctcttgcggtcgccggattgcagttgataccctcaacgaaaaactcacgctcagttttttcttcgtcctttgcatagctgagaacatcacggagagcctgatactgttcctcggtgtaaatgtctgtcgcagtcttttcgggattggcggcatagtcgattacctgaccgagccttgatgtgaccgaccacaatttacttactgccatttcatatcgctcttatcgggtcttaaaaaagtacgctccacatcagcctgaaacttgtgccaacgctcggcttcctttttgagctgcggtgcgtcaacaaatccgagggaatttgcttttaccgcaagctgattgatgttgttcccgatagcagataactcacgcataacatcgtaaaatctttcgtcgggcttttctctcggctcgtatcctttgagaagcaaacggataagaccgccttcggaaagacacgcccgctttgcttttttctgcaaatcctgagcttctgccttgttcatcagaatgtgcttttcaatgtttctcttgctcatttttatcgctgtcctttctgttaatatagtgcctgtcccggtttatctgaaacaggcacattgttgttactccgaaaaggccgccgatgattaacccggcggcaaccaatactatctcccgcattgctttactcctttcttgcttggggtattaggggcaacccctaacgagtgtaccgttttggacattcctgtccataaatggtctgctcgctaagattatgcagacactcagggttgccccatagattgactattatctctccatatccttggagaccggcttatacggctttgcttcaataccgtccaaagacttgtaaaatctctccgggtatttgaacttttcctcgtacttacgagccagttctttcggcatactgagaaacttttccgactcaatcggtgcgtatgcaatgaaaaacttgccggcaataatgtcgagcatttcacggttgctgtcgtctttcacataacatttttcaatcttccaaccgtccttgccgccgtgttcatcagccatatacgcttccagtcgcacacatttatccgagccgtcaagggaagaagcatagatagaatatccgcccataccctcaatgaaagccttattgttactgctgacaacataggttctttgttcttctgtgtaaggcttgtcaaagctgtcatccgtaaaaacaatatatccggtcgtgtggtttctttctttttctgcctgccggaaatgagctttcaactgcggataactcatctcaacattttcaggctcggaataaacagccctgttcagaggcataccgttcatctttccttcctcgttgcagatgatggcaacctcgtcctcaaagggcatatattcttcaatatctccctccacaagagactgcattgcttcaagggtatcctcgatttcaataagtttcggatacctgcccggctcaacaagaatgacggaaatcttctccggtgcttcgaccttttcaaaggtatcctcgtgaatattcaaagcaagagagctgccgttttcccaactcatatgaatctgtccggcgtcgtcaacgaacttaactgttccttttagcccatagggcatttgactttcgccagccatttcagtgagtacaatctgcgtaccctccgggtacatttctctgatttcttttagtttcatcgtgcaaaactcctttcggttttatcctttatccctaagcgtttacaaagaaaatcgttgacatctttcccgtattggggagggtcgtcaacgacttcatacttatctgagagaatagtctgcaacgctttggtagcttttcttccggcaatatcattgtccaaatgaagaacaattcgcctgattgttttgtccttttcaagcagcctgccgagtgtaacaggcactttcgagtcctcaattttctgctttggggaatacactcccgcaagagaaacaaggttaaactgtcgccagtctttgccctccagcttcatcaaagttgcataggaaagcaggtcaatggcacactcaaaaagatgaacctctccggtgttttcggcagtcaggcggaaagaatattgctttttactgccggtgcagtcgcccataatccttgattggtttgttgctctgtaagcggcgtatttaggttctttgttctcgtcatagccgataaaaacagcattgtgatatgggagcgactcaatgattagctcctgttccaaacagtggttgatgatttcataatcaatcccacgcccgaaaaggtaatcaaataccacctcggtagtggggcttttttggggcagaagcaaaggctgttcctcatagcttttgatatttttgcaagtcggaaagctgactgaaccgtttcccataatggtctgaaccgcctgcacaaaatccattccacggactttgataagataatcgagggcggatttgcccccgatacctctcgaccaccacatccattttccgttggaaatcttcaagctgtcgtgggttcttgtggtgtaggtgttgcttgaaaacttgacaagctcgcccggttcatactctctgagataggttaataagtccattcgcttggcttctgttatgacttccggtgctatatacggcataggtatcaccgccgttctacatcagcaaatcggcaacagctttctgtatcggttcgttgatactgagctttgcaatgatgataagtatcttgtcaacagggcagccgatgtcattccaaacagtccaagcacctcccgcaaggtcgtcgttttcatacaaagcaatgatttcttccggcgaaaacaccgtttcaatgctctgtcgaaccaactctccgtagaaagaaagctttgcatttctaagagcaaattctgcttcctttgcgggtggtttgcttcttttcaattcgagatatgctttatcaagtctcctgaccacaaccatcatcattgcgtcaaaagggttgatgattgatttcctgcaagggcagttttctctttccttatcgggtgtcattttatcgttcataggttttctcctttcgtgtcttcggcacttcgccctcatcgggttcgccgccgacaatttcgttttctcgcttatccatattgagcaagatattcagctcgtccagtcgggcaagctttgttttcaattcttcctcttggataaatggtttttggacttctttctttgcggtttccaactgatttttggtgttctcaaggtcattttccgcaagcgataagctctcggcaaatctctcaattccgttatcaagacggataatattgccgtgtgcgtcatcgccgagaggaacatttctgcttgtcgcacccttcagtcgaacctcataatttcgctctgcggtattaaaaagcagctccgtttcaaaccctcggtacttgccgagaggaatagggtcggggctgttcatctgcttacagacttcaatgattgctttaccggcgtcggctttttcggaataaaaaacacccttaacctccataccgacaaagcggtcgtccgttggtttcgggtgctgtttcgcagtttctacatcttgcttcaagccttcaatacggttttccaaagctgtaattctctgcggataatatttgattatcttatcctccaaagcgtatttttctgatagaaagttggattttaagagcttcagcttttggacttgaatatccaaatccatcttttccttaatatacggattgccggtggcaagcattttaatctctgcataggacagggcggtttcatcaatatcctcggcagaacgcaccggagatttgctcgtcataatctgactggcgaatttttgctttccctctacaagctgatagagatatgcgtcaaaggtctgctccgttacatagcggtaaatatctacatcagggtttgagttgccctgacggataattcgaccggaacgctgctccaagtctgacggtctccacgggcaatcgacatcgtgaagtgcgataagtctgtcctgaacattcgtgccggctcccatcttctgcgtagaaccgagaagcactctgacctcgcctttacgggtcttttggaacagttcttttttcttcacatcggtatctgcttcgtggataaagcggacttcgctttcggggacaccacgctctatgagcttttttctgatatcgttatacaccgagaatgtgccgtcattctttggcgttgagaggtcgcagaacacaagctgtgccgattttttatcggctgtttcctcccaaatacggtagatgttatcgacgcaggcgttgattttactgccctcaaaatcaggcagcatatcgtttagcatacgctggtcaagtgccagctttctgccgtcgtttgtgattttgagcatattatccacactcgaatccacaccgccgccacggactttctcggctcgttccgcaagggaagcaaccatttctttctgcatttccgacggcttgaccgcaacattgtggaagtgtgcttccggcacaggcagctccagcatatccgccgtcttaatgtcggcaacctccttaaacattgccataagctccggaaggttatagaattttgcaaagcgggttttcgctctgtaacccgttccctccggggtaagctcaacggctgttacagtctctccgaaggtacttgcccacgagtcgaagtgttgcaagttgtttttcacaagcgtgttgtactgcaagtatcgctgaatggtatagagttccaccatactgtttgagataggagtaccggtcgcaaatatcgttcctcgaccgcctgtaagctcgtcaaggtatcggcacttcataaacaggtcggaggatttctgtgcttccgtttgagcgataccgcccacattacgcattttggtgtaaagatagaggttcttgtaataatggctctcgtcgataaagagcctgtccacaccgagttcttcaaaggtaacaacatcatccttgcggctttggtcgttgagcttttccagcttttgtttcacggactttttagacttttcaagctgttttatggagaaattttctccacggtttcgcttcaaatccataataccgtctgtcagttcttcaagctgctgctcaagaattgccctctgtctttcaatggacatcggtattttttcaaactgggaatgaccgatgattactgcgtcataatctcccgtagcaattcgaccgcagaattttttgcggttcttggtctcaaaatctcgctttgtcgcaacaagaatattcgccgccggatagagctgcaagaactccgccgcccattgttcggttaagtgattcgggactacgaacagcgacttattgcaaagtccgagtcgtttggactccatagcagccgccaccatttcaaaggtcttgcccgcaccgactgcgtgtgccaacagcgtattgccgccgtacagaatgtgtgcaaccgcatttttctgatgttcacggagttcgatttccgggttcataccgttgaaaacaatgtggcttccgtcgtactcacggggtcttatgctgttgaacttttcgttatacatcttcgtgagtttttctcggcgggcagggtcagcccatatccagtcctgaaagccctgctttatgagttcctgctttgcctgtgcgattgccgtctcttttttattgagaacggcttttttcttgccttcttcatcttcgatatagtcaaagatacggacatctttcaggttcagcgtttcctcaattatcttatatgcgttgatacgggaagtgccgtatgtgctgtacgctttaacattggaacggtcatagctctttccctcaatgttccattcgccggtaaactgggagtagtgaaccttgatattccattgtgcatagcgtggggtgtcgagaaactcaaacataaactgttggaatatttcgggcggtatccaagtcgcaccgagccttacggaaatctcgcttgccgtcaaatcctttggctgcaccttttcaagtgcctgcacattgacggtgtaatcttcgggatacaatgccgcagaccttttggctgtcgccagcttctcacggacattgcccgacagatattcgtccgccatcagatacttcggctcataagaattaccgtactcataaagaggatttaaaaagattacaccctttaggtcagcgaataattcctcctcgcttttgccggaaagctccatcatatattccatatcaatggctgctttttcacccatagagacagcgagagcttcgtctgcggtatcaacctccgttaccggcttgtgcggttttatcgtccttttgaagaacatatctgccttgcgttccagttcgccatcttcgttgatgacctcaagagcagagagcagagcataggaactgtcgtcggaaaaggcagaagtattggcacggctgttaataagtccgtacttctttgtaaagctgtcatacagagtgttcagcttttcctgtgcctgtttgatttcgctgtccgggtaatcctcggtttgcagttcaatcagattgcggacgcaatctcttatcccaatcatacccttaatgcggttctcggcggttgccgatacctccaccggggacatacgggagttctcacggaaatagattttgtcgtccaaaaccgtgtaagagaagttccttaccgtagggtctgccgggatagaattatcttcttcctccagctcatcggctacttcgtattcggagatttctccgtgaatgtttgaaacagcttcgttcaaaagctccgaaaggtcggcgttttcaaacggctcacaggttgcttccggtccgaaacgaccgcttaccattttcatttcgccgagtatcgtttccgggtgctgaacaaaatatgagttcatccttataccgttttcgtcggtgtcaagatgaacccagtcaggctcaatatctattagcctgtctcgcttttgcaagaacagaatatcggatacaacctctgttccggcattgcctttgaaggtgtcgttcggaagtctgattgctccaagaagctccgccctctgtgcgatatatttacgcacattggagttttccttatccatagttcctttgcttgtcacaagagccatcacaccgccggggcgtaacttatcaagcgattttgcaaagaaataatcgtggattaagaaattgtacttgtcgtatcgtttatcggagactttgaaatctccgaaaggcacattgccgataacgccgtcaaagaagctgtcggggacatttacttcctcaaagccctgtgccgcaatagaagatttctgataaagctgctgagcgataccggctgaaacggtatcaagctccacgccgtaaacctttgcgttttccattgacttaggcagcataccgatgaagttaccgataccgcaagacggctcaagcaggttgccctcctgaaatcccatctgttccaacaccttgtaaatggcagtagatacttcgggcggagtgtaaaaggcggtcaaggtgctttctcttgccgacgcatattcctccggcgtcaggatattttttagcattgcatattcggtatgccaagctccggctcgttcgtcaaaggcttcgggaataccgccccaaccgacatatctcgacaagattttctgctcatcgggtgttgcaaaacgattttcgctttgacaatccttcaagaccttaatcgctgcatagtttcggtggaagcgttctttcttgttcacttcttcaacctgattattggcaaggtcaaagttgtgtcgctctgccatcggaatatccgggtggaggtcaaagctctttacctttgactttttcttttgctcccaagcggggacaatcggttcaggctctttctctcggttgtccttaacctcaacaccgttgtgttcggataaagccttaaagtcatcaagcaagtcaggtctgataccaagcacagaaccgtcatcttcaaatacaaaggcttcatcaacaagaaaatgataaaactctgcaccgtgccattcgttatcgccgtcccttgcaacaagaccgttttcatcataaccgagtccaatgtcgtcaatctttaatctgccaagcacggaataaagaatttctgtttctcggtcataaaccgggacttcagaaacagcagccacaaggctttgcattgtcgctttggtacagtctgtgaaatcaggctgttgtgaaaactgactttctgcttcctcaaaccattctgtacctacatcggcaagctcctgatttgcaatactgccgagataatcaaagaaattctcagccgagtcatactcccttgcagcttgctgtatctcgtcaaaagaaagcgtatttgtaacatactgacctccggcattgctgtcggggttataatacatccaagttacgctttcattgtcccggtcgataaagaaggcgtcgtcataaccggttttcgaactgaaatcctgtacggtttcggtatcgttttgagcttcgttttcgcctgtaacggctttttcttctgccggtaatacactgaccttcaagtggtcgttcattggattttcacgcacttttcggtcaaattcttcccttgaaagctccttgttgaataggggcatatcgaagttatagagctttacacggttttcatcaaaggacaaaatctcatactgcgaagctccgatatacacgctgtcgccgagatgatattcatactgtgcttccggctcgtccactttgttttcaggctcaggcggtgcggtagagagtatctcacggttttttctctgctctgcaagctcggctcgcctttcttcctgcttttcaagccattccgggtacttttctttttcctttgggtttaggtatctgtccatacggataaggtctccgatacgcttttcaacctgagaccaagaaagcgtaatgtgcggtttgtcgcttccgataccttttgaaattgtgataccttttccgtcgtgctgttcgtcaatgcctgcaccgatgatgaccggataagagccgccccaaccgtattcgtttttcaagaagtcggcgttctctttagcagaaaggctcttttcaaactgctcatagatacgcattttgccctcggaaactccgcttccacgggtgagaactgcgtctatgatttcctgagaaaaagtaaaggcagaggttttttgttcctctgcctgattgcccattatgagagtcaactgaccgcccatagacggaagcggcttcattgtatcggtcaattctcccaaaagtctcattgcttcaaaatgctgtgcgataacgccccagtcgtagaaactctgagcggttctgttttcgtattcgccttcccacaagtggaggacattctgaaatgttttgtatccaacaagcctgccgtcgcttaaaggtagctgggtgtaatcgttgttgaaaatacccttgatatattcggtacgggtcgcattatccgtatttctctcatagaagtctttgatttcttcctttgaagcggacaaatgcggggtagtaccgagtatttctcggatagtatcgtcgccaccgaaaaacggcaggctcttgtcctcgtggtttctgtcgtaatactctaagcgaatattacctgattcttcacgatttcctgtgccgagttcctgatgttgttcatcagacgaacccacttcatcatatcttccgctttcatctgctccgtcagcccggctttctgtgccatctgcttcacgagagtttcctccagttcgctggctctctgctgaacctccgccaagtgactgttcagaatccctttcgtcagaagattgtagtacaggattttgtgatgttccttcagataagttctcctcatctgcgaccatctgccgagagtcacttccgtctgctccggcagcttcaggttcggaagattgtaatctcccaccatcgtgtatgtgatttcgctcatcgctttgactcctttcgtctttgatgtctttattgtattcggattgcccctgttcatcaattatgcgattttccttgctgagcgtgctgattgttctgctgacagggagcaacgccatttctgcaatgtcgcttgtagcaatacccaccgcattgagaacttcctgtgaattgaagcttgaaataccggcaaagtcatcgggagaataaaccttgtctgcgttcagtcccaatcgagccataaccatatatgacacgctgtttctgacaagctccaaatacaagacatttgcttcgtcggcagacaaatactcaatatcgctgcctgcacccaagctcataaagtcggagatatagtctgcgatgttgtcctcgacggcattggaaatgctctctttgacgacattttcaatactcgttgtatcgtttactgcaccgaaagtgttttcaagcgtttcaataacctctgcttcatattcgggtctcatctcccaaatcggaacagggcgggaatatcggctctcgtgggtgtccgatatatcaaagtaatgaatcagcctttgacggcttctgtctgcgtcctcaaatacggcaataccttttgctcctcggtttacccagcgaccgaaagtgccgttccatcgttcgatttcaagcacggctgttgcgtcgggtctttgggcataaatgagaagctgttcatcaaatcggagcctgaaatttctacctgctgttttcagaaacgattgccagtttaccggattgtctgtaaccgcaaaacaggttctttcatacagctctgaaatcaggtcaaatttccttgccacctcgtctgcacctccttatcgtgatttttctttgttctttgcaggttttttgttttcttttgcggctggttctacggtatgaccgtttctctcgcaaagctcggcaaattcgcagatatggtagagatttgtgccgacctccaaatggtagtcgtcgatatatctgcaagtcctctccattgttttgccatcgccgagcttaattgagattttttctccgtccgcaatgcgaaactgctcctgatagtgcgggtcaataaatcggataccacgctcggcatttttcaagtggttgttcagccactctttctgatagcaatagcagtaaagattgtactcgcccctgttggggttaaacctcataagatagctgtacttttccgtatcaagacggatgccgtagtggttgcggtcatcattaaaggaactgtcgggagtggaataacagtaagaggacatagcatttctgccggacaaaacatcgccgtcacgcaatccgtttatcacatcatcaaattcagccttaaattcatcggttttcaagtcttttctaaaatcgttccaagtcgtccaaaactcgttcccgttagaaccgaagtcggctcgcaaatatccaataagtccggtctgcatagagagctgctggctttggctgaatgtgtatttacgctctgcttcggtcaatactctgtaatccattttcatcacctcgcttgttcgtttgtttgtctttgctttggaataggaaagccataaactccggcaatgtcatcgccgagccttttggtaactcgtgtgatgtcggctcttgtggcttttccgttgtagattttatcttgcagattttcaatctgcgtatcggtaacaccgtctttgaatacacggtatagataatggtttgttccgtcgtgatgaacggcatcggctcgaaggtcgccgtacttatccacataccattcggtgtaatcggtatcggaataaaggcagtccttaatgttgcctgaatcaatcatcttgtagcccgacactctgccgttccatctgccgaggtcgccgattacgataatcggctgtgaaagctgaatgttgagatttactcgttcatcatataggttttcggcatttgattttaccataatgtcgtaaagctcatcatcggaatatccgggatacagttcctccaaagactctcgccaatcatcaaggtcaaggctaatgtcgctccaaatgatatgacggtcattctgttcctgcctgctcatcagtgccacctcccaaataagagaacagcttattggctttggtctgcttctgaagctcgataatcaggctcatatccggaatagtgatacccggaattttcaaaatgctctccatatcgagctgctgcaatttcttttctgtattgcagcctgcgtcaaacagttttgtcaggagctttgtcttttgctgaaaagtgaaattttccttcattgctttgtcctccttatcgttctttgtctttatttcgcttcttgtttgaaagctcttgtgccttttcctttgcccattcaggcagacgctcaggctttacttcgcccataacatccattctttcatatcgggttgatttgccggtgtgaagatttgtgcagaacacggcacttccacggctgtttgccgacgcaccgaaaccacctgtaacatagtagagctgtctgtcggctcgctgaaattcgggctttaataccttggggtcaatggcaatgattgtgccgttgatgtctttggaatagtggtcggggatacagtcggcttccgttatgagtgagattggaatatcctgtttttcgacctgttccttgaaaagctccgcttcatttgccacacggcttccgaaaaggtgtacgatttcgatatagtcatcgcttaccatacattccgaacacagttcaaacaggtcgtttctctctgcaaagccgcacataaatttatcgccgtttgtactttgctctttggaagccaagataacttccttttcgcccacattgaccgagcagagaacagtgtattcacctatttttctttttccctcgttcatatccacacctcagcttacttcaatcacaattctgatgtttccgcagtcgcagccactgcactgccttgacagttcgggaaacagggattgcactctctgtcttgctctgcggatagtctcaaagcacggcaagccgtagcctttatagttgttgactatatcctcaagcggtaaatctccgactctcatatagctgtatcggttgtaatagcaaaggataagctgcatatcgtcatacctcgtttcggggcattctctgagtattgcaagcaccttgctgtcaaccgtcttttgcttattcataatgcacctccgtaaaagaacggtgggcgaagttttcactccgcccactttggtgttccttatttctttctgttcttaatctgcaagaagataaagccgccgataataaaggcgaccaatacaactgctacgattgttttagcgtccattactcattgtcctccttcttcttttttctgtacgcaacaacggctgtgccgacaataccgagggcagaaagtcccgcaagtgcagtccacaagccgacattgctgttgtctccggtctttggtgtatctctcagctcattgtgcatttccacaacggtagtagaaccgaccttaacggttgcaatcttatccgccggaagcacataggaagcagaaacactatcctgaacctcggaaacggtgtaatcgccgatacgaagtccctcgataatgatttcgccgttcttatcggtcgtgaagcttcggtcgtaaccgtttactcctgtaactctgaaagtgaagccttcaaccttaccgtcagaggaagtcttaacgattttcaggtttcctttcatagccgtgttaatgaagccgacaccggctttgttttctacctcataggtggtttcatccttttcaatgaaaacagagtacacacccttatcaagctcaaagccttccggtgctttggtttctcttacaaggtatttttcgtagagaagctccttcatctcgtaaataccggtagaggtttcggagagcgttccgataagctcgtcgccgtcgtccaatttgccgtctccgtttacatctttgtaaacctcaaaggtcgctcctgtcagcttgttgtccgggtaatcttcatcaaccttagtcaacttgatattgccgtgaacatactcattgacgatttcaacctcaatgacctgaccgacctcggagattttaacttcataagaagtttcatcaagcacaaagcccttcggctgttcgatttctcttacaatccagtttccatacggtactttgtcaaaagaaaagctaccgtcattttcagaggtagcagtcatcaaagcattttcttttgtaaatacggtttcatcagccttaaacagaccgattacagcacctcccagtgcctcgccgttttcggtaatctttttaccggagacagaaccgtaaatgagcttgttttcaatcggcttgccgtcattgaccgcaatctcaacagtttcggtatcctgtcccgcatagctgaaagtaaacggatacttggcgtcggagagaatataatgctcatcggtggcaagctcctttacatagtagcttccgaaaggaaggtcggttttcagcgttgccttgccgttttcagaaagtgagataatttcaatcagaccgtctgccgggatagaagtaccgcttgcagaaacaagttcctcaccggcgaaaagtccgaagctgatattcttcatttcatcgccgttaccgatgttgaagatgtcgttcttttcaatagtcttttcaagacttaccgttactttctgcctgtcgtttacaaagcttgtggcggtttcggttacagacacttcctgaccggcataagtcagctcaacatcgtgagcttctttgttgatgaccataccctccggtgcggtaatttcaaccaccgtatattttccgagataaagctccttactcttggcaagtccgttttcatctgtggtaacagtatctacgacctcgccctttgcataacggagtgtaccgtcgggagtgataatatcttctgctgcggtaatctcataaaccgcacctgcaagacctttcacttcatagacaggctgataaatcacatcggcattttcctctccggagatatttacccctgagaatacctcgccggtcttttcaatgctgacagtacctttctgtgccatattgggcttatcgacctttatcacggtaacaccaccctcatcggaagaatgttcctctgccacatcaaagtacaccggtgtgctgtcaagcacatatccgtaaggagcctgaacctcaacaagagaatatcccttgccgtattccagtttctccggtgtaacaagctgtccgtttgcatcagtgtagaaaatatctatcgttgtcggagtaggataagtgaaggtcattgttacctgattgccgtccgggtcaaagattttgaacccagcaccggcataaggaatgtttttaccgctttctgcgtccaccttaaccaccttgatatagctttcaaagtttgcgttattgatgagatagcggtaggtctgtccgttctgagaaatgaacacatcgaagtcgtccattaactcacgcccctcccaaccggaggtctgatgaacggtatatacgccgtaaggcatatcctttgtctgaccgaagccgttttcatcacaaacaatcacatctctttcatcttcttctgctgaatcaaagctgccggaagatttcagatagatttcaaaggttgcaccgttttccggtgtttcaatctttgtttcgccgtagggtaggaaccggacgccttatcatatttctatgacaggatttccgagaacctccctcagaaccgtacgtacacctttcgatgtatacggctccccagccattcctaaagcattttacaaagttccattatgaagattgacgtggcagtcatggcataagacgagcgttttgcgcttcatatagctcatcagccatacccagttaggcataggcgttccacgttttcggtatttcttcacaatgtccttaagcttccttacatgatgaatctccaaggcacaatgttctgctccacataattcacatacatcactgttgagccttttcattaactgaccaccctttaatacctgtccgaattggtcggagatttctccggcaggtcggctaaccttttttagactgtcattgaagtaggtcatcgttttagagccttctttcgtattgtatctgataccaacaatacgcatggtgccagttccattttttctgggaacatcaattccatatttctgaataacctttttgaccgatgatttttcctttcgggcgattgtcttaatcatgctgaaatagtgataatattgaaatgtggatattttcgtgctgacatccgttgctaagcaatagtaattgtaaagccctctgatttctgcgttgtactgactgataatttcaatcacgggcagattaactcgtgcccccacctgatagggttttccctttttaatgaacggcttgagcttttcccgaataacatctcccggcacaactaactgaattgtaccgtttacagagcgtttctttcgaccgattgaatcaaccacttgctttgtgttctcttgagattttgtaatttcgtatcccagaaaacgcactcgtttatccgacagattggtgattttcgttttttcccggctcaattcaagatgaagttccttttgcatgaaacctgcaattctttccttgatttcattcgctgttgcctcgctgccgatgatacagaccacaaaatcgtccgcatagcgcacatattttacacgctgatagtttttatccatagggtctaaggcagggatattctgcatttgccgcaggtactcatccgcttgttcctgattgcctttcttttttgcacggtttcgtttgtattggagaatctgatattcacgatatggtctccgctgtttccctttggtgtattcagcagatattccttccatgaacttatcaaactcgtgcagataaatgttggccaaaatggggctgatgatgccgccctgcggtgttcccgacagcgaattgtacttctggttgaattccaaatatccggctttcaggaatttccaaataagctcaagaaatctaccgtcatcaatcttcttcaagagtatctttaacaatatttcatggtcgatatggtcgaagcacccggtgatatcgccttcaattacccagttggttcccctacaggtgcttttaatttgatacagtgcggtgtgacagcttctattaggccgaaaaccgtgcgaattatcgctgaaaattggctcgtagattgcctctaaaatctgccgtactacttcctgtaccagcttgtcagcaaaggcagggatacccaaaggtcgcattttaccgttcttcttggggatatatgtccttcggacaggttttggttgatagcgttcccatttgagcagttctatcagttgagaaatttgcttcctgctaaaaccgtcaatggttgtcccgtctgttccgggcgtcatattgccttgcttagcatggattttttgatatgcccgcaaaaagaagtcctcattgaaaagatttctgtagatacggtcataccggtgtgattcatcttgtttggatttttgctttagtattgataataccgtttcagctttttgcatttcgcatacctccattcgattatcaatagaatgacctgccgcccttcgccatgtatgcggctttcccgcactcggactactatggcggctccgttgccatgccggatattcagtgtcatctccctcgcttttcacacttgggatttatcgccatagggcattacacatagcatttctgcgttctggtttaggcaatctccgtttagtcgtattgatacattgggtgtggtttaggtttccgttcattccttttacatacttcctgtatgccgggacattttcagagagtatcagtgacgacaacggtttcactgatagaaattgtccatgtgcgcaatcagtcttcgcacatctccacacttagagcaaagaaactggatttaaagcagtttagccttaaccatgccacgcctttggtctcgcatatcccgcttatacactgatttcaaacgtatatgcttttccgccatgctcttgtcccctttatctttcgattccgggttaggcggctaaccaactggatttctctccaatccagtacctctttaggcattatcaatacgcccttacggacgcacgtcatcggtgtgcttgataatggcgatattgcctttcataacctgttcggtaacatcatttgctgtctgattgtgttccaccgtataaagctgcggttcagcaccgaccttatggattgcggtatcaagcagatagccctcggacggagtgatttcacggattgtccagtcatcatcacagatatattcctttgtggtaaactgaccgttcttatccgtcacatacttgtccacaagggtttcgcctttatagataccgtaaactgctccggcaagggtagcgtcgccctgcggtgtgccttcctctcggtcgctctttgttacggttacgctgaactttttgagaatgttcgtgaagtttcttgtggttacttctttccagttaatcggtgcggtctgatttgcaggcacaacataacggattgcggtatccacttcctcaatggtgtatggggtagtgccgctgataagcacatcatcaaaagaagcaacaccgttcttatctgtcacggcatactcatcgacagcaataccggaaagagatgtgccgtaaagatggaaggtaacgccctcaaccaagttatcctcagaagatttgatgacccgaagattacctcttttgagaacattattgaaattgacctttgacacctgaccggcaacaacagttactctgtgaacctcctgcggaacatatttgtcgatagactgctctgtgaccgtgtaaacaccgggcataaggttatccagttggaatttaccgccgtttgcggttgttacagtctgattgacaccattaccgctgacagtaaactgaatgccgtcaacctttccgtcctcacttgtctttacaatctgacaagagccgtagcttaccttcattttgacaaagccgctgacagggtcgctgacctcctgagcataagtaaccacgtcctgaataccgttgccgttctgatggataccgtcagtccatacaactacacctctgcggacaccgttcttttttgcggctgtgatagtaaattccttgctcggagctttttccattgaaacagtcaatttgtttccgctgacagagaacgaaacgccgtcaatatttgccgagaaattgtaattgccaagcacaccgtttgtatcggtgagagttgcaacatacttgcttccgttccattcaagctcgttcaccttggcagaaccgcttgaccttgtgcagaagctcggtactttggtgtgattctgaacactttttaccatactgttgtagtacgacaagattttactgcggagtgggtgtgcagagcttacacattcaagcacggcattgcaccctccggtagaaacgtgattgaagcctgcgtctctttcgccgacaatagtttcccaaatcaaaatctgagtggcataagcgtgtgcgatacagtttgcgtcgctttcattctgcgacttccagcttgtcgaaatacctccacggtagccgtactgcaagatgcgaccgataagcaggcgaatatcatcgccggaaatcgttccgttcgggctgatgttattaaagaagttctcgtccttttcggtgagagtatctcctgtccgctgtcctgtacccggctcaatacagtaggcgatattgcccgaatacgaacccattgcacgaagtcctgtatatttcgtggacaagcctttccaaccgttcatatagttgagattgccgtgtccccattcgccgttgttattggtatctccgcttcggggataatcgacgaggtacacatcggctttttcgcctacggctgcaaaggctgtcgttgccccaatgcccataaaagcagtaaggctcataaccgccgccaacataagcgagacggctttcttgaattttgttttaaccattgcgttttcctccttgaaatgcaaaaacgcaccgattttactcagtgcgtccgcttaaaattcattttgtttcagcagtaaccgatatagatgttgtactccgtatcggatagcttttctgtccatatccacacagcggtaaaaccctcgctgttcttgtatcggttaagcctgctttcaatatcagagttaataccgcttcggttaggatttgcggatatgggattgtcccaacattctgtcgccgtgctgtcaagagaaagccctatgctcaccgcatactcttttgcgtaacttacataagggctgacatcaaatgtctgcttgggcggctctgtcggtttcggttctgccggcttttcagtcggtttttcaaccggcttttgttcggcagttgtctgttcttttggctgttccgtttgtttttcgggttcagcctgcgtggttgtctgctttggtggctctgcctttggcttttcagttacaggagtttcagccgttttatcttccgccggttttgtctgaacagttgcaaccgtctgactttcagcggttgattggctttcttctgccgtaatcggtgtttcttcctgaactgccgtgctttccggttcttctgccgtatcttcctgagaatttgtttcgttattaccagccggaaaagaagtctctgttttcgttatctcctgtgcagcttctttggctgtgttactggtacaacctacgaggaaaatcatcaggcaggcaagaacacaaggtatcagcctttttttcatatccatcgctcctttctgccttaatcgtaatcaaaaccggtcaaaacatcaaaggtgcgattggtgaactttttatcgtagcagacattttgcttttgctccaaatgtgcgaacccttatatagacagctatatgttattgagatagatatactcaagggagatagagtatatttttcagcaggttaattgccggtatatataggggttagagtgtgagaaagggggaaggctatcggctgtcacggtcggctctgcttcgcagaaacttgttgtaatgctccaatgccttgcacacaaaatcctccgtttggcttatgggaatgttcttcgggataagctgtcgaaccctgtcgcccctcaaaacaattttctccctttggtttggtttttcctccgacataatcgcttggattgcttcggttgtgagcttgccctcctcaaagaactttcgcatacggattgtttggtcgtgggacggggttgcgtcgttcaggtcgatttcatcaaccacatcacgctgactgtcctcatcgagaaaagacaattcaaccgccggtcgcattttaattcgcccctcgtcaacataatccaaaagttcgggaacaaggtttgtaaggcgaatataacgctgaatttgcgtttggctttcgccactttgagttgcaagttcttcccttgaaaaattttgtcccactgggactaaattatctttgctcggtctgcccgcttgccttttcatcgcttccaaacgcattttgtaggcataggctttttcagagggaagtatctgcgacctttgatagttactctcaaccattaaaattgtggcttcgtctcggttcagctcaacaacttcacatcggagcgtatcaaacccggcaagctcacaggctcgctttcgtctgtgtcctgaaatgagttcgtatctgccgtcctctttctgccttaccgtcgccggagtaataacccctcgttccttaatactctcaatgagctgtgccatatcctcgtcatcacgcaccttaaaagggtggtcggggaaatcgtcaatctcagtcaagggaatatctcggattttggaaagcttttcttcatctctctgttcctgcgttgaaaataagtcatcgagcttcgtgagagtgaagtcgctctttcttcctgccatcggctaacacctcctttgtaaattcggtgtacgcctttgacaccgtactgttgggttcgtaggcaaaaatgctcttgcctttggaagaagtctctgcggcttttacggcaatcgggatatatgttcgatacatcttgatttgattaccgaagttttctctcagagcttctaccgtgcttttggcgaggttggtacggctatccaccaaagtgagaagcataccgtcaatctttaagttcggattgatacgcttcttaactcttgaaatggtctgaacaagctgcgtcattccttttgccggtaaatactgagcctgaacaggaataataacgctgtctgccgcagatagagcattgattgttaccattccgagggaaggcatacaatctataaggatatagtcgtatttgtccttcacttcgctgagatagtttctcaatgccgtctctctgctcattgcgttgacaaggttaaactccattgctgaaagctcaaggtttgccggaacaaggtcaacaccttcgtcgtggtgcagaataccgaccgtagggtcattcatcgtttcgtttatgacatctgtgagtttcgttgcaagcgtgatacccaagttgtctgtatcctgccagccgagacaagtggttaagtcgccctgtgggtctgcgtctatgagcaacactttctttccctgcattgcaagaccgacaccgaggtttaccgtagtggtcgtctttccaactccgcctttttgattgcatatggcaatcgttttgcagttcgacactttgtgcgtcctcctttcgtaaaattcatagccatcgcagtatggctatgtacttgaccggctcatttcctaaccggtcgggcaatatttgttctaaacaccccttgccgagcaaaaagctcacgggaagtcactaaggaacagactgctaatctgtatcataggaatttcacctctgccgggtactccgccagctccgtagagaagtatcattatccttctgactgtcatcgccgtaacagagacaacctattacttatgccgggagttctcgctgttctgcaatgcagaagtctcggcgtacccgataaggtggctaaaataatcagaattaaagtcttagtgaatgatttattcagttgtcaaaatacaagtgaaagggctgaccttttcgtggttcggaattaaccccttcactcatttggacaaagggggtcaaaatgcacacccaaaatcacccctttttcaaaaatttcttgaaaaaatttttttagaaacaaaaaaagccgcctatttccctcgtaatagaggtcaatagacggcgggtagaattattcatagtttgttgaataaaacatataatcaaagaccgcttacatcgtgtaggcggtctcttttcatattcagatatatatgattttgagctttcttttcttggctgaaagcaccttgcagagaacatcgtcaacgccgtcggtgtatcttccttgtgctatcaggttgttcttcaaacgcataagtgattgtattactctgctatattcgtcatcattaagatagatatggaacttttcttctctcataatcttttcctccattcattgtattttgctctgattaccgaaacatctgcttcgacatcagaataaataaagatatgtacgcttttgaaaactgcttttactctgtcggcatactccgcttccgtttcggttgtcttaaaagggagctttacaagttttatatttcgctgcttgcatagatggcttttgagaacctccatatgttctgagccgttcgtaaattctatcgccagcttttctgacggaatgtaggtttcaagtggtattcctaatagtttatccgaaccgagctgcacctttaatcctttttgattggcgtaataggcgacagccaagccggggaacacggagcgatattcgttttcgcacacagtgcatttttctccgataattgttctatcgctgatttttgctttccaagagtgtcccagtgaacatttccaccacacacttttcattgactttcttgacacttgtgtcgggagcagagagtttttttcgtaatcccattcagcaagcagtttcctgtccgttgtggctaaatcattgtatcctgcaagaaccgccctgtccgcacaaaccgggcatactgttccttttacacgagcattgataacggacttccactcattgccacaggtcttacacttccaccaaacattgtgtcttgattttgcgtttacctcatcaggcattaggggataatttctttctgaccactcagccgcaaggtcagggtgcgtagtcgccaagtcattaaatcctttgagcaatgtatatccgctacaatacggacatctgctcccaccggaacgggttgaaataagagtgtaccactcgtttccgcaatctttgcatttccaccaagccttactgtttgcaaaggctgttaccattgtaggcagcaacggaagatttctgtcagaccattcagcagcaatatcgggatactgtgaagcaaggtcattgaatccggcaaggactttattatgtgagcagtatggacagcctgtgccgtttaccgttctgcttttaacgcttgcttcccattcgtgtccgtgtttacatttccaaataatcttcttatgagaagcgacagatacctcggtaggctttaatttgttctttttagaccactcctgagccaacaggggcttcaatgtggctaaatcattgataccctctattactctcgctcctgagcatatcgggcatttctcgccctttgaacgagctttgacgctcgtttcccactcgtgtccgcaagcacctttccaccacactcttttatttgaaccgaaggttatcttatccggcgttagcggtaagttcttctctgaccattcaggaataagctccggatgaacgcttgctaaactgcccgtcatagtacaaccaccccttcctttgtgattatcccaattatattgagaaaatcgggattggtgtagtttgcgaataataagaaagaccttgggagaaaatatctctcaaggtcaataagtgattcctcagttagaattttatctttcctgtcgggcaataagagtggttacactataataaatcatcactaaacccgcacttaaaattgccccgccaataatatcagtaatccaatgaacaccggatatcaacctgccaattaccataaaagcagtaaatgcaattaaagcaaaggcaaatgctcttttcatttttgtatttctaattctactgtttagctgcataacagctgtcggcataacacacataacaagcaaggttgtcgatgatggatacgaagcttcaagaaaaccgttaatcaataccgggcggtaattgacaacataaaattcaaaaaacaaatatgccgccattacaacaatatagaatgctcccaacaccaaaatactggaatcgaccttgaataagctttttcttttaataagctgtataagtccaagcaacgcaaatcccaaaataaagcaaagcggtatcagtcctaaccagtccgtaacggtatatattgccatatgcacacctgtcaggctgtggataaagccgttcaaggttgcaaatccaacagaagagttttgtggcccgatgggctgaacatcaataaggcttattgccactgtccacaaaataaataacactaccattgctattcctgaaagcaatactttttgacttttttcttttttcatttttatcaatcctttgccataattatttggctttcgcctgtttacaatataggcggaatgaataaaaatgaaaagaatttcaccgtcacattggcgacacgcttcgtatcatcgccattttatc

SEQ ID NO: 3367 - DNA, 20974 bp, Unknown
  16S sequences of unknown bacteria
ctactacgagtccttgcacttatgcggttgaaccgccgtgtaccggtcggtacgcacggtggtgtgagaggtcggctctctgatttggagagcctcctactcggttttgaatttatttatttcgtgaactgttcgttgatctcgtcgaccacagcctgtgccgcgtcgatatttgcggcatagaaggacgcgaagttgtgatcatcggtcttgcagaggttccatccggtcgagctgatcgtcatcggaagcggaccgcagtagtagcctatatcaaacgaacgattatcgcggatgatatcaagcatcttgaccgagtcatcatcacgtgcgaacttgacagagagcgcgacgtcgtaatatgccgggaggacatccttccagccgtagtaagcgagtgcttcaagaaccgcggaaactctgtctgcgtcagataccgaaaccggaaccacgaaaaggttgcactttgcgtcgacaagagacgggtagccctcgacagtttcgtcatatttcgggcaggggatgattccgaaatcgtccttcatgtcgcgatagctttcggacgataagatatcaacctcggcgaaggtaagctggctgttgcggaatgcgtccgcgaccggcgtagcgtcatcctgcttcagaatgtaaagaccatcctgattcatggcgctgaagaaatgatcaaagacgtcgacagtgcgctcgctgttgagcgtgatcttgaggttgttgtcgctgtccttttcgcacattctgacaccggcggtcgtgaggatattgaccggagtgccccaccatgtggtcgcgaatccgaagtgatcgacgccgaactcatatttttggtcgccgttgaggtcttcggtcgatccggtggcgtattcgatcatcttgtcaaaggtccacttgccgtccttgacgagctgatagggatattcccagccatacttgtcgaacgtagcacggttgaaatagaagcacttcgcgttaccgaagttcgaatagtcgatatctccggtcatcgcgcagagcatattgccgatctggaagctctcagagcagtccttcggccaccactcagcgtcaaggtcgacatacttgaggtcggtgagccagttgagtgccagatcagacatcgcatactggaacgcgaaacgcgcgtggggaagtatgacatcatacgtgtcatctccggcaaggattatgtccttggcgtcgtttgcgtagttgtcggagcagtagagatactcgaagttgacgtcgagaagatcactgaccttctgctgacgtgcccagacggcgtcgttcatcgtgtcgcccgacatttcatcgtcagcgatgaacttgttttccatatcggcgcgtccatagaaggtgaaggtgtagccgtcgtacttgagatcctcagggagcccgagcttcggggtgttgtccgcagtcgtttccgcctcggcgactgtggtatccgcggatgttgtggtgccgtcagttgtgacgtcatcattgccgccgtttccggagtcgctgcaggagattgcgccgcagagaagtgcggcgagaaggaggagggagattgcctttttcattttctgaatacctgattcataatcgcagaccttctgatccgctccgctgcacaggatttttgcggatcatgttttgtgtcttacggatcatgtttgacatgacccgaatttgcgattatattatacatctttattacaattttgtcaactgcaaaatgatataatttttcactggcgtcaaggaaatattattgtataatttttaagtgataattactgcccgcagagatacaaaaccgccccggaactccacagctccggggcggtttcgaaaaaagagagaaaaattaaggaaaactaaggaaaaatggaagattgaactgtgctgtaataatgataccacatttactataaaaagtcaagcaggatcgtgagacaatttccgacaatactgtcactgttcaccgttcttccggtatttattcggcgtcacaccgacctgccgcttgaagaccgagatgaaatgcgagcagtcggaaaatccgcactcatagcacgcctcggtgactgtcgcgcccgcggacagcagttttttcgcgcgcgagatacgcgccgcgctcagatattcgctgaacccgatgcccatatagcgcttgaagacgcgcgagatataggacggcgagactccgaagttccgcgcggtcgcctcgactgtcggcgggaaggcgagattctcgtcaagcgaggctatcagattatcgatcatcggcgggagtgcggacttttccgcaaagcgattgccacgtatcgctccgccgactgtcgagagcagaccgagtaaaagcgcataagccgccgttccggactccgcgttctcatcgtgcagtctgtcgattgtccggaaagcgtacatgacctcctgccgctcgtttggttcgagccggagaagaccgccttttgtccgaccgcctgtgaccgggtcgatgaaccaggacggggaaagctgatcttttccgagatgctgaaagcagctcggcgatagcttgatgaaaaagcgttcatacgtctcatcgccttttatgagcggtcggtgcagctcattcggcagtacgagtacaaggtcgccgcgctcgaggtcatagacccgcccgtcgatgtagtatcccacgtctccggagatgaacagataaagctcggcgaagtcatggaagtgcggattgtgcccctcgattttcgcttcacttgatatgtggctgaaaagtatgggcgaactgtcaaagatgtttatgttgtactctttataatatgtatacatggttcataaatacctattttgcgtaaaaaatctgctattaatacgtgtgcatttctgatataatattgatgcaatgaaacaaatgaaacactgatttaaggttgttttctcggaaaaaagcccataaatccaagccttttttccgagaaaacccgatttattcagtatatcccaaaagataatttggaggcggatcatgaaacaaaaacgcattatttgcgctcttctcgctttactgatattcgcggcgtcctgcggatctcagggaagcgctccgggcggcgacacgacgtcaaccggcgacaccacgacggctgagacgacaaaaccggggatcatttcgaagctcacacccgagctgaaagatgaactcggacttgacggatatgagttcaacatattccttcgcgcggaggggacgacctggtcgctcaaggacgtggtctcggacggggagaccggcgatatactcaacgacgctgtcttcaggcggaacagctggctcgaggacaactacggcttcaagctcgcggtaggctattcggctgacgcgtcatccagtgagctcacgacatatatactcgccggagacgacagttacgacgcgttcttcccgatgggcagaacggctggcgcggcggcttcacaggggcttttgcagaacctcaaggagctgaaatacattgatctcgaaaatgactgctggaatcagatgttctccgacgcgcttgagatcgacggaaagctcttctacgcgaccggcgcgatcacgactatctcatacgacgcggtcagactcttcatgttcaacaagacgctgctcggaaaatatatgctcgaagacccgtacacgctcgtgcgggagggcaagtggacattcgacaagatgaacgagatggcgtcaaaagcctcggctgatctgaacggcgactcccagatgacagcggaagaccagtacggactcggctggcagagctcggtcggagctcagcccttcatattcggcgcgggtgagaaggtctccaagatggacaaggacggtctgccgaggttcaaccttgattccgagcgctttgccgatatctacaccaagatccgtgacaccatcgcaaatcacgatgtctattattccggcgctgacgaggacgtcctcaagatgttctatgaggagcgttcgctcttcttcaccgaggttctgaactgcgctaagaagctccgtccctatgaggttgatttcggactccttccgctcgcaaagtgggatgaggatcaggaagaatatatccagtatgtcgacgcatggtgtctgagcccggtcgtcgtcgcgaagaacaacacaaatccagaccgcaccggcttcatcatccaggcgctcgccgaggcgtcaaaggattatctcgtccagccgtactatgagaccgttctcaacggcaaggttctgcgcgacgaggagtcgtccgagatgctcgacatagtcgtcaacaatttcgtgcttgacaactgcgatatctatcagtggggcggaatactcaccgtgctcagcgacggcatcgcgaacggaagcgatctctcgagtatcatagccgcgaacaaagcgcctatcgagactgcaattgagaaaactatcgagaatatccgcggctgattcaattataccacaaaagctctgaaaaagcaagcagaacgcgaaaaaccgttccggaactccgggatggttttttgtattccggaaacagcctcagattgtcgttcatttcagtcatgtcatattataacatatattgcgcgaaaagccgaaaattttcgcgtttcgtcacagtaacggcttttataattgacaactggcgggaaatgtgatataatacgcgtatgagaatcagcagtcctcgaaaatgagctctgaacattgcttgtccggataccggaactccgtataccgaaaaaatccgtccgatttttctctccggtgctgtacaaaccggggaaaatatggtataatataagaaaccacttaagaaaggacgatataccatgccggagatcccgcaaatctcagtcggagacatactcgaaatgaagaaaaaccatccgtgctcgccgaagagcacacgcttcagggttttacgggtcggcagcgacatacgaatcgtctgcgaagcctgcgggcgtgacctcactataccgcgtataaagcttgaaaagaacatcaggaaaatcatccaccagtgtgaagccgacgaatgagcaagggaacttttcgccgcgctccgcgtcttatcgtcaaggaatataacgcagaatggcgaatccgccgctctgcccgaaagattttcacagtatagtttcccgcgaccggagagagatgcgatttctgaccttctgtgtccgtgagtccgagataaacggcgcgatctccgatctgttcgcgaagtatcccgtgccgtatgtcgtccggtttgaccgtgaggacgccgggcggtatgtctcactgtttcgggagctgtgcggcgtcatagacgatgagagcaccgcgcaggacagggatatttcgcgtatgctcgttatgagcgtgatagagcacatgatacttttcgcggcggcggggggaatcacgagcggcgacatttcgcgggagaatccgacggcgtcctcggacgacgagcggctccggagccttcatatgcttctctcgtatatcgaggaaaatttgtcgcgcgaaatccgccgtgacgagctcgcggaatatatgcacttttccccgaattacctgagttcgtttttcagaaaggctctcggaatgccgatgtcgcggtatatctccgacctgcggctcgaccgcgccgcgaagctgctcgggggcacggaggagccggtgaactttataatggactcggttggctacagatcccgttcgctgttctatcgcgatttcacggaaaaattcgggatggcgccgggagaatacagaaaagcggcggtcgcgccgcgggaataaaaccatattttgaggtggagaaatggtatataccaagcattacatatcgcctctcggcggcattctgctttccgcggacgagatcggactgaccggtctgtggtttgacggtgagaaatattacgcggagcatcttccggaggaacatatcgaggcggacactcctgtgctttccgaggctgtccgctggctcgatatctattttgacggcagagagccggacttcaccccgccgctccacactatcggctcggagttccggcaggaggtatggagaattcttcttgagatcccatacggagcgacaaccacatatggcgatatcgcgaaaaagatcgcggaaaagaacgggcttcggaaaatgtccgctcaggcggttggcggggctgtcgggcacaatgagatctcaattatcatcccgtgccatcgcgtcgtcgggactaacggaagcctgaccggatacgccggagggatagacaagaagacacgtctgctggagattgaacacgccgatatgacgaagctcttcgtgcccaaaaaaggaacggcgttatgatatgtgctttcatgacggtaaacgaagcgaatgaggcttattggatatcagacagtgaataatactgaattaactaactgaaaaacgcaaaaatgagcttctcgggaacggtgcgtggcttttcggtatcggagacatgaccggtgtcaggaactgcgcgtactcaaaatgcgtctcggtcgcgatacccttgccgaagcatcttatccgggatctgtaaaccgctgcggccggagaatataacgatacatatttcgcgttgaaccggaagctgaatgagtttgttctgcttggagagcggacgctgcgtgacgctggatatgacgcgtacgcgcagaacacggacagggtagtcgtcgatgaatcccacagatcgcttattccgcacaaaacggctgcggtccgcgcgggggtgtgttcgtcaatgccctgctcacgcgatcacgggagcaacgtggagcaccagtatgccgcgcgaagagatcgtagacgttgaggcttgcttataaaaagcaaaaagaaataatgtacgcgagcaccgggatcgacaccgacctgtgcggcaagtgcttcgccgtttgtgcgtatacgcagagatatttgtgttcgggatatcactcgaggtcggaatttcaccggaatgcgatttttttgagaaaatttaaaaaaccccttgacaaacctccccacatatgatataatataaaagtaatcgaccaatggagaagtcgcctagttggtcgagggcgcacgactggaaatcgtgtaggccttaaaagggtctccagagttcgaatctctgcttctccgccaagcacctgatttttatcgggtgcttttttctgttttctgctatcctcaatcctcagataataattcaacaaccgtcacgcgaagcatggcgttttttgtttcacattctcatgccgatttcaaaagtgcaataaatcggattcatatggcgattgaaaaaattccccgacggtgatataatttataatgacatccggatagacacggcgggacgccgcctttcagggaggatatcatatcttatggaaacgataaacgtaaccgtatggaacgaatacatccatgagcgctccggcagggtcgccgaaatataccccggcggaatccacggcgccatagccgaaatgctcggacgcgacaaaaaatacaacatccgcaccgcgaccctcgatatgccggaaaacggtctgccgaaggaagtccttgacaacaccgacgttctcatctggtggggacactgcgcgcacgacaaagtatccgacgaggtcgccataagggtgaagaaccgcgtgcttgacggcatgggactgatcgtcctgcattccgggcatctgtcaaagccgttcgtcatgctcatgggcacagtctgccgctccaaatggcgtgagaacgacgaaaaggaacgcatctggataatagaaccgtcccacccgatcgcaaagggtctgcccaaatacatcgagctcgaaaaggaagaaacctacggcgagcgcttcgagataccgaagccggacgacctcatcttcataagctggttctccggcggagaggttttcaggagcggctgctgctataaccgcggactcggaaagatattctatttccgccccggacacgaggaatacccgacattctggcgggaggacatctcgcgtatcataaagaacgccgtcgactgggcggctccgaacggcggtccgagaccgaccctcgggcacttcgacgcgctcgagaatgttccggacaaattcgccgggaagaacgacgccgagagaaagcacaaagatcccggaaaactcgcggacggtatcgtctgacaaaaatcacggcatataacgccgtaacgaaaggacatggatatcatggaagaaaacaagaagctgagaatcggcatcataggcatgggtcgtatctcatgggcacacaccggcggtctctccggctgcccggacgccgtcatcaccgccgtttgcgacatcaaccctgacgctctgaattccgcgggtgaccggctgaacatcccggcggagcgcaggttcaccgattatcatgatctcatcgcctgcccggaggtcgacgcagttgagatctgcacgccgaactaccttcatgttccgatggcgaccgacgtcatacgcgccggaaagccggtcaacatcgaaaagccgctcggtgccacatacgagggcataccggagctgctcgaagcgtacaaagagaacccgcagccgaacatgatgtgcttttcctaccgcttcatgccggcggtcaggtacgcgaaaaagctgctcgacgagaaacagctcggaaatatcgtctcggtcgacgtcgaatacctccagtccggcgcgttcatagagggaaggcggctcgagtggagattcgacaagaagaaggcgggcaccggagctatcggcgaccttggcgttcacttgatagacatgacaagatatctgctcggcgatataaccgccgtctgcgcctgcaagaagacggtcgtcaaggaaagaaagctgctcgacagcgaagaatacggcgaggtgaagacggacgatttctgcaccttcatcgctgatctcgagtgcggagcggcggcgtccttcacggtgacacgctgcgcgcgcggacactcgaacacgataaagtacgatatctacggcacggacggcgtcatctccttcaacctcaacaacccgaaggaaatatacctctgcataggcgacgaagtgaagacagtcggtctgcacaaggtcgacgttccgccggaatacgccgcgtcgcaggaggggagcttcgtcgacatagcactcggacgcttcagggagaagcccgccgacatattcgagggcgcgaagtgtcagaaggttgtcgacgcgatagacctctccggcgacaggcgcgaatgggtcacgatagaatattgaaaccgctgatgacttacggagactaccggaatcaatgaaactatttgacaaaaacggaatagatatgtgcgaggggccgctcttcgggaagataatcctcttctcggtgccgctcatgctgacaaatatactacagcttctctacaacgcggcggacatcgtcgtcatcggggctttccgcgggacgatacaggtggcggcggtcggggcgacatcctcgttcatcgcgctgattgtcaacgtgttcatggggctgtcggtcggcgtcagcgtcgccgtcggaaaatacataggtcaggggcggcgtgacgacatcagggagacggttcagacgacagcgggtctctcgctcgtctgcggccttctcgcaatggctgtcggtatgctgctgtcaagaccgatgctggtgcttatgaagacgccggaggatgttcttccgttcgcgctcgtgtatctccggatatatctcctcggctcgccggcgaacctcgcgtacaacttcctcgcggcggtactgcgcgcaaagggggacaccacgagacctttcctgatactgagcaccgccgggctcgtgaacgtcattctgaacgtgatctgcgttgctcttatcggtatggacgccgagggagtggcgatcgcgactgtcgtctcgcagtacctctcggcggtcctgataataatctgcatggtgaggagcaccgacgactgccggctcgagctccggaagatatgcctgaggcgtgacaaggtcgcggagatcacacgaatgggtctgccgtccggtatacagggctctgtcttctcgctctcgacgatggttatacagtcggcgataaactcgttcggcgcggcggtcatcgcgggcaacaccgcggcgggaagcgtcgacagcttctcatacgccattcacaacgcgttccactacacatcgacatcgtttgtcgcgcaaaacagcggcgcggaaaagtatgacagggtgtcaaaatccgtccgcgtctgtttcttctccgcgatagtcgcggcgatagtatccggaacggcgatatacctcgcggcacacccgcttctgtcgctctacctccgcggggatgaggaggctattgcctgtgggactgtccggctgaaatatatctgcctgctctatttcctgctcgccatgatggacgtcatgagcggctcgctgcgcgggcttggctgcgcgctcgttccgaccgtgatatcgctgatcggctcctgcggactccgcgtactctggatatatacggcgttccgcgcgaacccgacgctcgatatgctctacctcgcctacccgataacatggggagcgaccttcgccgcgctcgcggtcgcgtatttcatcatcaggcggaaacgggaaaaggaatccgcggcaaaggaataaaaacgtgttcctgcggcacgatgtgtcggcaggaacactgcttataaaaagaccgccgcgcgtgcgcggcagtctcatggatttatttgttcatagtctcaacgaacttcgcgatttcggtctttgtcttctcttcgatcttagcgtaagcggacgtgaagtcggcgccctgctttatcgccttttcgagtacgctcgcggagccgccgaagtcgaacacgccgttgaggtcgtagacgacgttgtcatagatgaggtcgagcatcagctcggcgtcgctgtcgcggagcaccttctgcttaagggtcatatcatactgtgccggacggacgagctcgtatgactttctcgccatagcctccatcacatacgccgtcgtatccttgtcggcgcatgtgaccggaaccgccacgcctatcatgcaccacgggtttgagtaggaatagtagctctcctgcgcctcgtcaaacttcgggcagggaatgatgccgtagtcgtcctccatctcacggaatgtggctatcatgttcgacatcgtgtgggtgttgaatatcgcgcggccctgaacgaatatcttgttgtcaaacccggtctcgatcgactcgccgttgaagcagttctccttgtcgccgaatatcacgcggagcttcgagattatgtcgagcgtccgctccgagttcatattgacgaccgggagaccgtcgctgtcatactcgcttgtcttaattcccgccgcgactgggaatccgacgccgaccatgttgtcgaacgccagaccgagctggtcatcttttccgatcttgttgtctccgtcgagatccttcgcggtgtttttcagaagagacgcgaatttatcgattgtccactcgccgttctcgacgagcttttcgatctccggcatctgataggcttccgcgagcctcttgttgtacgccatcgcgtacggcgaaaaatagaactgcggagttatcggtcccgccgtgaagtagaggctgtcgcggatatgcagattgtccgccgcgcccttgcaccaccatacgtcctcaagtgacaggtacggaagcgtgttcaggtcgctgagaagccccgagagggtcatgttctgcatcatggtgcgcatcgtgccgatcacgaagtcaaactcgcagtcgttcgcgagaacctgctgcgtgatggatttctcaagctcctgatcaaggaagaactcgaggttcacgttgtaggtgtcgcgcacatacttgtcgcgcttgatgagggcgtcgttcacgagctcgccgttctcctcgtccttcgcgaaggtctgtctcgcgtcgtttgcctgtcctgccgctcttattgtgatgccgccgaggtccttcacctcgagggtgtccgggtcggctgtagtttcttccgcagtcgtcgtggcggtgccgtcctccgtcacattatccccgttcccgccgcaggaagtcacaaatgccgaaaaagcgagcagtgccgcgagaagcgcagccatcctgcggacacgtccgcgcgggtcaatgccattttccgatatgattatattgttcatggtatcctccgatcattattaataatttatataataattataccatgccgcgcggaactattcaatctacattcagacaatttcaattgtacttttggaatcttgacaaaagcgcgaaagagatgtataatagattatgacgattctgtcaccgcggcggaaaatggcaggataccgctgtcaagccgtttttcagataagcggtctgataacgccgctctgtctgccgctctgtggatatgagatcacttatcccaaacgacgcggaacgattgcactttccgcgcctgattatcctgaaaagagggagaacgcccggacgaacatacgggcgatccgaatgccatgaagactatatccttccacgaattatacacgcttgacttcgagctgtccgacctgttcggtcagaagcagaaatggataaagggcgtccttttcaggatggatcacccgcgccactcgagcgcggtcatctacctgaacggatgccacggcaaatataccaacaagcgcggagagctgattgacgctccgtgcaagagccttgtgtaccttccgtacgggagcgagtacacggttctgaatttcgattgcggttcgcagcagccggacgcgtaccttgtcgagttcaacgtcatctgcgacggcgagaaggcggcgttctccgattcgccgttcgtaatagagaacgtgaactcgtatctcgcggcggagatgctacgtgaggcggtcgaggcatacgaggcgtccgtgcagtcccccgccgccgtcaaggcagccgtctacaaggttcttgcgttcctcggaaaggagacgctgagcgcgtacaaccggaaattccagtctatagcgcccgggattcagatgctcgaggagaacgttctcgggagcatgtcgataaagaagatagccgccgcctgcggggtgagctgcggatgcttcaataagctcttccgtcagtactccggtcagagcccgctgcaatacaggatagagctcaagatgaacatggcgaagaatatgctgagcgacagttcggtgccgatctgcgacgtctcggaggcgctcggtttcacgaactgcgcgtatttctgccgcttcttcaagaagaagaccggcatgacgccgagcgagtacagacagaacagatactgattttccataattgtcggttattgtcgcacggttatgcttgactttttacggaaagtgtggtatcattattacagcacagttcaatatttctttcttactttctttccttttcctttttctttcttttccggaaccgccccggggcttctgaagctccggggcggtttcgtatgattggtgctatgttcatggcctgcgggaagaatctttaccgtacgcccggtttccatgagggaaaacaacagacggttgagaccagataaaaatcctttccgtcggtgaaaaaacggaaaggactgaatataggatttattccgcgttttcggtcagatacgtcacaacgtcgttatagtacttctcgacagccgcctcatcctttgcgatcttcgaggagatcgaagaggaatcaaggacgagagccgggagcttcataacccatccgttgaaaccgtcatagaggtacgcgaagtcgataacgcgcgagtcgagtatcttccggagcatcgctatcgactcctcgtcacgcgtgcccttctgctcgagagccatgccgcagtaggtcgggatgacgtctctgtagcttagcgccgacatcgactcgactatggcgccgactatctcacgctgtttctcgttcgtcgttatcggtacgaacatgatgttcgctccgccgtcgacgaccgtgtaatactccttctgagtctcatcgtatttcggaagcgggaggacgccgtattcgcttttcaggctgcgcatctcctcgacgacgaggtcgctgacctgaagcggcgcgaagagaacggtcccatccacgaagagcttcgtgcgctggtcggttgcagtcgcgatgttgtcagtcttccttatcgagccgtcgttctcgttgaagagcttcgcaagcttcgtgaggacgtcgaccgacttctcggacgaaatctcgctcctgacgctaaggtcattaccgacattcgcgagcctgacattgttcgcgtaatagaacgccgcgagctggcatccgtcctgattcgcgccgatgccatagaagtcgtctttgtcgcgctgaccgtcgccgttcaggtcgttgtacattccggtgactatcgtgttcagtttgtcaaccgtccacttgccgtcgtcgacgagagaatataggttttcgacgccgtattcatccgcttttgtcttgttgtacgccatcagccatgtctgctcggtgtacataacgcagaggtcgctctcgatgagaaggagattacctccgacggacgcttcctgaatcgatttcgtataccacggcttttcaaaatcgacatatgggattgtgttccagtcgacatacccgccgttcatcgccgatttcgccgagttgaacatctgcccgaagacgaggtcgaactcgtcggtgccgctcatgacagagttcgacacggttttgtcaagcacgtcatatgcctgttttaccgtttcggcgaacttcactccgaagcgctcctcggttgccgtgttgcgcttgtatatcgcgtcgttcatgtattcgccggtctcttcctcggagaagaagctgtttctggttgaatcctgttctatcgtgcggaactcatatccgtcgaaattcagttcggggacagagtcggcgtactttgtggtttcaggttctgaatcggtggtctgctgatcggtcacttccggctctgtggttccgccacacgacgcgaggagtgataccaaaagaaatatagaaataatgctgtgtctgcgtttcatggatataaccctttcatttttgattgatactattatatcacgttatttcgggcaataccatgatttctgttgcgaaaaacattgcttatgtgatattgtccttgacataatgtcggagacgtgatataataatcccggaaaggggatgaacagatgaagaaagcggcggtcagaaacatatcggaagacctggttatttctgtgacgaacacctacactccggtgaagaaccggtcacactacccgcattcgcacgattttctcgagctgtatattcatatttccggtgaagccgagtacatggtggagaacatgatatggcctatagattatggttcggttgtgataacgcgtgagaacgagctgcactgcataaggatgactgagaatgatgttctccagaatgtctattgcggttttgaacgcgggctgtttgaaaattttgctccggaacttctttcctgttttgatgatcgtgcgcttggtcagaggtgtgtgatatcgctcccgcacgatatggcggaccggtgtgtggagaagctctttgaagccggtcgggctatggacgacatgacgccgttaggtatatgcgaggggcgcgcggaatttatgtccgtgctcgcggaggtgaaccgtgtctgggagaacgagggtgttttcaacacgacaggcggcgttcgctataacgcgggttcgatgctcgcagggagagcgctcgcgcttatcaataagcattgtgccgagataaggacggtggatgatctcgcggcacgtctctatgtctcgcgtgagcatctatcaaggtgtttttcggccgaactcggagtgccggtgagccgttacatgatgacgaccagggtatcgttttccgcgttgtgtctgagacagggcgccggacttgacgaggtctgcgctaagtgtgggtggaacgattactcgtattttataaaagttttccgccgtgagatcgggatgacaccagcgaagtaccgtgagaagtattccgtgaaacggtgaaatctatattgtcggttattgtcgcgcggttattcttgactttttatgtaaaatatggtatcattattacagcacggttcaaattttctttcttacttactttcctttttcttttccggaatcgccccggggcttctgaagctccggggcggtttcgtatgttctcgggtatggaatggtttctgttcttgcgcttaagcttgattctgaggtagagaaaaacgcaggaaaacctgcgtttttcggggtgcatcttttttgtacacggtagggctacagtggacgggaaagatgcaggatatcaccataaccaactttttttaaatttcactccaaagaactccctcgcctcgttcagattcatgattatgctgtcgcgggatttagcagcctcaagattctcgggaagctcctttattatacgatccgcttcgtatgtagctcccgcgtcataccgcagctcattccgatgctcatcgatgacaaaggttttcgggcttgtgcgccatgcgttctgaattgtttttatggcgtattttcctgtgactttttcactgaaatagttttcgagagtcagatgcctgacatacgctgggatttccgaatgctccgcgattatgtcatatatgacgtctgaggattccttcagtatatccggagatctgtcggaatcgtcagatttcaattgctcgacaagattcggaactatctcaagcatacgtcttagatattcacggtagaacgccgttccgatctctttctgaactgatctgaccacattgtttgtcatgacctcagtgttagtaagtcccgcctcgacgcggcatatgaccgtcctgcgtattatctccggggaaacagccttcacatcctcattcgcgcttatcactacggcgggataatgtataagatgctcacttattccgaaatcctctgtcttgatcgtctctatagcgtgctgattgaaacgcgtgttgaccatatcgtcgactattatcggacaaccctcgaccttatgctttagtccctcgatgcttgatcttgtgaattcctgcgccgggatcttcggcttctgacctatcatcattttcagcagagtctcaagaaagctcgtctttcccgccttgctctgtccataaatcagaccgaaaaccggatatggcagtcggttctgatcgaatcttgccgccatatcacgcatttttgccatgaacggcgagcagaagaaccagttcgcaaactcgaaatacctttgctgcatatcagtgaagtttccgtggaattggctataaccatccatgtatctgataaaaagcctcacatcgcgtgcgacttcattctcaggcggattaaggtcgagcaagctgtcattcagagtaacttttgctgtgtcagtgtcgattacaagccgcggatacacgctctcctgctccttcttttttatctcgtcatcacgcaactggcgtctgagttttgtgatcatgtcggatgacacgagaatacgaccggtcttacggtcggctttcggcatcaaaggagtcagtctgttcgcgagattccgcgtgtcaagcgaaaactcaacattttcatcgttatcgcgatccggaacaatttcgacgaccttatttacttttatcgtctgcgaaatcggaagctcatctatgttttctgaaatatccgcaatatctatagccttatgagttatctcatccgatgattcactcttcagtctgctgaacgactcaaaataccaatcatacgcgcgctcgccgtcgatacagcagatattctcccgctgtgtgccggagaaggcgttatatgacatattcgcagagcctgtgatgacacgtttcctgccgtcccttgacgagagaagatacatcttttcgtgagagatttttcctcgcgacacatagaatcttacctcacccgaatcgatgcgggcgagaatcgcctgctttttatcagataattcatcgcgcatacgttcgataagcctgttctgatatgccattatttcctggacagtgtttgacatcacgtcttcacagccgaatatgacctcggctgtctcaaacatatcgagcagtttatacatgaatccgacgcccgacgaaaaggttatcgcgcaaattgagtcgaagccggaaaaaagctctgtccagctcattgatacagccgattcgaatgtcagattcacgacgtcgatcttcgggctggcatcagcggtgacttcctccaagacgctgtcaaatattgaaaatgtgttgttgttttcttttttcatccgtaaatctccattatgtgagaagtggcttactcatattctaacacgccgctcatataccctaagaatgtatcgtatcctgtcgtccattgataaatattgtctctgatttttctcagctcatagcgttctgtcttatatttaacaatgaaaacggatttttctgtagttcgcaccgttccccatgaccctgctcaacagccgcgagaacggtattgtcatcatcaataaccttgaattacctgtcaatggtctcaaacggtatatcgttctttattttaacacaagtgtcgcatttttgattttgaacgaaatatagtcgttgccggttttggtcgctataaatcaacgtcaactgtaacacggctgtcaaaatccgtaagagaatagataaataagccgccgcatactgtgcgctcgcggtcatatacaggaagttcgacaccattgaatactctggttgtttcaccaactttccgcacgcaaaattaaaattctacgtgcggtttttgcgaatgtctgataatattatatcgcatttcctgcacattgtcaagggcttagcgtgatttcttcacgcagtcggtcggtgattgcgaatattccgcaaatccgcgtgtttattcttacacctgttcctccaccacatacccgccctcgaatacaacctcaactttcccaccgtcaaataccttaacgcactcaaccatctgccgcacaaccgtttccgcgaaatcataatactcagttatcatacatttcattttcgcgagctgtttctcaatgaactccatctgccctctcgcgttgacatcctgcccggcggctttccggatcgcgctgatacgttcgttgagtctggatatctcatctgagatatttttgaactcatcctcccgtgactcaatgtcctcgccgttctcaacgctttcattgacaatttcaagcatcttcttgttaagagcctcgacgcgccggagcagcagatcttcttcctctttcgcgccgttaagtttgagcgcgccgcataaagtggctttcatgagcgtcagataggtattggcgtcctcctcattgaatctgtttataaccctgacgatcgccgcctttatatcgctatcttcaattttctgaataatgtttcttgcagcagcccatggtttgaggagactctgaagcgaaggaagactggtaattctgttgtcagcaatacactggcaatcttgagattaccagatgcagtgcctggttcggacgtgatcgtttccgcggtggtctcaggtatatctgaagattcggtcgattccgggacggttgtatcattggcagttgtgtctttgattgtagtttcgtcggttgtggaatcgttgattgtggaatcgatgtgaactgtcccttcggtatcatcagacgaaagttctgtttctcttcgcccgcatgatgaggagataaacaaagccagaattgtcaggacagcgatgattaacttcttcattcgcgtggttttctctctgtcaggttcaaaaatcgatatttcaacgccggaggcggtcatgggatcatccagtctgaaatatcctccgatattgtggcttgaaacccggtaatcacattctcttcaatatcgaacgaatattgccccgatatccggtcgtgaaaaaacgggtgcgagaacgcgaatctgaattccgcctgattttccgaaaagccggtgaactcgataacgtatctgaaataatcatcgacgttctccttcccggtctcagcggcagcgagcgctctgatatcacgctcttccgggagctcgagcagcacagaaccctgaatatcgataatatcgacgtcgcgggaatatccgcaaataccatgcgatatcacggcgtatccgcgctgagcgtcccatgtgacgtcaatattgcggtacatctttttgccttcatacaatacctttccggtctcggcgtcggatatcacgatgaggctataatctgtcagctctgccggggtatttgtgttttcatcgaacgcgcgcaggatatatttgccgtccggtgatgagaatgttttatcctgatcgttcggagctatagcgaacgccgccatcacggcgacaaaccaccggtcgttcgacgactccatgtcattgtgctcaggtttcgtgcccgcgcaggaggaaatgctcagcgcaagcagtatgataagtgaaataagcagtgttttcatattcattcccgataaaatctgatttccgttcgcgctcagacggtgtgtcgccgcaaccgtaatacggctgactgcgcttatacgcacattataacactgatcatgtatacttgtcaattactccagatgtaaattttttcgcgaactccgatagtgtatagttctacatataataacgaaattgaccgcccgaatactacaataattcaaaatattttt

SEQ ID NO: 3368 - DNA, 32759 bp, Unknown
  16S sequences of unknown bacteria
cagaaggcgccgtcccctattccgcggtatgcggatcccgatgaaatatgcgagcagatcaccgtggaggaaataaagacaaagaccgcttacatgataaagactgcgaaaatggcaaaagacgcgggatttgacggggtagaggtgcacgccatgcactggggctatctcctcgatcagttcgctatggagatctgcaacttccgggaggacgcgtatggcggctcccttgagaatcgtctgcgtgtccacagagaaatcgtggaagggatcaaggcggagtgcggcagtgattttcctgtcgctatccgcatgggaatgaaatcttatataaaaggttttcacagaccgtcgcttttcggcgatgaagaggcaggaaggacgatagaggaagcgtgcgagattgcgaagcttctcgaatcttacggctacgatatgctcgactgcaactccgggatttatgattcgttttactacgccgtggctcccgcatatatggaaaaaggatataatataaagctcgctgaggaaataaagaaaaacgtcagcattcccgtgtttgtagcgggcaagatgaatgatccggatctgtgtgaagcagcgatacgcgacggaaaaattgacggtgtagcgctgggcagggcaggtctcgccgagagtgcgtatccgcagatgctgatgcgggggcgtcctgataagattcacccgtgtatcgcgtgcggcaattgtatgtcgtcgtcattttcaaaggtttccgccacatgtgccgtaaaccctgtagggatgcgtccgggtcagtatcctctgaccgccgcggtcagagaaaagagagtcctcgtagtaggaggcggagcaggcggtatggaggctgctcggacagccgctgtgcgcggccacagcgtcactctgacggagcggtccgataaactcggaggcagactttatgacgccggacgccacgcatttaaacaggatatccgcgcactgaccgcctggtatgagcaggagctgagagatctcggcgtcgatgtgaggacggggatggaaatgacgcctgagagtataaaggaattcggagccgacgctgtgatttgctgcaccggagccgacgccgtcatgccgggcagtatcccgggcatcgacagcgaaaaggctgtttcatgcacggatgtaatcgacggaattagaaaagtggggcataaagtcgcaattgtaggggccggtctcgtaggcgcagagatggcatacgacatggcaaaggaggaaaaacgggaagtcgtgctgattgacggtctgaatgatattctttcgaacgatccggaaggcgtgccgtttcagacgcgctggatgctgaacgagctgctcgaattaaacggtgtaaaaaagtatatgagtcaccggctcaaggaaataaatgacaaaggctgcctcctcgaaaacagcgaaggggagactgtcgagatcgaggctgacgatgtaatcatcgctgtgggatttcgcggaagaaagtcgatgcgtgaatctctgtacggcatcgacagcgaggtatatgagattagagccgcaaacggtatcggcagtatagcaagtcaggtcaatgccgcctatgaaatagcaagaaatctctgagatctgtcctattgaagcgtttcggctccggttttggaaccgggatgcttcgtctgagaaaatcattttggaggccggatttcagagagcaaagggagatgaccgtttttacagtgtatgccggcgctgaaaaaggttctggtatacgacatccgcaaaatgatatgatgtcttctccaatatgaaagttccccctgctatacagcagggggaactgcttatcaaccatcctcgtttcgaagatcagagatttgtctgtgaaatcttcaaaatcggaaattcggattctgacagcaggtattgcgcttccggcatatatctgctgtctatttttatactgtatccgcagctgctgtttctgccggcaaaggttctggtgatttcagaacggatttgccgggctgcgagaagatcgtgcgccatggcggctgtcgtgtaagttggcagagaaatgagtgtgtgcggcatagcgattcatcctttcaaaaatatttctgtatcattttcacgtttgggccgggataaaacccgttctttcctgttatttcagcatcatttcggcgcttcttatcatgagcagtttcagacctgcggcacctacgtcggaggatgcggtcagcggatattccgcgagaacctcgtcattttttgagacttccaaaacgccggctttgtcattttcactgacgggggctttcaggtctttggaaggccggatccgacagctgacagcagaggcttctcccttttttacgagcagggatattttttcttccgtcttcagatctacggcatttatgacgcctttttccacgctggcggtgcctacgatttcatttttatcagcgatcttgacacactcatagccggcgaatccgtaatcgagaagacgggagctctcctcgaagcgcagttttgacgtctccgctccgaggacgacggcgatcagtgtcagatcgtctctttccgcgcaggaagacaggcagtatcctgcgtcctgagtaaagcccgtttttattcccttcgctccattatatgtttttagaagcttattggtgttgatcatttcgatcgtggaagtatgcccttcttttcccacttcgatcgtgccgctttcgctgctgagataggagaggattccctcgtgtgacaggagttcttttgacattacggcgatatcccgggcgctgctgtaatgatcatctgcaggcaggccgttggtatttgcgaaatgcgtattttcgaggccgagttctttcgctttttcattcattttctctacgaagatgtcatcggttccgcagatgtattccgccatggccacgcaggcgtcgttggccgaaaccatggatattccggtgagaagttcgcttaccgtatgagtttcgcctggttccatatacagctggctgccgcccatgctggcggaacgttcgctgatggtcactttatcgtccagagagatttttcctgaatccacggcttccatgatgagcagcatcgtcatgacttttgtgacgctggccgggggaagtttttcatcggcgttattctcaaagagaaccgttccgctgtccgcatcgatgaggactgcggaacgggcggtaatagatggctgcgcgcttgcagcggacgagtcgtccgactctttttccacagccgctgcatacgaggaagcggctccagcgataaagagaacgagacaaagcagcggtacaaatattttcgaatgatacactttcttttcctccgttttattaaaagagaacaatacgacgaccgtccgaaccgaccgcggacggaaaaatcgaagaggcgatccaaaatgccggtgcgcctgtaaagatcttcgctgttcggcggatatgaaatccggggcaaagggctgttgtccgatatgaaaattatattttcagcgggacacaaatatgacagccgctgtcacatgatatggtaaagaaagacggtgaagatagattgtccaaccatcacagaatacaatagtgattgaaaacaggaaggaaagtgattataatttatagataacggataatgttcatgggatgaaggagaacgtatggaacgcgattttgaaagatactggtatcgggatatcagacagatcgattcgctgaagcagatgttgacggagagtgcggagctttttgctgaccggccggcattctgggtgaaacgtgaaaaaggacagccgtatgaggcgataagttatcagcttttaaaacacgatgtggaatcgttgggaacgatgctgatagatatgggtctggccggacggcgcatcgctgtcatggggcagggctgctacgagtggatcgtctcttatctggcggtagtctgcggtgcgggtatcgtcgtacctgtcgataaggatctctctgccccggagattgaaaatctgatgaagacggcggaatgcgacacgattttctgtacgagaggcgagtgcgaaaaactgaaaagatcagacgtcatccgaaatctcatcgtcatggaattttacggagaccggacgtccgctgaagaattgccgcaggcggtgccggtgccgttaaaaagagaagagatggccggagattccgaaatatactgctggagggagcttctcgcagagggagaaaagcgtctcagggagggcagcagcagttacacgtcgagagaggtggatcccgaagctctgacggtgattcttttcacctccggaacgacgggcaatcccaaaggcgtcatgctcaatcacagaaatattacatcgaatatcatggatgtgtgcagaatcgcccatattctcgaatccgacaaaacattgtcgattctgccgattcaccatacttatgaatgcactttgggaatgcttctcgtcctctaccggggagcgagcacggcattttgcgagggtctgaagtacattgtgcagaatatgaaggaagcgcagaacaccgtgttcatcgcagtgcctctgatgctcgagatgatctattcccgtatctggaagcaggcggaaaagcagggcaaagataaaatgctgaggaaagccatccggatcaataatcgctttaagtccatcggtatcgatatgagccggaagcttttttctcaggtatataaagaactgggcggaaaactgcggatggtgatcaccggcgcggcggcgctgtctccgaatatctacagaggttttgaggatctgggcattaccgtgcttcagggttacggtatgacggagtgtacgcctctgatttccggaacgccgcagagcgcgaaagaacgttatcgcaaagcgggatccgtaggtgttccggtaagagcgggcgaagtccggatcgtcggcagggacgaaaacggcatcggtgaaatcctttttcgaggtcccaatgtgatgctgggatattacgatatgccggaggagacggcaaaagcgctttctacggacggctggctcagtacgggcgatctcgggtttgaggacaaagacggctggatttatctgaccggaagaaagaagaatgtcatcgtgacaaagaccggggaaaacgtctatccggaggaactggaggcttatgtaaacgacagtccgtatgtgtcggattctatggtgtttacttcgatgcgcaacaatgaagagacggtgggcgttcagattcttccggacatggaatttattcaggaagtgacgggacagattcccgatgaagacgaactctaccgtatgatgaaaaaggtcataggagagatcaatgagaatctggccagctacaagcggattcgagatgtctttgtaagaaaagaggattttaccagaaccacgacgaaaaaaatccgcaggcaggataatctggagatccgttaatcaggaatgtttaccgtgtacaggactgactgtcccggcgcagcaggaaagaacaagagcaagacgtacagcacagctgtccggcttgctcttttttcagaagaaagaggaagagaattccgttgatttacggaaatggatttcggatcggagaggagaaaatacgaagatgagaaagcgttggaaagagactgcggcatctgcggtgggatttggtctgattttgctgattttattggcgattctgaccgctttggcgatttttggcggatcgatcatgcatctgttcggtttcagatatctgtcggtgggaaaggcgattctgtttttcgtcgtcgctacggtcgtcagctatcctatcaatctgatcgccggcgcgctgccggatgcactctatcatctgaataaaattacgcggatccaggcgatgattttatacctgttgttggatacaggagctaccgcattgggactgctctgcgtggattattttatggattctgtgtcagctacggggatttctgtttttgtggtatctcttctctttgcgctcgtggatatcccgaatcatccgaaagagagacggagaacgagatagcccggattttcaagagagtgtttctggggatcgctgcatcgggaaaacctcagtgaactgcggagttccggtgttccgccgggcgcctgtgagaacggaatcccgccgggagcaagacggtcggaaccgctgacttttatcacttggcattccgctcccagaggcagcgtcaggtgcgggaggctgtgaccgcagggcaggcccgatacgacgggaatacccagaggttctgcaatctctcggatgatctgctgacagctgcggccgccgggatccggtgtacagccggagaaggtacccagaaggataccgctgcagcggctgatcttttcggcgagcttcagcgaggtgaaggctcggtcgatacggtaagttctttctcccacatcttcgaggaacagaatttttccttcggtttcgatttcgtagggcgaccccagggcggaggcgagcacggtcaggttccctccgcacagacggccgctcataatggtttctctgtgttttctctcatttcgcgacggcgtacggttcttttcgcatgtgtttttttccctggatgccgtgatttctttttgcgatgctctgctgcttctgtcgctgcagattttttcaggggagaaggaacgcttctctccgcggcacaggagttttgctttcttcaggcgaatcgagaggcctttttctaaatcagttccgtagagcatgcggcgcagaaagaaaagtgtcagccggctgtcacaggccgtatagggcgcagcgggcatggggccgtgataggtgaccagcccgcactcctgattgagcgctgtatgaagtgcggtgatgtcgctgaatccgataaaaaatttgggatttttccggatcgtctgaaaatcgatgagattcagcagacgagaggcgccataacctcctctgagacagaagacggcgcggacagacgaatcggagaaagcagcctccagatcccgcgcccgcagccggtcgcttcccgccagataatctctgcggctgcggcaggaagggtagatcacaggtgtcagaccgagaagccggatggatttttccgctttggccagctgttccggggtaacggcaaaagaaggagcgatgagcgccgctctgtctcctggaaccggcggcgcaggcgccgtcgtcttctgattttgtttttgcgccactgcggcggttgaccgtctgtttgatttcaggcggtgagcttttttatagggtatgtttttcatcgtatatttttatttgaactgattggggaatatgacggaaaagacggagtgattttctgccggtctgcattctgcaaaatacatggatactgcgaaaggttctgccggggtgcagaggatgcggcaggaatgacggggatggagcgctcataagataacataagatacaggcgctgccggctatcttttctttcgcggcagagcagtgtccgcgcggcaggcggagtgaagacggggaaggtccgctccgcagaaggatggcggacggtgaatataactatcgcgctgcagacggtgtgacggaaaagcatcgcccgcggggtgagaagaggaaaatgagctgcagaggatgattttgacaggaggcggagataatgcaggaaatatatccggaatggatcagaagaaaaatcgaggagtactgtaactggatgatcggtgtgcgcaggcaactgcaccgttatccggagaccggggatcaggaatacaagacgacgaagtatattcagaatcttctgaaagaaatggagttcgaaatagaaaatcctcttcctaccggggttataggcattttgaaaccgggaggcacaggaggaaaatgcgtcgccctcagagccgatatcgacgctctgcccattcaggaggaaaccgctctcccttttcgttcggaaagagacggatatatgcacgcctgcggccacgatcttcacatggcggcgctcctctgtgcggcccgtattctttcggactgccgcagccgtctgagtgctccggtaaaatttatttttcagccggccgaagaaacagacggcggcgccgccgggatgattgcagcgggctgtctggaagacccggaagtagaatacgtgctgggctggcacgcggcgccggagtatccttccgggtccatcgcggtccgatacggttatacgcatgcttcttcggatgtcttcgatatcacggtacgcggcgtcaagagccacggcgccaatccggaggagggcgccgacgctatcgcagcggcggcgcagattgtcacggcggggcagagtatcgtcagccggaatatcgcggcaacggatccctgtgttatcacgataggcaagtttcatgcgggaacggcgggaaacattatcgcggaccgggcggaactgaccggcacgataaggaccacttcttctgaaacgagataccgggcgatgcagcggctgaaagagacggcggagggtgtggcaaaggcgatgggcgcacaggcttccgttcagtttcgtccggggtatatcgcacagaaaaatgacgatcgtgtcatggatcttctgatggagacggcggcggaatgcgtgggaaaggaaatgatttttcaaaagccttatccttccatgggggtggaggattttgctttttattccgcacagagaccgtctgtttttttctttgcggggaccggatatcccgatcgaaagaattacggcatccatcacggcaggtttgaggcggatgaaagggctctggatacggcggtgcttctcgaggtcatgatgtgtcttcgcctgatgagatcctgatttttgtaatgtgcggcggaatagagattgttgtcgaagaatagctgttgaataaaaaaagttcttttgatagactataatgtagtaccggactcttcctcctctgtaaaaaagacaggtgctgtcgtcagagagcggagagatctccgccggaaatttgatccgacggaactttgtatgtatcatttaccatcaaatcgtgcatcgaaaaaagaaaggcagggcagcagtatgagacagggtctgaatatcgtaactatggttctgggcgccgtcgtcgcagcggcaggcatggcgactgcgattctcagtatcatcaatatgggcaccagcaaaaaatatctcgactgatcccgaagagagggaaaccgcgcggcacttttttgcagagcacgccggtttctcttttttcttcatctctttctttttctcctcttgccgcattatcgcggtgcgggtattttttgaaaaaagcggtttcggctgccggcgggctgttttcagaaaaaaacaaaaaagaaaaaaacgaagggagagacacgggacccttcgttttcaatatccggtgcatttaacttatgcactttgtggggacgggtgagattatttcgcctgagcttcgttaaatctcttcgtcattctggatacttttctagcagccttattcttatgaataacgttcttagaagcagccttgtcgagcttcttttcgagtaatctcagcttttcctgagcggtatccatatcgcctgcagccaaagctttttcaaagttcttggttacggacttgatatgttctttgatacgtctgtttttcgctgtctttttttcgattacagagattcttttcttagccgatttaatatttgccatctttttcaccccactttcgcaaaatatcttaattattataatctatttccttcaattaatcaagaaaaactgtgtattatcagggtatttttgcaaaaaataattctgaaaaagacgcacagacaggtgcggcgacagttacagatgaggagtggaaaaatgccgtttagaacagatttagccatagaaaataaagagatgtacgacgaatctcagggaaatcagggggaaatccccggcgtcagcgttgatattcaggagtattcggaccggattaaagtcacgaaaatcgtggtgaaagatgagttgggaagccatattatgggaaagccctgcggcagctacatcaccatcgaagcggatgaagcggtaggcgcggaagaagaggaaaagaaggaaattgcacgggcctgcgcggcagaactgaaaaaactgatcccttttcactaccatttaaaggttctggtggtgggtctggggaatgatcagatcacgccggattctctgggaccgcatacggcggataaggtgaggattacccgccagtattttctcatgtttgatgcggacggagatgaggagatggcctgtgtcagcgggatcagtccgggggtgacgggcagtaccgggctggaaaccgcggatatgatacgaaaagcagcggagatcgcatctcccgatgtgatcatcgcgatcgattctctggcagcccgcaatgtcgcgcgaatcagcagcaccattcagatcagcgatacgggaatctctccgggggcaggtacgggaaatatgagaactgcgctcaacgaagagactctgggagtgaaagtggttgcggtaggggtacctacggtgatcgacgcccggacgctgattctcgattctctggacggttatctgaccgacgcggcagcggcggaggctttcgtcaacgacagaggggtcaatatgatcgtaacttccacggagatcgatcaggtgatacgggatttttcggatattatcgcagacgcgatcaatatcacggtgcatccgggaatttattcctgagtttttcatcatgctccggctcctctctgcatatattctctatagaaaatatcagggaggagaaacggaatgagaaatacgggaagataccgcgcaagcgcacagagacgcagaatggaagaccgaagacggagacgccgtcccggcggaggccggaacggacgaaaaagtgcgggaagacatatttttaatggtatattatggacaacttcgatgattatgattctgacacttctgccggcggagagtgacgcagcgaaaaaactggcggatctgacggcggacggcaatgttctggcggtagcagccagcaagatctcggattttggcaacgattctctttcgggagattccgggaagaaagacggacaggatgcgaaagaagatgagagctcgcagccggaggaagaggagagttccgcggagggaaagattgaaggcatcgttctcaccgattatacgtctgaaggatctgcgtcggataagagtgtgtcggaaggtgcggtttccggtgtatcgacagctgcgaacaaagcgtctgatatcgcgggtacagccgtgcagcaggccggcggcggggaagatctgaagcagggatccggaaatattatcatctatcacactcacgctacggaatcctatctgccggcggcagcttccaatgcgcacaccacggaattgaaatccaccgtcagggaagcgggggaaacactaacttcgaggttaaaactccacgggttcagcgtcgttcacgatatgacactccacgattacccttcctataacaagtcatataatcggtcgctggagacggtgaaaaaactctgtgcgtcctactctaataagaagctggttatcgatcttcaccgggatgcggccacaagttccggaaaaggcaagacagctacgatcgacgggaagaatgtggcggcgttctgcctggtggtgggtacgcagaataataattacgacaaattacgggcatttgcggaaaaaatcacgacgacagccaataaaatgtatccgggatttgcgaaaccgatcgtagaaaaaccgtataagtttaacgaatacgtcagcgattcctatatcctcctggaggtcggcaacaacgccaatactatcgacgaagtcaacgcggctatgccatatctggcgaaggtactgaccgaagtcatcgcctgattttgcagagaacaggagacagggaaatctgacatgaacgtcagatcatatcatttataatatatacttatttatcggaaagcgggagtaaaatgaaagagcagggagaacggacaggagtctggaaacggagcagaggaatcctgaagagcatctttgtcttcatcgtcgtatttgcggcggtcacggcagtcatacaggtagatacacaggccagcaacgctatcggaaacgcgtcggtttttacttcctcttttatacgcttgaatcagcgggaggttgaagtaaaaatcctgggatttgagacacttttgtccggaggtctcgcggtggatgcggagagtggaaactgaggcctgtggtttttccgatcggatcctttttcgatggaaagggtcgggacagaaaagaaaaagataaaatagagggcagcggcagcgaggcgccgggagcttccgaaacggaggcttccggcgttttactgccgctgtcttgttgatgaatcctggaaaaaatgatacaataaaagaccagatatttttttctgttgattttgtacgggctttgagaaagcctgcgaagagaagaaagagaaaggaccgattatggattcttatcaggaatatatacggaatttcagcattatcgctcatatcgaccatggaaaatccactctcgccgaccgtctcatcgaaaagaccggactggtggcgcacagagatatgaaagctcagtttctggacaatatggacctggagagggagcggggcattacgatcaagctccagacgacccgtctgatttatcacgctcaggatggcaaggagtatatctttaatctcatcgatacgccgggacacgtggattttacttacgaggtttccagaagtctggcggcctgcgaaggcgcagtgctcatcgtagacgctacgcagggggtagaagcgcagactttggccaatgtctatctggctctggatgaaaatctggaaatccttccggtcatcaataagatcgacctgccgagcgcccgcccggatgacgtgaagatggaagtcgaagaagtcatcggtatcgatgcggaagacgctcctctgatctcggcaaaagagggaatcaatatcgaagctgtcctggaagatatcgtcaaaaatgtaccgcctccgggagggaacagcaacgcaccgctgaaggctctcatctttgattcctattatgacaattacaggggcgtcgtcatctatacccgcgtcttcgacggctctgtgaaaaaaggggatatcatccgtctgatgaatgcgggcaaaaattatgaagtgacggaagtgggggtatatgcgccgtcaccgatgcctgttgaggaactccgggcaggtgaagtaggatacatctgcggcagcatcaaacaggtccgggacgccaacgtgggcgataccatcacgcacgcttccgccccgacagcggaaccgctgcccggttacaaagcctccagcccgatggtttactgcggcatctatccgggagagggagaaaaatacgataatgtcaaagatgctctggaaaaactgcaggtcaatgatgcagctttccattttgagccggaaaattccgcagctctgggattcggtttccgctgcggatttctgggactgcttcacatggaaatcatcgtagagcgtctggagcgggaattcgaattggccgtcattaccacttcgccgagtgttatctataaagtcgtgatgatcagcggtgagacggtcatggtgcagaatccgtcgaaccttcctccggtggcggaaatcgatcatatcgaagagcctatcgtcaaagcggatatcatgctgccgaaagagtatgtgggggcgataatggaactgtgccagcagcgccggggcacgatgcttcatatggaatacattacggagtccagagtttcccttcattatgaactgcctttaaacgaggtcatttacgatttcttcgatgcgctgaagtcgaagacgagaggttacggatctctggattatgaatttatccgttatgagaaatcgactctcgtaaaactggacatccttctcaataaggaactggtggacgccttctccatgatcgtccacgagagcgaggcctatgacagagggcgttttgtctgcaccaagctgaaagagatcattccttcgcatcagtttgaagtgccgatacaggccgccatcggtcagaaagtcatcgcccgagcgacggtgaaagctctgagaaaagacgttctcgccaagtgttacggcggagatatctcccgtaagaagaagctgctggaaaagcagaaagaagggaaaaagcgcatgagacagttcggtacggtggaggttcctcaggaggcctttaccgcagttctgaaatacgacgagggcaaataaaaggacaggcgatttgaaaaacgcttcggcgctgattttccaaagacatattttcgaaaaggagctcacgggaaagataatatgaggatgaaaatatgagagacggcacgacatttcaaagagaaaaagcaggtctgtatgttcacatccctttttgtgttcaaaaatgtatctactgtgattttaattctgttcccgactgcagccgatggctgcagtcggaatattttgagggcttaaaacgggagatcggccagttttggaagtcgctttgccgggaggaatctttttgcggggctttttccgatgacggtactgatcgggttttcgccgatacactttttctcggcggcggtactccttcttccgtagacccggcgctgatcgaggagctgatgcggtatatcagagcgatgaaatcagaaggatccggcaatgaaatagatagaggcgactgtgcggaggaaaagggcggctgcgagagggagaacgatcttccgcagatctgcgcccgcggtgaagaatatgcctcggaaggagcccgttatctgctctctgggaatgcggaaatcacgatggaagtcaacccggccaccgtggattatgacagtctggtacgataccggagggcgggaatcaatcgcctgagcataggggttcagtcgtttcaagatgaagaactgaaatttctggggcggattcataccgccggggaagcggaatgctgtttcactatggcgaggagagccggatttgaaaatatcaatatcgatctgattttcggaattcccggcagtacagcggattcctggaagagtaccctgcggagagctgtcgctctaaggccggatcatctctctttttacagtcttcagatagaggaaggtactcctttgtatcgaatgtttcggtcggatgatatccagcaggtgagtgacgaagaaaaccgcagaatgtatcacgacgcagtacagtttctggaacaggcaggctatcatcaatatgagatttccaatgcagcccttgcgaagagagaatgccgccataatctgaaatattggtccatgtgcgattatgcggggttcggcgtctccgctcattcctatcttaatgcgccttttcgtgaagcggcgccgacgggagggattcgcttttttaacgaagatgatatttttgactaccttcgcagaatagatgagacggaagagaaagacagaggatatctgcccttccacatttatcaaaacacgctgagagacgaaatctcagaggcgctttttacaggacttcgcaaaaaaagggggatttctctctcgtggtttgatgaaagattccgaaacgaaggggttacctttctctcggaattcggcgagaaaatgaagccttttatcgaggagggctatctgatttttgacgggaagagtgtgcgattctccctgaaaggattcgacctgtccaattatattttggcggaactgatctgagatgacggatcgaatcgaaaacttcagagggctgccgcgcggtttctctttctttccgactgtagggggtgtctcatagggaacgtggccgatgacacggtggaaggagagtaatgaggaaaatcgattttctgtccgagaaatcagagagggatgcttcgtttaaacgaagcatccctctctgtgtatttggaaaaatggaagaagcaattttatcaacttcttcgcttcaaaaagagactcggttacaagagaacctgtaatctgctataatgaagcgagcttttcacaagcttcgatccatgcggcgaaaactttcgcatcgcttgcaccgccgaagccgacatgttttgcgagatcgatgatctgcgcgttagaatctttcttttccgcttcggaagggtatacgcccgcaactgtatcgacagtgtcggcagcattggagtatgccatacctgcgacagccgcggctgtcgccatcttttcacgtgctgcagggcatcctgcaacagctgcttcaagatttgccaatacggattctaccgcttctcttgcaaatccctgtgtatattcgctggcgcccggagcggtgtaagctcttacagccagtgaaaggactgtaaggccgccgttcttcgctaattcggcagataccgtttcagagaatacggaatcgataaccgccatttcaggaataagattgtaattggcgattacgcatttttcgcctttatcgttctttagcacagcgaatggagagcattccgcacctgtcgctgcagtcgttgccatgagagcgagctttgctttcctgccggtagcggggaagtcattgtcgcttgcagcgagagtattgtactttgcagcaaccgcctcgagatccatttccggattctcatagaggagccacatagcctttgcagcgctcataacggaaccgccgccgataccgatgataatatcaggctgatattccagcatcttaggcagaccgctgcgtacattttcaaatgtaggaacttcatcaagagagaagaattcagcagttctgattcctttttttctcatgagcttttctacagaatcaatagcgccgcttctatacaggttagcgtcagagattatgaatgctcttttaaagccgtatacttcagcaaattccctgaacgctacgcccatggaaccctttttgaaatatacttttctaggaagattgagcatgttcatattttgagttctccttattttcttaaatcaatacgactgttatggatatgaagtattatgatatgaagctgataccggacggatccggcatcagcttcactcattaaatcatatctgagtgattgactttcaatgtaaatttacctgatgtaaggtttacttgaatccgccaaccttatcttcaccgatttcagctgtgagaccgagtgggtaagcagcgtgagtatcagtagggttattgatttcgaggcagagaacatcgccatatttttcaatgaacttgtcatcgccgtagaatgctctgaggtaaacctgcttgagttcaccgatcatcggatatacagggttagcgcctgtgcatgcgtcgtggaatgcccattcagacatctggtcaactgcagcgaggaattccttttcccagtcttccgcgctcttttcaggatgagcttcgcagagccaatcgcagattgtaggcggaatatcgatatcagctttgagctgttcgagagccttgatccagttcttgaatgtttcttcgtcgttcttgccctttacgccgattaattcgcccagttcaacatatctttcgaatgcctgaggatatttgtactgagagaatgtacccatgtggtacggatgtctctgagcgttgaacttgcaaacgtaaggagctaagagagcgtttgcagtaccgtgcggaatgtggaaccagccgcccagcttatgagacagggagtggttgattccgaggaatgcgttagcgaacgcaacacctgcgagagcagaagcgtcagccatcttttcacgagctacaggatcgttcttagcatccttaaacgcggacttgtaagctgccggcagatacttgaataccatttctactgcagacttagcgaaaccatctgtgtattctgtagcgaatgtggaaacataagcttctactgcgtgtgtaagtacgtcgtaaccggaagcctgagttgctctcggcggcaggttcatcatgtggtcagcgtcaacgatcgccatttcaggcatcatttcgtaaccgatgatcggccacttcatgccggtgttcgcatcggagatgatggtgaacggagtaacttcggaaccagtacctgcagtggtagggatgcagactaacttagccttcttacccatctgagggaagaatctgattctctttctgatatcgaggaagatcgtagccatgtcgaggaacgcttcttcagggttttcgtacatgatccacatgatctttgcagtatcgatagcggaaccaccgcctacagcgatgattacgtccggttcgaattcgtgcatcttaggcagacccttcatcgcatcctggatctgagggtcaacacggatgtcgaagaactctgcagttctgatacccatatcatttaactgagcgatgatcttatcgcaggcaccgatctgatagaggttcgcatctgtgatgatgaatgctctcttgaagtcatagacgtctctcatttccttgagagctacagaagtgcagccagtcttgtggtataacttcttaggcatctgtaaccagagcatgttttcttttctgattgcaacagtcttgatatcgagtaactgctcgtagtgagtgttgcccatgtaggaagaatgacctacggaaccaggtccgagtgtcagagatggagcgatgtcgaagttgtagagatcgccgataccgccgaaacatgtcggagtattgatgaggatacgtccagccttcatcttttcagcgaatgcattgatcttatcatcttcgatagggttaacatacatagctgcagtatgtcctgcgccgccttcgaataccagcttttcgcagatgtcgaaagcttcttcgagagtgtcggccttatacataccgaggagtgtagtcagcttttcgtttgcccatggattatcgtgggaagtatcgtctgtttcgtaaacgagaaccttagtttcagcaggaacttcgataccagccatttcagcgagacgaagcgcagtctgacctacagcaggagccttaacgccgtgagtcttagggttgaagaatacttcagcaaccttatcagcctcatccttggagaggaagtagcagcgagcgtccttcatgagagccttaacttctttatatacgctgcttaaaacagtgatatgctgttccgtagcgcagatcataccgttatcgaaagtcttggagtggatgatggactcaacagccattcttaaatcagcagtttcatcgataactacgttacagttaccaggacctacgccgagagccggagtaccggaggaataagctgcgtgtaccattgcttcaccgccggtagcgatgatgagatcaaccttcttcatcattacgtcggaaatttcgagagaaggtacagaaacccagctaattacgttttctggaagaccagcagcgatcgcagcgtttctcataattcttgcagcttcgattgtgcagttaactgcatttggatgcggagaaacgatgatggagtttcttgtctttaatgcgattaagatcttgtagatcgtagtggaagtcggattagttgtaggaacgatcgcagcgataacacccttaggagaagctacgcgctttgtacctgcttccggattctcttcaataatgccgcaagtcttagcatcacgcatgtagttccagatatgttcggacgcgtactggttcttagtaatcttgtcaacaacgataccgtaaccagtttcttcgtttgccatttttgcgagaggaatacgcattttacttactgccatagcagcatgttcacagatagtatctacctgttcctgagtaaatttgctgaattcttcctgtgaagcacgaatgattggtaaagcttcttcgaatgtttcgactgaattgataatgagttctttagccaatttgtcctccttgtttaataaacggtaggttaaactttagaattatgtacgcagacatctgatgccacacaaatatctgaatacatttttaaaacaatcacaaattaactataaaatatagaaaattatgatgttgtttttaacaagttttaaaatacggaatcgctttcttcgtcagaaacggatccgatattttataggggcagacaatttctattgtagaaactgacaacccgttcccttgctcctatagcttaacataacgaaagatttgatgtcaatacggtgcaatctaattaaatatttaacaagagctaattaaatatttcacaatgttacagttttatgacaggatcagtcgaattagatcagtaaattcgtaaaaccccgattttgatatataaaaaataacaaacaaaaaattacagtaaaatattgacatatagcgctgtgaatgataggattgaactgtaaaaaatttgaaattctgagaaaggatgtgagtgatgaaaaaaatttctgtatgcctggtggatgacgatgactggttccgcgatatgttctcgcagtatatggtacatacctgcagaaatatcagtatgacgtcagaggatttccggagctggagagacggagaaaccgcggaaagtcatacggacagcggcgggtttgatctgtatcttttcggcggagccggcagtgagttcgcatcggatgaaaaaatggcagaggtatccgcgcagtcagtatttctgtatcggagcgaggcggaacgcaggtatctgcaggaagcgctgccatctgcggggattgtcagtaaatatatcagtgcgcagaatattgccgcgcatatcaatctcgctctttccgaacgccagatcggcacaggactcgtctcaaaggaaggctctttttttgttatttctataacgagttcctgcggcggagcggggaaaacgtcggtttctctgatgcttgccagattgctgcagcagaaaagaaaacgaagcgtactcattgtcagcacttctctgctgtatgatgcgggacgatattttgagacagagaaagagagacagcgccgctcgctcaacgagtatctgtatcatcttttcgcaggagatgaaccggagaattctctttccttatatataatgaaggatcgattcggtgcggcgtccttttatcagccggacggggtcagtgaactggcaggactcagccggacggagatggggcgttttatcgacagcctgagtcgttctgaactgtttgatacgctggtttttgatctgaacaattccaacgacgaggtgacgggcctgattgcggatcggtcagatgtgatgctggtactgttctctgccgaggacgggaccgagatggcgggacgatggagcgcccatattctggagcaatgttcggaggagccaggcggaatgtgggcggtgatcaataaagaaggccaggatggggaccgtctgaaattccgggatgcgttcggagaacaggagagatgcggcggcacgatgaagcgcttttccattccctacgaccctaacagtttttactctgcagacggggttcgccagatcagtatgacgggttcttttgcagccgcagtagacgctgttataaaggaagtgatttcatttgcgtgaaagcggaggacgggccggtctgataaaagagatctcagatgaaatccgcaggaatgtcggcggcgccggatatgaatccgatgaagagatacgccgtctcatcgaagaatatgtatttcacagttcccgcactcagaggatgaatttcaaggacaagatttctgtcgtcaacggcgttttcaattccatgcggaaagaactggatctgctgcagccgtatatggaggatccggagatcaatgagatcatggtcaacgggcgggatcatatctttgtggaaagaaaaggggaattgtttcgaatcgatgaggcatttccgtcggatgaagcgctggaggaagtcataatgagaattgcgggcaaagttcacagagagatcaacgagatgaaccccattttggatgcgcggctcagcgacgggtcgcgggttcacgcggtatataaaaatatctctctgacgggtccggttctgaccatccggcgttttccggaaaaccgcattacgatggaggatctgatacgattcgggtccgtgacgcaggaagctgcagattttttggaaatactcgtgaaaagcggatataatctgctgatttccggcgggaccagctcgggaaaatcatctcttttgggagcactgacggattatattcccgataatgagagaattattctcatcgaggactctgcggagctgcagattcaggggatcgagaatctggtgagactggagacgaaaaattcgaatgctcagggaaaaggcatggtgtcgatgcgcgatctgatcagagccagtctgcggatgcgcccggaccggattatcgtaggggaggttcggggcggtgaggccgtggatatgatcgcagcgctcaatacgggacacgacggcggtatgagcacgatacatgctaattcggctttcggtgtgttcggaaggcttgagaccatgtttctttccgctgtgcagtatcctgtggatgcggtgcggggacagatctcaacaggcatcgatattgtagtacatctgtcgcggctgagagacggcgccaggcgtattttggatatttctgaactgctgggatttgacggtggaaaaccggttctaaaccggctctttcgatttcggccggaggcgggcactaaggggatgcttgagccgacggacaacaggattatccatagagaaaaacttgaaatgaggggatttcatctggaatgagaataccggagaagacgagaaggcaaaagaatgtatctgctgaaatgcaggaagagcgtaatttcgccggcacggattacgatgtctatgtgatggaaaagaaagaaaggggaaaagttctgctcctctgtgtcctgggagcggcactgtgcggctatctctattttcacagctatatcgcagccgcagcggcgtctgtctgttctgtttttcttttgcccgtatataagagagtaaaagtagacgctgcaaagaacgatctccgaattcagtttcgggattttttatattcggtgtcagcttctgtacataccgggcgaagtctggaagaagctctcggagaagcctgtggaccgctgactatgatttacggagatgagtgcagtatggtgcaggaactgaaacggatggtgacggtaattcaggatacaaactgcagcgcggagccgcttctgagggatttggccggccggtcgcatatcgatgagatttctgagtttgtcgatgtctgtatcacctgcaggagaacgggaggagacatcggttcgctgatcggcaaagcgagcgaaatcatcactcagaatatcgaactgatgagggagaagaacgtccttttatcgcagaagcgtctggaaagtcgtctgctggcgctgatgccgccggcggtcatccttctgatcaatatgagttcttctgactatctgtttctgatgtatacgacgctggaaggcaggctgatcatgacgatttctctgttgtgtacggcaggggcgtttctttggagtttcaagctgatttcctttgactgaggaaaaacatggaaagatcagagaacggcattggcgaaggacgccgccgaagcaggatcgctggcggcgggaagggagagtggttttatagaaaagaaaaaatctgcgtttgcatcgttaagaaagactgccgatcggtggtaccggacggcggaaaaaatctgcccggagaaaatgatcggcgattctgagatactggaaagaaagcttgcgatcaagtattcgggcagacgtctcgcggaagctgtgagatttcaccggcagagaaatgtattcctttatacggcggtattggccgcagctctgacggtggcagcggtactttgtctgttgtctgtccgggccactgacgatatcggacggatacacaggccggaaagcggtcagggacagctgacgattccgatgatcgttgaggcccagggagacggggcgtccgtcagggattctgtcagtattatcgttcgggaagaaaaactgagtgatgaagagaaggaccgtattttagacaaatatgcggctgagctgccggaacagatctgccctgagacaggcggacgccgtgtggttacagaagatttttctctgcctctggcagatgagaaaacgggagtcctgctgacctgggagtcgtctgaccccgttctgatttcagaggacgggcgatatgatgtcctggcgatggttcaggaggaagaggtggtgactctcaccggtgtacgggggacgagagagggaggtatctttcgatgtgattctgcgcggagatcctgcattgtaccaaaaatcgatatcccggcggatcgaagcgatgacagatgaaatttccgccggtgaagaaggaagcgctgtggaacttccctctcagatcggagagaagatcagactgcgttggaagaagtacgatacgggcaatgcgggaatggttgctgtcggcggaatcctggtgacggcggcgtttatcttccgaagatattcttttgcagatcgggaagttcagcggtattgcagggggattgtaacctatttcccgccttttattgacaagctggtgcttttgctcaacagcgggctgacggtgatgacagcgatggagaagatcgcggaagactgcagacttcagtttgaatatgacagacggaatatgctggcatatgaggctgcggaaatcggaaagctggtcaaagagacgaatgcttctgttgtcagagaatggcataatttcgcggcccgtacgggaatcaatgaaatcatgcgtttcagtacgattatcgaggacaatctcggaaaggggacctctctggcagaaaagctggaaatcgaaggaaatcttttaagagagaaggagaaaaaatctgtgcaggaaaaaatgcggatgatcgattccaaactgacactgccgctgattctcatgctgttttcactggtgctggtcacggtggcgcccgcgatgatgcagatgtgaagaacaaatataaatgaaagatccgcctgtcggactgcagagaaaaaacgcagaaaaacgcgcggaatgcggagcagatcagctgcagcagaatccgcgcggtctgtgaacagtaaataataaaggtgcaagaaaatgagagaagaaaaggaggacttattatgacaaagagattgaaatgtatgtcgctgaagtcaaagagcggaatggagctggtccaagtcggcattctcatcgcaattgcggtgggaatcgggctgatctttaaagaacagatcgggcagtttgtcaatactacgttcagcacattgctgggaagcagtttcaactgatgaaaacgagcttccgaagcaaatctggaagctatcttctggaagcggccgtgattttgccggtgattatcgtaatttcgatgatgcttctcctgctgatgctatttctcttcggaaatgcgcaggatgcggcggatatgggagctgaagtgcgcagagcggcgggagagaactcgaaaactgtggagtatgatgtgcagagagatcacaggaaattttctctgtcagggaagtatcagaatgaggtgcaaacatcagaaatcatcagtcggagcagcggagcgacagactgttattttgcagatacccgcagaagaggccgatttctgtcgctgttctcttttcaggcggagagccggtcgaaggctgtgtggacttcaatcgaagaagcgcatctcgtgcgcacggcggatcttgtttttgaaaccatcggcgggacagccggctgattgcgaagattgagtatattgagtatggtaaaatttttgtataaagtccgatcaaaacggggagcttctgcggtgatgctcacctgtatctttatctctctggttacggctgccggcgctgtcggtgaagccgcttccagagaagcttccgtcacagtggcagagtgtactttggaaaccgcgggccgatctgtcctcgccggttatgacagaggacttaaggagcgatatgctctgttcggttatgaattagacgagagggaaatctgtgaagaaataaagttgatgtcggaagaaccgctgaaatcttttcctctgacggaatgcagaattctcgaactgagtgtggagaagtcaggttattgtctggcggatatcgaacttttcggcgcgcagatcgaggagattatgaaatataaaattttcacagaccggatatccgaatttaccgggtttctgacttcggcatcggatgcggtcgatctgctttcagatcaggagagaaaaaaggaatctctggaagaggcgaaagaggctatgagaaaagcccgggaggatacagacactgaagaaaacctaaaagatgcggacggaaatttttccggtgtggattttgatacagctgacagcgttcacgatatgctgaaaaaattgaaagaggacgcagaagacgggaaagaagaaggagagacggaaaaccgtgtgctgcgcaacgggaaaattacggaagctcttccctctgtactggaaggctgcagtgaaaactctgtgttttcaggagttttgtcatctctgtcgaagtttaccgagtttacggatctgggaaatttgaaatccgagatttatatcaacgaatatattctggaatatttttcaaaaaataccgatgaaccgggaacagaccgtttcttttccaacgaggtggagtacattttatacggcagtgattcggacagggacaattataagagagcgaagcgagcgatccggactgtgcgtaccgctttgaatatggcatacatctaccgcagtccgcaaatggtgcaagagactctttcccttgcagaaagtctgactcccggccctcttgcaccgctgacacagcttttgatcatcgcggcatggagcagcctggaatcatataatgatatgaaaaatctggaggcgggaaatcgcattccgctggtgaaatcctcagctacatggaagatcagtctttcctctgtgaggtcaggggaattttcagaaggaatgattgaaaacgattccagaggcggtctgagttacggctcttatctgaaacttttattgctgacagaagatacagagacaaaactgctgagaatgatggatctcattcagattaacatgaaaggatccgaacgaaaggattttgtcctttccaatttattctgcggtttcatcgtcagagcgcagcttgagaagagaagtatctgcgcgggaatcggtacagcgcagacttcggttcggatggtccatacttattgattccggcatcggaaagactgttgagaaagggcgggggatgaactgcggtacggaacggttttgcagaagatttctgatagagaggaactgtgcggggaggaggatttttatctcggaaaaaaataataaaatgatcgggcgcagagggtccatgataaccgaagccgccatatttttgcctgtgtttatcttaagcgttctgactctgtcgtttctcatcaaagcggtatggattcagatctctgtctttgaggctctgacagatgaagcgagaaaatcttcggtcaaagcctacgtctttgaaaatatttccgatcatctgccgcagcagctgcaggggtttgcggcggacgcctccgaccgctggatttttctgcaggcggtccgtgccggcctggaagaccggggactggatgggaactctcttcgaataaagaattatcgagtaaccgggacaaagacaggcaattttgatgaagcagatctgatccgggctgaactggtgtatgatctgagattagatcttcctgcgcctgtacgcggtatccggatgagtaatgtgatatactggcgcatttggaatggaaaggattattccggcgatgtgttttctttcgataggatggcgcaggcggaacgcggcgatatcgtctatatttttccgaatgcggggtcccggtttcatgagcgcggctgcagatatgtcaattcctatgctgagaagacgagagcgacagcggatattttgaagaaatacggcccctgtcctctctgcattgaaaaggaggtgtctgcaggagaaatcgtctatatttttcgttatggaaattcttatcacagggaggactgcaattctgtagaaaagtatgtaattcctatggacagagaggacgcttccgcgaaaaattatatggcgtgcagtgtctgcggcggatagagtaaatcggaagaaaggagaagctattaaaagatgagatattcgaagacgggcagctgtgatgtcaccgcatgtcgaccggactttcctgcgggagaaagtgaaaaagagacgggaaaagatctgtctctgaggaccgcataccagcagagaggcggcgaacagaggcttcatatgaggttcgccagaaatgcggtgagcgattatgaaaatcgtgtcattctcgaaaatatgtgtcctgcatttctcgatatgtacacgtccagaaacggtgcggatctggacgtctattaccggattaccggatattcaagtctgaaaaactgcgcgagaagtcgtattctttcgggcttcgatattctgaaaacggtaacagatctgctggaactggtgaaatcctgtgaggactatttgattttctctgaatatatctctctgcggacggatcatattttcgtctctcaggaagacagttctctgcgtctgatgtatcttcccggataccgaacgacaaggtctctgagaaatctggtggcggcgctgattgacgatctgtccgctgcagacattcagaggagagaggatgaggatctgatcacagaatatcaggagaaaattctggaaaatgaatacggcattcagggttatatcaacctggcggaagatctgatgcgcagaaaaatccgcagtgagtggagcggtgaacttcccgcaaaattgaataataaggaggaatcggagggggaaaaggtccgggaagcggaaggcgaatattttacggaaaaaatagggagcctgatcagtgtgaagaaaaagctgacagagctgatggaaaatctgctgatgtgaattccagctggaaaaaacggagactgagccgcagcctgccccttggcggcaggcgagtcctgcggaacaaaaagacggagactgaaccgtagtcggcatggtatactgatttcgaaaggagtgatacatttttatgggatatattaaaaaattcggcgttctttccggactcattctgattgctctgggagtggtatgctatctgctggaaaatcaggtagtggcgtttttcggtattgcagcggggattctgctgcttgtcttcggagggtattttctggtcggttcgctgatacagaggcagtatggcaatatgtcggttgtcaagttgatcgcgggaattttatttctgctgagtggcctgtatcttctgcttcactcggacctcatggttcgcctgaccggagtggcgatcggaattatggcgtttgcagccggtgcggatcgttttgcggtggcctggtcgaggatgaaggccggtgtcagcaggaataaaaatctgctgttcggcgggatacatgtggtttttggcattgtgatgtgtgtcgtcccgaaatggggtgtggatattctcgtgaagtttaccgggctgtatctcatcgtagccggcgtaatggtgcttttttccgcgctgaagtatgacgacttttagaaaattgagggttctcgttctgtcattttactgacttttcgagaaccctcatttttacttcctgtctgaaagcggtcagccgctctgaccgccgcccgctttgctgccggatcggtcctgctgtttttttcctgtactgggaaagacgagccgcatgagtacggagattttgaaagtcagagtgatcatgaacacggcgagagagatgacttctgcccgttcaaaataatccccgtagcgggtgagtcccagcggatagtaaaccggatattcgatcagggagtagagtctgtcgcctaacacggttagtgtgatcagctggatgaccgcgataaggagcactgatgccgcgagccctgttatgacgatgcgggaggaatcggaatccatcgtattttcagcccggaggatttcgaggagcaggattccttttaccgtgaagaggagtgagtagataccgaactggaataaaaaggagcggaatccgtgataaaaatggaagacattcgatatttcgatacggtcggtcaatagaatcagagaaaaaattagaaaaaacgcgatgatgattaccaggatcgaggcgctccgcttgatgatattgaagtctttgaacgctgcgaaagctgcggttaagaggataaacaccggcagaagccagcgggtgatctccatattgacgcaggattgtacgaaatgagagaaaagaaggacggatgcggcgatgagagcgacggcgacaatctttgagagaaacagaaatatttttcctactcctgcgctgcgaaaaattttgccgaaaagaagtgtgaaagggatagagagaatcagcgaagcgatgagagaaagccagccgaagcttccggtaagggtgcgcatagaacagatgagaagcgaatcggaaaagtaaagcagtgagataaagaacagactcctccggttggaaaagaatgtgagggaagccagatttgcgggtccctgaacggacgtcgtattcggactgacagtctgtgaattcttcatagtctgcgatttgttcatatggcaggttcctcctctctgtcttctgtttcaccgctctgaatgatcaggtcctccggattattttctttgaaaaaatgaaatcccgtatcggtatccccggtaattctcccgcgttttatcagttttcccccgcagaaaacggcggtatcgttcacataagcggacattttttcacctgttttcatcgtgtcaatgacagggaaaaagagaaagcgattgtcttctccgatagaattgatcacgcggaaggcttccgtgtttacatttttttcttccgcagctgcattgcggatgcttctgctgatatccaggcctttgtttcccgagacgaaggtttctgattccaggacatctcctgattttgcatcgtacagagcgatctgtgtgttgaaacggatgtctccgctgtcgagtataaattcagataattcttcaaaaccggatctttcagcggtttcgagatccatgagaatcaggcgaacgtgtcccgtatagatactgctgtcgatcatgatgagattatcccagacgttctgcagagaagttccgtctgcggagatgagttttgtctccgtgtcctgcggctgtccttggctgcttccttttgtatcggccagctctgcgcgaagatgatagatgccttcttcatcctccatgacttcgatgcaggtgacgatggaaatattgtccagatgacctttgctgaaggatgcgaggccgaagataagcatgagcgcaataaatggaaggataatataatgacggattctcatagatcttcctctccctgtctgtgaatgtcttttgtagcggaaatcacgggacgttttttcatatttggccatacgtctcttacgatcgtgtcggaaaaaatctgacggaaattccggactgtcagcgagttgtacggaatgccgaaggattccagggagcagacggcgaagatcagcatcatgatgccgataaaatagccgaagagtcccatcgacgcggcgagaaagagaagccccagccgtatcaccagaacaggccctttcagctgcggaatgatcaggccggtgatacccgaaaaagctacgatgattatgatgggcagactgacaaagtgagcgctgacggcagcttctcccaggacgatacctccgacgatggaaaaggccgtaccgatgctggacggtattcgggcgctgccttcccgcaccatctcaaataccaggatcagaatcagcgtttcggccagagaggagaagggcatgccctgcctgctcccggcggcagcgatgagaaagtggatggggagcatctgtatatgatgtgtaatgagagcgatatagatggccggcagactgatggtaaagaaaaatccgataaagcggagaatccggttgaaggtggcataataaggatcgttataataatcgtctcccgcggtaaaatattctaagaatacgaacggcgcggtcagggctaccggggaaccgttgatgatcaggacgatgcgcccctccatcaattttgcggcggctacgtccggccgctgggtggaacccgtagttttgaacggcgagtaacggccgtcctttatgatttcttcgatgtattcagtatcgataatacagtcgatttttacgttgtcgatacggcggcgcatctccgacaaaatcgtcttgtccgccagcccgtccatatagcacatggcgatcagcgtctgtgattttctgcctgtggtgaaaaattcgtatttcagctgcgggctggtgatcttccg

SEQ ID NO: 3369 - DNA, 32759 bp, Unknown
  16S sequences of unknown bacteria
tgtcggtcggtatgttcttctgctttttctcccttacgattctgccctttataacgtgcgggtgttcgcagtccacaagcccgttcataagtccgctcgcccccactaaacctatttgcgaaagattaaggggtaaaagcggttttctcgtcctgctctcaaggtctgcactctcaaaaagcaaattaaggctgtccgacgcttttaattgcccggctaattcctcaacgtcaaaaaccgagcctttaaaatacggtacggccgtttccttaacaggcagcgaatacagtccttttggtacggtatctataagcggaatattttcgggagtaaggcaaagcctctctattttctccgccgtcctttccgccgcgtgcttttcggtgcgtattccgaaaaatacaatttgcttgtacttcttaaactcaccggcacggaatctgaataccgaaagatttttgtaataggtcgccagcgttcggcatacggagctgtcggctctgtgatacggaataatatatacaagcagtccgccccgcatcagcaaaggcagagtatccgaaagaaacgcgcgctccatacgtctgccgccgttctcgccggggcaggaaaggtagggcggatttaaaaacagcgcatgaaatctgccgaacggtacggacgagtgaaaaaagctgccgagtcttgcgttgttcagattcttctgtgccgtatgccctctgctttcgtcaagctctatgccgtaggtttccgcattttcgttttcggcaaagactttaagcgccaagccctctccgcagcaggggtctaaaatattcacctgcgttttaggaaaattgatagcttgcttaataaaccttacgtgctcttcatcggtaggaaagtatcccattttaatgcggttcataaggtgcgccgccgcttttgcgtcaatgcccgccttatccggcagcatatccgaaaaggaataaagcgcggatattaaggcggggtaattgccgccgcctaaataatcaaagcgctttaagccgtcaaacagctttagtgcggttcggtacagctcgccgctgtcgtattccgcaagggaatgcagcaggcttgaaaattcgttctgtaacgcctttaccgtaatatgcagctcggatattgaatcgctgtcccgcttttcaagaaatacgggatattcggtcttcaagtcatctgtcagccgtttaaggcttgccttgccgtcggtcagctcgtcaaggcaaaagcaaccgttattttcataatcgctcatcctttacctctttcgccgttcggtaatttattcttttaaataccgaacccgtgtaaccgaaaacgagaatgtttttaagcgcttcaaggcaggtgttaaaaacaagctcctgcacattatcctcagccgtaaggaaaactgctatatattcgtcctgaccgtccaatataaccttcatacggtcgctttgggcaaatacataaacccgtcgcttatcctcggtttcttcaaaatgcggggctaccctcaattcggggatagcggcttttatctgcgttcccaaaaatgccgtaaacatatcccagtcccttgtcgggttatctgttgtaaagacagcgccgtttgcaacataaaagccgccgctgtcctttttgtcctctgtacccgcaggtaattctatgccgcgcatttttccgtcctcctcttacgcttttttaccgtttccgcccttgtggaaatgattttagaggaaaaggttacataccttgtggtaaggtcgcccgtcaccagcaaatcgtaaagaaaagaggttacggcggtagctgatgtaaggtttgcggttaccgactgcggggcggataccgcgcgttctgcacaggaaagctcggtcggcagcttatcctcagcctttaaaatatccgggtaaagcgtgcctacgggcttaaaggttgttcgtccgttttgccttactccgcaaaccacctgaccggtatattctccgttgcccgagtctatatacaccaaattatccgtattgtaaaatacattatggcatatggcgcgggatttgttattatccacgcagccgattaaaataacacgctgggtttcgggaatactgttatacggctgtttaataaaatccggccttacaagccctttgaggcgttcctcgctttctatatattcgggtatatattcgcactctgtaccgaaagctccggaatatctttccgctaataccgccgccttatttctgcctatatcctgcttaacaaaattctgtcggataaggtttttaggctcgacaatatccccgtcgcagataatgatacggtaatttcttttgtcgtccgcaaaggctattcggtagaggtggggtattaaatatccgccggtaccgcctgcacccaaaactattatttttaccggtgcggctgcagaatacttcatatcctttcctccccgaaaaagcgtcttatatgcggtattatacggcggggcgtttcctcggcaaaccgtatgttttccttccattctttaggaaaatcaccgaaaaaattgccttcaaaaacctcttcgggcggcaggtatataaacttaccggcgcatcccgctctgaccgttatttcgggaaaggttctgtcaaatctgcccgcaacggcataaagccttgtttccttttcgtcgtcgttatccgtttccgaaaaaacggcgggcatggtattatgggaatgaaagtccacaacgtggatatatctttcggggtacggttcttccgcttcgctgtttaccgctacgtgggatattctctgtttcggaacctttatgatatattccttttcttccgtatcatagagaatatgcactaatacctcgtaatgcagttcatccgaaatgctcttaaaaaagcccataatctttgaaaagatatgagcgggtattttaggcagagcagattcaaagcttggcgttatgctttcaagctccctgatgttttccgccggggcggtaaagcgtcctatttcgtttgttctttgttcgtacactctgccgtctttcgacggcagaagtacaatcggtttctctgttttaagggcgtcggcttttgtcaggcaaaattccttaaagccggacagcgcctcacccttgctttgcgcttttttaaatgccttaacggtacattcggggtttttatccgcgtccgtttttgctttcttaagcgcgtccttaaatgccttggagttctcgatttcggctttgatttcgtaaaccttatccgagccggggttacttacgctctttgtggtttttccgtaattcaccgtccaggatatggttttcgagtccgaaagctcggggaaatccgcctcatacttttgacgcagatcctcaaaggttgcgtccctgtcctcgatttcctcctttacctttgcgtaggagaatattgcgggctttgccgccaacgcttcaagcatacgcttttcgctctgctgctcggcatttttaagtgccgcctcaaacgggtcaagcatcggctgctgttcggcgacaggctgtaccggcggttgttgaattaccggctcgggttgaacagccggagccgcggtaaccgtaggttgtacctgcggcacgggcgtgccgactgcctgctgaattacaggctgtgtcgggacttccggctgtgccgtttccgcctgaacaggtggcgccgctacctgttgcggtgccgtctgttcctcgcccggccatacggcggcgggagtaaacggcacgctctttgcgcttggtgcttgctcggcaggcacgttttcaaaatcgtccatactgtcgagaaagccgttgatgttgtcttgattgttcatccttctgtctccttttgcgccgtccgggaataaaaatatctcaaagaattaaatttacactgtgaattcttttaaagatatttttaagcctttttgacgcgttttctctatgtaaaaacaaaaagaccgaccctctctgctttaaatacagagttaaggtcggtcaattttgcaattaccgaatttaattgtcgggcgctttaggttaccccaaaacgcaaaaaagccggacttctccctttaagggaaaaatccgacctgtttcctcaaaccaatgtcttcaaagagacatcacactcaaaccttgttacattcatattatatatggtataaggtgagttgtcaacgaaaatttatttttacgctttaaaaacttgacttttctgtgcattgtggtataatataagtgaaataaggcaaaccgatagacggttagcccattcttgtgattagaaataaatcgccaagtttggaacgctcgggcggtttatttcttttttgttatgttataaacaagtgttatgacacctataatgagtgttccgaaaaggaataaatcactatatgtaaccatcagcaccacccccttatacagagggtgaaaagataccctctgaaaaagagagctaaccgtccaccgtttaaggttcaccttattccgacaatattataccattatattcatatatttgcaagcataataagcactgtaaaatttaatgagatttttttaataatgggggaggttttctcggcccatttcagactatgaatatagatagcgcaataaaagcgctttacgaaccttgaaaaatatgccgagaggcattatagaaagcataccgtaaaacggcgggagagcgacgtcaaaaaacgtaaaaggcagagatgtgacaacttctgttcgcgaagatcccgaaaaaggcacttgccgtgggcttggacggcaagcgggcgcagtcggctcggtgcggtatgtccctgcggaggggcttaaatactccgtatcaattattataaatccacaggtaattccctattgcacttataattggaaaagtcaaatttgacaaatttcggattttgtgtatatactgaatgcaagctctgcaaagagctatgttgactgctgctccgggacatttacacaaaaccgaaatattgaaaggtgatgtgtaaaaatgtctgaaaaacaaaaaacggagcttaatgcggaacagtattatgcatataaaaacatgtcctttattgtaaagcctgtttttcgcgaaaaaggcaaaagcctatgcgaacttctgctgcatcttataaagagagatgttgaacataattgattcgtatgcagttgacgcaaagcgtactgcttatttgactgcggaacaggaggaattatgaattggacaaaaaagagaaaaatttgctcggacgtagcatttctttacgagcgcttgtcacgcgatgatgatttagaaggtgaaagctacagcatcgcaactcaaaaaaagctgctgacgaaggttgcaaaggaaaaaggatatacacatatagtacatttctttgacgacggtatttcgggagttacaatgaatcgcccgaaattcaacgaaatgattgagcaactgaagctcggtaagggtggagctgtctttgttaaggacttgtcacgactcggcaggaattatatcgaggtcggccgtttgattgaagaattctttcccgaaaacggaatcagacttgtagcagtatcggacggaatcgattcatttgagggagaaagcgaatttgcaccgataaagaatttatttaacgaatggtattcacgcgatataagcaagaaaagaagaatcagtaataaagtaaagggttcttccggcgtaccgttaggcgctccgccatacggctataagcgggatgaaaaggattcgaattattgggttatcgacgaagaagcggcgaacgttgttaaaatgattgacaccttaactctttccggttacggtacaaatcagatagcgacaatgctttccgaaaagatgattcttactccgacggcatatgcggtatccaaagggtataaaaagcccctgaaacagcatactgcaggtccgtacagttggaactccacaactgtcataaaaattctcaatttacgggaatattgcggtgatgtcattaacttcaaaacttattccatatcgtataaaagcaaaaagagattcaaaaatgatccggaagatatgatgatattcgaaaatgttcacgagcctatacgagacagggcaacatttgaaagaatacaggaaatgcgcgggaatctgcgcaggcggaacttgagcaacggtgagcacaatatgttttccggattgcttgtatgttccgattgcggttgcaaattgggctatcattttaatcaaaaaaatccgagtatcaagtattttaactgtccgaacaacaataaaggcaaactgaaaaaatgtatgtcaacacattatgtgcgcgtggattttttggaacaaatcgtcttgagtgaaatacggcgtctgacacgctttgccggaaagtacgaggaagaattcacaagtgcggttacggcatattccaagactgttttggaaagcaataagcgaatatgcagcggagagttaaactctcttatttcccgtaacagtgaaatagacagattgtttgaacacctttacgaagacaatgcatcgggaaaaatatctgatgagcgctttgcgaagctttcgtcaaagtacgaatccgaacaaaaatctatttccgaaagagtggaagagcttaaaaaagcctatgatgaaatggctaacgaatcaagtaagaccgagagctttataagggcggtaaaaaagtatacacgggtgaaaaagctaacccccttaatgctgaacgagcttattgaaaaaatcgaggttttccaaaccgaaatcgttgacggtaagagaactcaaaaaatagttatttattataattgcataggcgcggtaagtattccgaaggatgttccggttccgaatgttgaagtgacattgggaaccaggcagggtgttgaactaacatacatttccgcataaaaattgaatgttgtgtaaatcggtcaaaaaagatgttcttatagaaaatgaaatcccataagaacatcttgagtggtggagacgatgggaatcgaacccatgtccaaaaatcaatccataccggcatctccgagcgcagacgtttatttacattcccttacgcggacgtcagacgtcagactttcgcgcttggtagctccaaagccgtgacaggggcaggagcgcgcccctgttcacgttcaccgctaaaatgacacccttgccgggtcgcggtgctcccgggtcggatgagcagcctaaattaggctgctaaagcaactttattgttgtcagttaattttgtttgcggattttatagcggttccgcaccgctgctcgcttccgatacttcaaaatccctgtcgaaacctttacgcccccgtatatataatacgctgaatagcgatattatctgttttgctctttcattgctctgtcaattgctcttgcggcgtcgcgctttgccgccgtttcgcgcttatcgtgcagctttttgcccttgcaaagccccaactgcaccttaacaagcgagcccttaaaatagagagaaagcggaataagcgccagaccctcctgctttaccgctcctaaaagccgcattatttcacgtttatgaagcagcagccgcctgtttcttgaagggtccttgttaaaaatgttgccatgctcataagggcttatatgcagctgctttattatcatttctccgccgtccacgctgcaccaggcgtcctttaaatttgcaccgccctgacgaatcgactttatttccgttcccgaaagctcaataccgcattcaaagctttcaagcacaaaatactcgtgaaaagcttttttattggtagttatggtttttgtgttttccatttgcgccctccgaggaatagtgccgcagcacttaaaaatccgaaaatgctttgctactatgataacacagtacggcgtataaatcaagtgcttacaggaaaatatacacaaatattataccccgaaattcgcctgaaaatcggggtataatacacatttaaaggattttcaatcaaaaagcaccttttccgccttagcacaaagataatggtacacgggcaaatgcagctcctgcaccttaaatgtctcggtttcgggaacgcaaatgcaaatatccgctttttccttaagcagcccgccctttgagcctgtcagcgcaataacggttagcccgagcgccttgcctacctcggcggcggcaacgcagtttgccgaattacccgaggtgcttatgcaaagcagcatatcccctgttttacctaaccccataagctcctgcgcatatacaagctgcgggtcaacgtcattgcagaacgcagagttaagccctgtaagcgacggcagcggtattgcgggaacggcaagctgcaattttgagagtacctcctcgctgagcgtggggttgagccgcagcatttccgcctttttttcgggggttatgggtcggcggctcaaaaaacctttcatcagctcgcctgttatatgctcgcaatcggcacagctgccgccgttgccgcaaagcaaaagcttattgcccgctttaaacccggaaatcagtatttcagccgttttttctatttcttcggcgcagcttttaagcacggggtatcttttcaataattcttccatatttcaaatctccttattataaaagcgccgtagctatcgctgcatagtcgcctattttctcgcccaattctgcgggtactattttgcagcagcccgcagcctgcggcaaagcctcttttgctataacctcttcggcatattttcttaaaagctgctcggagcgcgcgaacacgctgcctataactattttttcagggttcagtatgtcaataagcaccgaaagccccgcacccaaatgctcgccgcagactttataaacatttattgcagtttcgtccccagcgtttgcagcctcggcaatagcctttgcggttatatccttttcactcatatcctttttaaaataagcgggctgtctgccgctttgcagagcttcaagcgccatactgtagccgagctttgctataccgccgccgctgcaaaagccctcaaaggagcctgccttgccgtagcctacgggtccgaagcgttcaaggcgaatgtgacccgcctcgcccgcgttatcgtttgtgccggtgtaaagtttgccgtttaaaataagccccgcgcccagccccgtgccgaatgtcaggaagaccatattatccgctcccctgcccgcgccgaatttccactcggcaacggcgcaggcgttagcgtcgttttgcagcagcgccggcactccgaaatgccgcgacagctgctcggaaatatgtacctcgttccacccgggaagatttggcggtcctaatattacccccttgcgggaatcaagcggtccgccgcaggatattcctattttttcgggtttttcgccgcctaaaatattttcagccgactttatcaggctttctatcatttcctcaggcgaaatatcaaagcgggtggcgcatttttccttttttaaaaactctatattttcgccctgtacctccgccgtcataacggcgcactttgttccgcctatatcaaaaccgagtatcaaatcttccaccgtctttcgtcagttattgcttttcctcaccgtcgacaaggaattttctgtaaccctcgccgtactgaacacagcgggaaacgcggcttaatgtagccgacgatatatcggtttcctctataacctgattataggttttgccctcaattaaaagcctcgcagcgtaaatgcgctgcgccatttgctcaatttccttatttgtgcacatatcgctgaaaagcgcccggcattcttctctgcttttgagcgacgctataaggtcgtataaatcgtctatcatcttattgtcggtgcctttaatattcatacactacacgctttcaagtgatttatttaaaaagctctttgttttatccgattgcggcgtgccgaaaacctcttcgggcgtgcccgattcttcaaccacgccgtccgccataaacagcaccttatccgatacattgcgggcaaattccatttcgtgggtcaccactatcatagtgctgcccgtgcttttaaggtcctttattacccttaaaacctcgcccgtaagctcggggtcaagcgcgcttgtaggctcgtcaaagcagagtatatcgggttcaagcgccagcgccctcgctattgccacgcgctgctgctgcccgcccgaaagctggcaggggtagttatttatcctatcggtaagccccacgcgcgctattaactcgcgcgcctttttttccgcctcatcctcggtcattcttttaagcaaaacgggtgccagcgttacgtttttaagcacgctgtactgcgggaaaaggttgaaggactgaaatacaagcccgaagtgcagacggttaagccgtatttcattctccgtgggttttttcgccgcgtcgccgtcgaatattattttcccgccgaccgatatagttccgctctcggcaaattcaaggaaattaaggcagcgcaaaagggtcgttttaccgctgcccgaagacccgatgattgaaagcacctcgcctttttcaagcgaaaagcttattccctttaacacctcggttttgccgaagttcttttttatatttttaacttctaaaactgacattgttacacctcaggcgctaaagtagctaagcttcttttctatgtagccgaaaaggagagtaagtattccgctgaaagcaagataaaatatacccgtcataaacagcggccagataatcgccgcgccctttataaaggtctgccccgcccagataagctcataaaccgcgattatgcgggcaagcgaggtgtccttaacaagcgttattatctcattgctcataggcggcacaatgcgctttataacctgcaaaagcactattttgaaaaatatctggctgcgggtcatacccaaaacctgacccgcctcaatctgccctttggatatgctctcaattccgccgcggtaaatttcggaaaaatagcaggcatagtttattataaacgctgcgagtgccgctgtcaatcttccgtttgcaccgccgccccaaatattattgtcaaacaaaattccggggccgtagtatattattaaaagctggagcataagcggcgtgccgcgcactatccatacaatcgttcttataagggcttttagcggaataaagcggctcattgagccgaacgcgattataagccccaagggcaaagcgccgaggagcgtaacagcaaatatttcaagcgtttttaaaaagccgccgcaaagcgtggttattaccgtttgtaacataaatatataattccttttttacagtacaaggcaggcagagaaaactcccccctgcctgtcaaattaaatttttacttctgctcgattacagcttcctgaacgccgtatgtagttgcggtctctttcatagaaccgttagaatacgctttcttaaagaaatcgttaagcttttcagccaaatcagagcccttgcggaagcctacgccgaaatcttcttcatcagctacgcctacggtgtaagccaggttttcatagcttgtgccctcgcctatcatagcgcccgccataagcaggtctataaccgccgcgtcgcttgttcccgcgttaacctccataagcgcgtcggactgtgcgccgacagccgttacactgtagccaaggtctttgagcgccttttctccggcagagcctgcctcagctgcaaatttaaggtccttaacgctttcgattgtcttatacttatcggctacatcctttttaaccactacaacctgcgtgttcttgcagtaagcgtttgaaacctccatgccgttcttaacctcgtcggttatcgtcataccgttccatacgcagtcaatgcttttgcctttaagctccattaatttgttatcccactcgataacaacaaattccgcctcaacgccaagctcctttgcaaacgcctttgccatatctgcgtcaaagcctatccactcgccgctgcccttggtcttttcgtaatccataggagcgtaatcggttatacctataaccagcttgcccttttcctttacaaactcgctgtcggtttgatccttaccttttccgcaggcggtaaacataaccgcgagacacacacacattaccattgccaataattttttcatttttctgcacctctgtttaagttgttgtccttattatacttcattacgataaagttgtaaagtgtttttttaaatttttttaaagttttaaggtttggaataaatgttataaatatttcgacataattttggtatatattcaacaatgtagcatttgtttaagaagaaatttgacaaacggagcggattatggtatattcatttttataacacaatttaggtggagatatttatgtcaatatctgtttccgaacagaagaccgcaaaggaaattgcggagaaatttaatcttcccggcaaaattacgggctgcgagtgcttcggcagcggccatataaacagcacctttcttcttgaaatggcagagggcggcaaaaagaaaaaatacatacttcaggcgataaacaccaatgttttcaaaaacatttgtgcggttatggaaaacattgaccgcgtgaccgcgcatattaaagaaagcgcggcggacggcgaaaagataatcgactttttaaggtcggaggacggacatacatattatatagacgaaaataaaaccttttggcggatttatgagtttatagataattcggtaagcattgatttgcccgaaagcgacgaggatttttaccagtgcgccttagccttcggtaaatttcagaaggcgctcaatgactttcccgcagaaagcctgcatgaaataattccggattttcacaataccccgaaaaggtacaaggattttctgcaatcggtaagtgaagaccgctcgggcagagcgcaccttgtaaagccggaaattgattttattaaggcgcgcgccgacttttaccccgtgctttttgaaaaccacagcgcgggcaagctgccgctgcgagtcagccataacgataccaagtgcaacaacgttttgcttgataacaccacgcgcaaggcgctttgcgttatagaccttgatacaattatgcccggcttttcggtaaccgatttcggcgacgcaatacgtttcggcgcaagcaccgcggcagaggatgaaaaggacctttcaaaggttaagcttgatatggagaaattccgcgtatacacaaaggggtttttagacggctgcggcgggcttttatccgacagcgaaataatgctgctgcccgagggcgctaaaatgatgactattgaatgcggaatgcgatttttagcagatttcattgacggcgacaagtattttaaaattgcctatcccgagcataatcttgaccgctgccgcacccagttaaagcttgtaagcgaaatggaagaccactgggacgaaatgaaaaaatgcgtttcggaatatgtaaaataaaaaacgctgccgataatatttcgtaaaaaggacagtaacatatgaaaaagaaagccgtacttattgtatgcctactctcggtcattgcacttttagcctttggtaatattcgcgacgccattgaagagcacagaaacgcaaaagcttacgacaaagcgtttcatacggttttcgtcaccgaaaaaaacgcggttgccgaattatacaccgcgattgaaagcactgtgaatacgcccgatgacgagcattacgccgccgcccttaatactgctgtaagcacacagcaaatttgctgcaacgcatacggcgaaataagcgattcggcggcaatctagtgtgacaggactcgaacctgtcacactacggtgcgggcttggtatattactctacattttaccgcgatgttaaatcggcgttggaaacacggcggagtactgatgccttaaagcaaataaacacgcttttagagaaaattttattgctttataacgctccactctcatctgtcagcacaacaagcgaaaaggtaaaggaaattgaaggcttttataaatcgctgtcgctgcttaatgacgatatgatgaatttaaccgaatatttatctgatatataaagtaagaggagctgccttaacacggcagcccctctgagcgtgtcgaaaaatcgccacgctcttgggcgggaattccgctcgctcgaaaatcaaagattttcggactgcactccctactcttgcggtacccaaagaaaatattcgcttggagcgcgaattttctttgaccgcggcgccataacaccctcctttaatccgccacaggcggcagtcggttgttatgccccgccaataccaccccagtatccttgaaaacccgcttaataagcgggttttcgcttacaatgtgtttttccgccgcgcatgtcagcggaaaaacgaaaaatgcggcgtaaacgccgcaaaaatagaatttggagtttatcgacagactgagaggagctaccttaacacggcagcccctcttactgttttataattatttttgcataatatattcgtcaatcgctttggcggcggttttacccgcgcccatagcaagaataacggttgcagcgccggtaacggcgtcgccgccggcgtaaactccgtcgcggctggttttgccggtttcctcgtttacaattattccgccgcgcttatttacttcaagtccgcttgtggtggactttataagcgggttgggggatgtgccgatagacattataacacaatcagcctcaacctcgtattcgctgccctcaacgggaacgggacgcgcgcgccccgattcatcgggctctgacagcttcatttcctggcagagaatactcttcacccagccgtcttcaccctcaattttaatcgggttggtaaggaatttaaactcaattccttcctccattgcgtgttcaacctcttctctgcgggcgggcagctcgttttcggtgcggcggtaaaccacggtaacgtccgctcccaggcgctttgcggtacgcgccgcgtccatagcaacgttgccgccgcctactataaccgccttttttgcgtgcataacgggggttgcgctgccgtctttataggctttcataaggttattgcgggttaaaaactcattggcggaataaacgccgcagagcgcctcgccctcaattcccataaagcggggcagtcccgcgcccgagccgataaacaccgcctcgtagcccatatcgaaaagctcgtcaaccgtaacggttttgccaattatcacgttggtatcaatttcaacgcctaattgctttagggtatcaacctcttttttaactattgccttcggcaggcggaactcgggtattccgtaaaccaaaacgccgcccgcggtgtgcagagcctcaaaaaccgcaaccttgtagccctttttggcaaggtcgcccgcacacgtaagccccgagggacccgagcctaccaccgccaccttatgaccgtttggctcggggcgggtaatattgcccttggcgtgctcgttgtgccagtcggcaacaaagcgctctaacctgcctatacccacaggctcgccctttatgccgcgcacgcactttgcctcgcactgcttctcctgcggacatactctgccgcaaacggcgggcaggcttgaggactgcgctattacctgataagcgccctcaaagtcgccctcttttaccttttctataaacgccggtatatgaatattaacggggcagcccgaaacacagggcatatgcttgcagttaaggcagcgtgtagcctcttcaagcgcggtttcctcgctgtaaccgagagcaacctcggaaaaattgtgattgcgcacatcgggtgcctgaaccggcatttcgtgttttttgggatccatattaacagccattattaccgcgcctcctttttaaataaattgcaggtttcttcgtatgcgtgtctctcgaaatcgcggtacatggcgccgcgcttcatagcctcgtcaaaatcgacctcgaagccgtcaaaatcgggcccgtcaacgcaagcaaaccttgtttgcccgcccacggtaaggcggcagccgccgcacatgcccgtgccgtcaatcatgatcgggttcattgaaacaaccgttttaacgcccgcaggcttggtggttgcaacaacaaacttcatcataataagcggacctattgttataacctcgtcgtaattttcgcccgcgtcgatagcctccttaagcggagcggtaacaacgccctttgtgccgtaagagccgtcgtcggtcattatcgtaagcttatcggagcaggcggagaactcctcctccaaaatgactaaatccttattacggaatccaactatggtgtgcacctcgcagccctcggcgtgcagcttttcggctataggcagcgctattgcgcagcctacgccgccgcccacaacgcagaccttgcgcagtccctcagtctcggtaggcttaccgagaggacccgcaaaatcggcaaggcagtctcccacgtttttatgattcagcttttcggtggtagcgcccacaatctgaaatataattttaaccgtgcctttctcgcggtcaaagcccgcaacggtaagcggaatacgctcgccgtcttcatcggtgcggaggataatgaactgacccgcctcggcttttttagccacaagcggcgcttcaatatccatcatggtaacggttgggttcaggtttcgtttgcttacgattttaaacattttacggtatcattccttaaatagatttaaaaatccacctctgtgccgtagtaggtgcatttaaatagcttagccatagtggcagggtcaattgcgcgggggttagagcctgtgcaggcgtcgcccacggcgtttgcggcaatttcatcaaccttggcattaaattcagcctcatcaacgccgaagtcctttaaggtgtgcggtatatcgaaaatgccgttcatactgcctataagcgtgcaaaggctctcaataagcgccttatcgctgctgccgggcagacctaacattcttgcaatatcggcatatctttcagcggctctttcgtcatgcgcgttgtattttataacatagggcaggtaaattgcgttagcacagccgtgcggcaggtgtctgcccttcatgctgccctcgcaaaaagcggctccggttttgtgtgccattgagtgaacaatgccgagcagtgcgtttgaaaacgccattcccgcaaggcactgtgcgttgtgcatagcggcgcgggactcgcgattgcccttgtaggatgagggcaggtacgaggttaccatttcaattgccttcatagcaagcgcgtcggtataatcattagcggcggtggaaacatacgcttcaattgcgtgggtcagcgcgtccataccggtgtgcgctataagcttttgcggcattgtctgtgcaagctcagggtcaactattgcaacatccggtgttatattaaagtccgccagcgggtatttaatgccctttgagtaatcggtaattaccgagaaagcggtaacctccgtagcagttcccgaggttgaggaaatagcgcagaatttagccttctggcgaagctcggggaaattaaagggaacgcagagcgactcaaaggtaacatcggggtattcataaaacgcccacatagcctttgccgcgtctatcggggagccgccgcctattgcaactatccagtcaggctggaatttacgcatagcctcggcgccgcgcataacggtttcaacagaggggtcgggctcaacaccctcaaacagctctacctccattcccgcctctttaaggtaatttactgccttatcaagaaagccgaaacgcttcatagagccgccgcccacaactactatcgcctttttgcctttgaggtttttcaggttttccattgcgttttcgccgaaataaatatctctgggtaaagtgaatcttgacatatgccattcctccgttttttatttggtaagtttattatacacaattttaaaataaaacggaaatatgataaatatatatcaggtatatgttacagtatatgtcatttttctacacaaaaagttaaattttttaagctttgctttcggcggacagtaattttattaccccttttcccgctttgaaatgtatttcaaggcttttaaatgtaaacccgtacactctctcagggtcggtttggtaatgcgggcgcgggtcttcctctaaaattttctttaattgcaaaagcgtttccgcgtccagtgtgtatgcaatgctttcgggaatttccacagtcgccttttcaccgaatttttcagcggcaaagccgcaaaccgcgtgggggtatgaatcggcaaagcttaaatacggctttatatcgtaaatcggcgtgccgttcatcatatcaattcccgaaacctctagcaccgcgcccagctttttatcaaggcttattttttcaagccttacggcagaaagccctatggggttagggcggttgggcgagcgggttgcaaaaactcctacacgcttatttccgcccagcctcggcgggcgcaccgtgggcgaccaatcgccgcccttaaagcccgaaaattcccacaaaagccatatatgcgagtattcttcaagccctcgcacggcggaaatatcgcggtattcaggctcaaacactattttcccgcgtaaattttctactaatccgctttgccgcggcagcccgaatttttcgggaaaatcggtataaattttcgctatcggacgcattatccgtcgcccccggcaggtgtatcggatgacggcggagtgggctcggtagacgagctttccgatgaggatgacggtgtatcgggctgtgaggtagaggtgtcggacgatgtgtcggacggcgttgatgatgaagatgtgttttccgacgaggttactgtggacgacgacccggaagaagacggtgcagagctgcttgaagacgatgccgacgaagaagacgcggcagatgaagaattataatagataggcgtttcaacctttgcaccctttttatagtagcctatgccctttttaacaacgtcctcgctgtcctcaaattcctttacatcaaggtttctgtgcacctcggtcataacgtcgcgccatattttagccgccgcgccgccgttatatatattgtgcgataagtcaaagccgtaccaaacggagcctatataataaggagagcccgcaaccatccaaaggtcgtaggattcgcttgaagtacctgttttagcatatgccttgagcttgtagttaaagccccttattccgccgccggtgccctcgctgccgtaaacaacctcttgcaaaaggtggttcattatggtggcggaggcagggcttattacctgctcgccggtatcgtcatatttaattatggtatcgccgtttgcgtgctttatttcgtaatatgtcgtcggcttgtggtaaacgcccttattgccgaaaatcgcgtaagccgcggcggattcggtggtggtaatgccgtagtgcgtgccgccgagagccagcgccgcaaggtttttgtcagcctcaaccaaatgcctgcagtgcagcttttgggttaagaaattatacgaatcggtaacccctacctcttgcagaagccgcacgggaatagtattcattgatttgcgtattgcgtagttaagggaaaccgtgcccttatagtagccgtaccattccttaggtccgcttttgccgtcggcatagtatttttctatcggcttatcgagcacgcgggaggtataatccacaatgttcttatctattgccagcgcgtaaacacctatcggcttcatggtagagccgggctgacgcggcgaatcggtagcgcggttaagcccgcggtttgtggttttttcacccgctccccccactattccgactatatgccccttatagtccataaccgtcatagcagattgcgcatgcgcggttacgccgttatcataggtcgccttttgggggaaataggtgtcaatatttgtgtaaaccttttccatttgcgcctgtatatcgggctttagggtggagtatattttaaagccgccgttgtagaacatggtagaagccatttgagtgctcaaattatacttttccgcaagatcgtctattacctggtctatcagcgcgtcaacaaaatagctgtttatttcgccctcgtattcgtccttttgcgaatcgtctattttaagctcggtgttatacgccttatcgtactcatcgtagcttatcattttaagctccagcattttatcaagcaccgtttgccgccgctttttgttttccgccgcgcccttttcggttacggggttaaaccttgaggggtttttggttattgccgcaagggcggcgcactcggttaaattaagctcgcttacatccttattaaaatagtagttcgccgccacctgaacgccgcaaatgccgttgccgagggatattgtattaaggtatgcttcaagtatctctttttttgtgagcttgcgggttataagtgttgcgcgcacaatttcgcgtaatttgcgcatggcgtcgcggtccttatcgttcgtaacgttttttataagctgctgcgttatggtggagccgccgaattcggtggaattaaattttaaaagcttattacccacagccgcaaaggttcgcttccagtcaaccccgcggttttcgtaaaatcgctcgtcctcaatggcaataaaggcgttgcccaattgcgcgggcattttatcaattcccgcccacaggcggttttcgctgccgtgcaggcggcggtattcctcccactgccccttagcgttctgaacgtatatgaccgtagtcatattcatttccatatttttaatattgctcacgattttattggacgagaaaaagtctatcttcctatccgattttatataagtgggaataacaaagattaaaaaaacagttgttacaataagcagccccgataaaaacacggtaagctttttaaaaatcttttccatagttccctgcctttcctgcatactgatttgattataacactaacttgcttatttatcaaatattttttaaacattcataatgtatttaaaaattaggaatataatgcataggtctggaggaatatggatgcttaaattagaaaatattaaaaaggactatattaccggggacaccacggtgcacgcgcttaaaggcgtgagcgttgaatttcgcaaaagtgaatttgtatcaatactcggtcagtcgggctgcggcaagactacattgcttaatattataggcggacttgacaggtacacaagcggcgagctttatataggcggcagggctacaagcgactttcgcgacagggactgggataactaccgcaaccactcggtaggctttatttttcaaagctacaaccttattccgcaccaatccgtgctttcaaatgtagagcttgcattgacgcttacgggcgttccgcgcgccgagcgccgccgcagagcggcagaggcgcttgaaaaggtagggctcgccgaccagtttaataaaaagccgaacgaaatgtcgggcgggcaaatgcagcgcgtagccattgcccgcgcgcttgtaaatgaccccgaaatactgcttgccgatgagcctaccggcgcgctggacagcgagacctctgttcagataatggagcttttaaaggaaatttccaaggatagacttgtaataatggttacccacaaccccgagcttgccgagcggtactccacgcgtattataaggttgcttgacggcaatattacagacgataccatgccctactcgggcggcgaggaggaaaaaacggcggagaaaagcggtaagcgcccctcaatgtcgtttttaacggcgctttccttatcccttaacaaccttatgaccaaaaaagcaagaacctttttaaccgcctttgcggggtctatcggcattataggcatagcgcttattttatccctttcaaacggcgtaaacgcgtatatcgcgcgtgttgaggaggaaacgctttcaagctaccccataacgattgagcaggcgggaatggacgtaagccaattggtaagcgaccttatggggaaaaacgagccgggcggcgaccgcgaggacggcaaaatttacagcaacaacgttatgaccgaaatgatgtctaccatggtgaacggcatttcggcgaataatctttcggaattaaaaaagcatattgaaaaaacctccgccttttcagataatacaagcgagattgagtataaatattcaacggttatgaatatatacgatgaaaagggcaaccgcgtaaacccgaataccgtgttttccaccgtattccccgaaagccagagcagtggcagcggaaatatgcaaatgtcctcctcattttccaataccgaggtatggacgcgcctttttgaaaacaaggaatttttgaaaaagcagtatgacgttattgctgggcgtatgcctgagaaatacaacgaaattgtgcttgcagtggataaaaataaccagataagcgactacgcgctgtattctttgggactaaaggattcggcagagcttgaagaaatgatgaaaaaggcgcaggcaggcgaaaaaatagagcctaccgcagaagtaagctactcatacgacgatattctagggcttaaattcaagctgctttgcaataccgattattttgaaaagaacgccgacggcacctggagcgataaaacagaggattcgctttacgtttcttcaaagcttaacacagcggcagaggatataaccgtggtgggaataataagacccgccgattcgtcggttgcaaatcaaacaagcggctttgtgggctaccccgaatcgcttatggagcaccttataaacagggtgaacgacagcgaaatagtaaaggctcaaaaagctgagcccgaaaagaacgttttcacgggcagaccctttgagaccgacgcggataatatgacctatgagcaattgacggcatatatagccaccctgcccgaaaaggagcaggcggagtataacgcgtatataagccaaatgaccgccgcagggcagaccaaggagcaaataaccgagcagtttaaagcggcaataaaggaaaaaagcaacaacgccacatatgacggcaatttgaaacttatgggcgtatcaagccttgatgagccttcggttataaatatctaccccaaggattttgaggcgaaagaaaaaatttccgaccttataaccgaatacaacaagggcgtgggtgacgccgaaaaaataacctacaccgattatatagggcttatgctctcatcggttactacgattataaacgcaataagctatattttaattgcgtttgtaagcatttcgcttatagtttcttctattatgataggcattataacctatatttcggtgctggagcgcacaaaggaaataggcgtgctgcgcgctatgggcgcctcgaaaaaggacgtttcacgcgtgttcaacgccgaaacacttatagtgggctttgccgcgggggcaataggcattgcggtgaccttgctgctgcttattcccataaacgcgataatcgccgccataaccgatatttcagggcttgccgtgctgccgatagcgggcggtgttgcgcttgttgttataagtatgctcttgacccttatagcgggcttgttcccctcaaaggtagcagctaagaaagaccccgtaaccgcacttcgcagcgagtgaaaacaaaatggttacaaaataaaaattgctattgaaattttccgctaaaaggcttatacttgtaaagtatcattttaagcacttggcaggggctaccctgtcaagtgtaattttcacggaggaattttaatgctgaaaagaatattaccgctggcgctggcattgtgtatgctcactatggcaggctgcaaaaaggaacaggacagattaagtgtagataagggctcggagccctcggtagtctccgaaacaaagcccgtaacatataaaaacccgcttacaggcgtttcgggtatatctgaggaaaaaaccaaaaaccgtccggtcgcaattatgataaacaatatttcaaccgcccagccggtgcaaacagggcttagcaaggcagatattatttacgaaaccgaggttgagggcggaataacccgtcttatggcagtttttcaggatataaccactgctgaaaagataggcgcaatacgctcggcacgctacccctatgttgaccttgcaatgggtcacaatgcaatttatattcactgcgggcaggataataaatactgcgccccgcacttaaaggatactgatgacgttgaccttatggtaaagaattacggtgtgcgcattaaaaacggattagcctctgagcacacattgtatgcttacggcgaaaagctctggggctcgcttgtaaaggacgggcacaaaacaacctcaacagacgttaccccgtgggcaagctttgccgaggaggacgcgcccgtaacgcttgaaagtcaggcaaaaaccataaacattccggcgtctgccagctaccgcacggtattcaagtatgatgaggcaaagggcaaatacacaagatattacggcaacaccattcgcaaggattatttcaccggcgaaacggtggatatgaaaaacgtatttattcttttcactaccattcgcaattatcccgataattaccaccgccaggtaatgcttgggagcggcgacggctactattgcgtaaacggtacctccaccccgattaagtggagcaagggcaatgccaaaaacagctttaaatttacaaagaccgacggcagcgagctcaccgtaaacccgggcaacagctgggtaagcatagtaaacataggcaacaaccccacattcggatgatttttaatgcggaattcggaataacaaatttacagccctgctgctattacttaaatagcggcagggctgtgctttatttatatggctctccctgtataatggatagatgtccacgcaatgctgtttcggctccctacggtgtggcggaatatcttcggctccctctgacgagggaggcaatcagttccacatttcgctttttcggggtttgttaagctcctgcccacgcttttcaagctctctcataaaatttactgccgcaataaatccaagctgaaagtatgtatctcttattacggcatcgcgacctgcaatttctttataaaatttatcgcgttcatcttcatttttaaaataataattgataagcttttcggtgcggcactccatatttcttattgcggtttcatagtcaaggtcttctttttcaataagactttgccctaagtccaaaaaataatcgcttatttccgatagcttacatctttttaacatatttgaaaattccatattatttcaccccattgtatattgcacttatacaataacacattattgtgttattatcaacacttttttgtgttttttggtagaatgattttggggtgaagtataaggtgaaatataaatatcaaagaatacgcgatttaagagaggacaacgataaaacccaagcgcaaattgcagaattactcaacgaacacacaacgcagtatcagcgttgggaacgcggggaaagcgaaatacctgcgcatataataaaggcattatgtatttattataatgtatcggcagattatattttaggtctgcccgaaaatttacctttcccgaaagggtctaagggttaaataatcctcaaaaaaaaagcacggcaggcggataaacctatccgtctgccgtgaattcttttatcagtaatcctggttttcgttcttcttgttctgattattctgattattcttgttctgttccttgttctggttgttcttattctggttgttgttctggttattcttgttctgattgttttccacaaaaatcaccccgctttcagcctttattatttgtcggcggggtgaaaattatacttatattccgaatattttttcggcgttttcaaaagaactgcgcaaaatgctttcgcaatcggtattgcgcagctccgctaatttttcggcgacaagtaagataagcgccgaattatttatttttgagcggtatggcacgggcgctaaatagggtgcgtcggtttcaagcagaaatctgtcgctcggcagagctgccgcaatttcgggcagcttttttgcgtttttaaaggttaaaacgccgcctatgcctatatacatacccaaattaaaaatttcctttgccatttccgcgctgcccgaaaagctgtgcaccacacccttggggcggtgcttttttaaaagctccagcgtatcggcgtgggcttcgcggtcatgcactattacgggcaggtttaacctgtttgccaaaacaagctgttcttcaaaaagcgccctttgctgctccttgttatcgtccacccagtaataatcgagccctatttcgcctattgccacgcattttttgcggcgcgcaaggtcttcaatttccgttacctctccgccgcctatattatcggggtgtatacccaccgcggcgtaaaaatagggatacttttcggcaagcgccagcgctgcttttgaagacgcggtatcacacccgcagtttacaacgccgcaaacgccgtgagcgggcagctctgctaaaagctctgcgcgaatttcgtcgaatttcgcgtcgtcatagtgcgcgtggctgtcaaatatcagcggttctgtatatgggtaattcgggaagtccgtcatcttattttgctgcctgcgggtacgttatcaataaacagtacctttacgtcattatcggcgcaatccgccgctaaaatcattccgtttgactctacgccgcaaagctttgcgggcttcaggtttgccaccacaattaccgtgtgacctataagctcctcgggcttataatacatagcgattcccgaggctactgtgcgcgataagccgctgccgtcgtcaagggtcagctttaaaagctttttagccttgggaataggctcgcaagccgtgatttttgccgcgcgcagctctaccttcgcaaagtcctcaattcctatttgctccatagtcacaacattttcggcttttttctgctccgctgccttttccgccgctatttcggctaaaaccttttccgcatctaagcgggcgaaaagcggagtgggcgcgcctacggaatactcggtaacagcgccgaaagcaagctctgtgctgccgttatttaactgctccgcaattgattttgagctatcgggaataatgggcgaaagcataagccccaaaaggcggatacattcaagcagattgtaaagcacattttcaagatatgcctttttgctctcgtcctttgcaagcgcccagggggcggtctcgtcaatgtatttattgcagcgctttgcaaggttcataaccgcctcgcacgcgtcggcattgcggtaattatccataagctcataatactttttaaccgtatcgttcgcggtatcaatcagctctttatcgcaaccttctgtattttcgccttttgtcaccttgccgccgaaatacttattcgtcattgcaattgagcggtttacaaggttgccgagggtgttggctaaatctgcattgtattttgtaataaagctttcgtaggttatagttccgtcctgcgcaaagggcatttcggaaagcagataataccttaccgcgtctattccgaagcgctttgtcatatcgtcggcgtaaattgtgttgcccttggattttgacattttgtcctcacccacaagcagccacgggtgccccaaaacctgtttcggcagcggaagccccagtgccattagaattatgggccaataaattgtgtggaaacgcactatatccttacctataacgtgcaggtcggcaggccacagcttttcaaactgctctgagctgccgtcggggtcatagcccacacccgtaatatagtttgaaagcgcgtctatccaaacgtaaataacgtgcttttcgtcaaacggcacgggtatgccccacttaaaggagctgcgcgaaatgcaaaggtcggaaagcccgggctttaaaaagttgtttatcatctcgtttttgcgggattcgggctttataaaatcggggttctgctcgtaatattcaagcagccgatcctgatattttgaaagctttaggaaatacgcttcttccttggagtctataacctctctgccgcagtcggggcatttgccgtctataagctgcgaggcggtaaagaacgactcgcagggaacgcagtatttaccctcgtaatgtcccttgtaaatatcgccttggtcataaagctttttgaaaattttctgtattaccttttcgtggtccttatcggtcgtgcgtataaatttatcgtaatcggtgttaaggctgttccatacctcttttatctgcgcggcgattttatccacatactcctgcgggcttatgccctctgccttggcgtattcttcaattttctgcccgtgctcgtcagagccggtctgtaaaaacacgtcaaagcccatcatttttttatagcgcgctatcatatccgccagcactatatcgtaagcgttgccgatatgcggctttcgcgaggcgtaggctattgccgtggtaatgtaaaacttcttcttttctgacatttttcttcctcctgtattacggtttacctgtaagataaagtattgcagagaccgccgtgcttataagacagtaaagtaataccgccgcgctgccgagaacagagcccgagccgctgaacgaggtatatgcaaacataaccacgcccgctacacagctaagcgcgtaaaataccgccagtaaaaggcttgatttctttattttaaccgcgctgctcaccagtgctgccagcgcaacggggttacccttatacgcggcgggggcggagcaatgctctgtatatgttaccgcgtttttatacatatggcagccggctgtgctcataacctttaccgaatcatcgtaaagccccatataatcgcatatcatttcttccgttaggttcgggtcggagctgtctataagcattgtaatacccatggcggatattcttctgaactcccgcgcaagctcgggctttaccgtgtactgcacggcaagcagggcgcaagccttatcgtcggttgcaacgtagacggggaaataccccctgcgtaaaagcttgcggtcggtttcaatactcgggacgtcaattccgtgcgcctccataagcgtgcggttgcccacaaacaaaagcttgttgtttacccagccggaaacacccattttgtcctcatatttaaccgtatcggaatcgggcattacaaagtcgcccactgttcccgcaatttttttgaatataggggctagcgggcttgaaaggctgtcggtaagggacgctgcgcgcattatggtatcgtcaatgctgttatccgataaaagctgcatattgtgcagcgttaccgtgcccgaggggaacaggtcctcagagcttaaaactatggcgtttaccttttcaaggtattcggcgcccatttttcccgctatttcggcgcccctgcgcgcaagctttttcgaagcggagtaaagcggcatatcgtctataaggaaaagcaccggcacggcggcaatgcactgcaccacggcggcgctgtaaaagccgtaaagcataccgtcaaaatatgctgcgcaggcaaagcccagtattaccgataaaagcagcgataccaccgttataacaggcagcttgccgctgaaataaacgcggaacgaggtgtatttcatataatcgtcaatatgcgccgttctgcgtggggcagctgctaaaacatcgccctcaatcgaatttttcgccatagcaaacgtaacggcggggtcgtttatcagctttaccgcgcgtttcggcttattgccggctatttgcctgagtcctgtaagggtgtgcgccgcacggaaaaacgcggcgacagagcgcactgacagtataaacgcggcaagcagcagcatattaagcgttatttcgtttttcagtatgcctataaccgaataaagcattaccgaaagcgaggcggtaaccgcgaaaatatcgggcgttgaaaagcggctgaaaattttcgggacgctcttaaacatatcaaggtttataagtattattataccaagcacggcggtgtataccgtcatactgacttttgtctgcgcaataagcagcgccgacataaacggcagctccgcaaacgccgttataagcgttaaaagcaccgttgatacacagcgcaaaaagctgccgcgcttaataagcgataatttccgcaaaaagtgctttgttccgctttcgtcttcaaattcctcggcaggcttgtagtcctcaaactcgttttgctcaaggcgggtttcggggtctgcgtcgtcatcggtgctctcgggcaggcgtgacagctcacccgtcaggtcaatagaccgtgtttgcgagcttatgctgattcgggaggttgagtcgctgtcggtcacgggggtgaatttaatagtcgccgtgcccgaaatatcgggcatttcgactgcactctcaccgctgtccgaatcaatatccgatataatgcgcggcacattggtttgtatatcccgcgcggcgggcattttttcttcaaatacctcgcgtttggggggttcgggcactttttcgggcgcggcgggcttattgcgccctaaatcgtcaaattcaatttcatatttttccgagagcctgtcaagcgttttggcgctttggttgtttaaaatatccgccacgctttcaagcttgtaggtcggcgtttccttcattgccgagtcgtgcccctcatcgtcaataataaacgggcggcacttttcaagcagcgatttttcgggctttttgggtgcggcgggcttttcgggtattacgggcttttccgccgccttttcaggctcaggcttagtattatcaaaaaaatcaaaatcaaaaagcgactctgagtttaccggggtgtttatttccggcacttccggggctttttgcggctcggggcgggtcttaggttcctctgccgcttttacctcagcgggctttacaggctcctgtttcgccttttctgcctcctcctgctgtgccgcaagcatacgctttttaagcgcctcaagcgcgcctgtcggctcggcgtttgcgggcgtaaagctgttttgccccagcacctcctcgggggtcagcgcaccgtggttttgaaatgaattaaaggagttgctttccccgaagctatcgttattatcaataagtgaaaacagatcgtcgttatgctttcccttatacatcttcaattaaaatcacttccttggctttttatcggcattgcggctgcgcactacctcatacataagtattcccgccgcaaccgaggcattgagcgaatttattttgccacacatgggcaggcttataaccgcatcgcattttttggcggtaagcgcgcctattcccttgccctcgttgcctataaccaacgcgcagggggtatcaaaatccgttcttgtgtaatcgtcgccgtccatatcggcgccgaaaacccacacgccgtgctgtttcagcgcgtcaatcgtgttcgcaatatttgtaactcgcgccacaggcacatattcaagcgcaccgcaggcagcttttgcaaccgtagcattgagcgaagcgctgcggcgctcgggaattatcaccccgtgaacgcccgttgcctcggcggttcttataatcgcgccgaggttgtgcgggtcttcaatttcatcgcaaattattaaaaagggcttttcgccgcgcgtttccgccagcgcaaacatatcctccactgtagcgtactcctgcgaggcaaacattaccgccacgccctggtggtttgcaccgccgcagtaataatccagcttttgcgggcttatttcctttataagtatgcctttagcgcggcattttgctattatcgccgtaacagagccgccgcccgtgccgtgggctaccaaaaggcggtctatctccctgcccgagcgcaaagcctcaagcactgggtttctgccgcatattatgttactgttttccattagctttatcccatctataaatattcaaagtttattataacacaactttgaaaggaattaaataggcaatttattaaataatatatttaattctcagcggctttttcatttgtttggtaaaatctacggttgaccttgttcctctgctttttccgtcccaaaagcaaatcacataatcggcttttttcaccatttccgaattgcgccgcggtcccgcgctttttccgtacctttcccaatcgggataataatatatacacttcattctgttttcgtgcgcataacgctcgcccagcttatcggcaccctttgcaccgcctgaaataattatgattttatattccttacgaatatttttaagacacatatcaatatatttctttgcaacgctgtaatcctcaaagcttctacaccccgctattaaaacatacttggtcggacgtttatcgaaaagcattattttcactttcctttcggtcttattttatactactttatcgcatatttcaag

SEQ ID NO: 3370 - DNA, 8694 bp, Unknown
  16S sequences of unknown bacteria
cggcagctgctaagccaaaagcgcagataatactttgtgtattatcgagcattttggcaacgcagatgccgtgccgcagccgccggagcggtgcttaagccgtcaggcgggaattatgcggtgttgccttaggttagccgctgcaaagcgttacaaatcgttccgcagctttacggcactccgttcggcgatgcactgctttaaggcgttgatcatcttggcttcgtccagcggtttggccaggtgaatatccatgcccgccagtcggctgtccataatatcctcggaaaaagtattagcggacatggcaatgatggggacgatttccgcgtcggggcggttcatggcacggatggttctggcggcgtcccagccgttcatacgcggcatcataatatccatatagatcacgccgaaacagccgggtgcggactttccaaacagctctacagcgcaccgtgcacagcacatgggtcacattgccggcctcgtcccgtttctttgcaatgaagcgcagagaatgccagcttccgtcgcacatgcggtattctgtggagatatattcttcgtttttcagtctttccgcaagggtgggcacatctaggaaacggcggaccaggtcgcggtattcgggcaccacagtggcatcgcagagctgatacagcttctccgaggcacagccgttgtttccggtcaggcggtgcgtcgtaagaaaactgtcccggaaaatatgttgccgcggtaagttgacgggcgaccaatggtcgcccctacacacgcaataaggcaaaaatgcaattttttgacggtctgatatactatataaggtctactgcaacacaacgcaaaaggcagccccctatagttcgctaaagttacatttagcgaacttgtgcatttctcttttacgggaggcttttgcttcccgatgcccccttctcccgtcatctcgttctccctgccgatgacttttatttccgctttacatgggcagcgcaacggtaaatacggttcctgccccttctgccggctcatcctgtactgtaccgccgtgcagtgctgcaatttcccgcaccaacgccaaacccagtcctgcgccgcccatttcgcggcttctggatttatccacacggaaaaacggttcaaagatgctggttctgtattcatcgggaataccgcagccggtatctgcaacgcgcagtattgctttgccgtttgaccggctgatcgtaatctgcacagaaccgcccggctgattgtacttgatcgcattttccacaaggttgaacagcatacggtaaatcagagcatcgcttccgataatatgaatatcctcacattcctgatgcaaggtgatctgctttttctgggccagcggcgtcagatccgtcacaatttcatctgccagcggcgcaagctcaatgcagtcatcccgcggaacggcctgcaaattgctcatttccagcagggtccgtacaagcgccgataaacgggctatctgctctgtctgaaagtgtaccagctctgcggtttccgcgtccgtattcatgtgatcttcggcgaagatttccagttttgcctgcatgatggccagcggtgttttcagctcatgggctgcattcccagcaaactgtcgctgtaggtcaaaggaatgggccaggcgatccagcatttgattgacagattgacttagctgccgaaattccgcaacggtattttcttccagccgtacatcaaccagattatcctgatcgaccttctcggcctgctgtgccagctctttcagtggttccagcgctttgccgctgataaaataagcaatcgctgcgctgaacagcgtcaccactgccgtaatgcaccaccctttgcggccaaaaatcgtctttgtatcgtaaacctcttgcgagaattgcaccagaaagtctgacatctgatcttcggggatctctatggtcagatcctccccgccgtcctgttgatattgtaaaatgtacccgttcagattgtccataccggaggcaccggagcgatacagcaacaaattcaggcagatgcaggcacccgcaatcagtaatgccgtcataagtgtgatgcgccattgcaaagataatcgcttcattgttcgctctcccccacttcatagccttctccgatgcggtttcggataggatcataccccagtgccgtgcgcagctttttgcgcagcgccgagatatgcacccgaatcgagttgctgaacgcatctacgcggccgtcccagacatgttccatcaattcctcctgactgacagggcgtccctgatgcagaagcagatattccagaacactgctttccttgcgggtcagtggaacaggttgaccgtccaccatagccacccggctcttggtatcaaagctcagtctgccgcatcgcaggcaaacattgcgctgaataaactgccgccgtgtcaggctgcggacgcgggcttccagttcggccaaatggaacggcttggccagataatcattggcgccggcgtccaggccttccaccttgtccgcaatttcactgcgggccgacagaatcagaaccggcgtttccaaatcggtctttcgcagtgtgcgcagaactgtcattccatccactcggggcaggttcagatccagcaaaacaaggtcataccgctctgccgccagcatttccagcgcggtttccccatcaccgcagtcatctgtttcataccctgcacggtgcagctttctggcaacgctttcccgcagggacggctcatcctcaaccagcagcaaacgcataataaacgctccttatataaactgtgtttctgtttactaccattataacagcttttgctaaaatctgcgttaattttttcttagcagaaaatttatacccgttgtgctatactgatctcatcaagacaaaaaggaggatcgaaatgttgagcaaaaaggcaatcgttcaggtgctttttctgctggctgccgttatgatgatcggttacggggcatggcgcggtgaggcgggcactgtctttacgaaagcaattcgattatgtatggagtgtgttggcattggataagaatcgttcgcattttctggcccgtttccggggactgatccaggcaggtgcagcactgctgacaaacatccatctgccgaattttctcaaaggaacgctttatcagggcaaggggaaatatctctgcgttccgggcctgaactgttactcctgccccggcgctgcgggggcctgccctatcggggcctttcaggctgtgatcggatcgtcaaagtttcggttttcctattatgttaccggcattttgattctgctgggcgtgctgttggggcgctttatctgcggttttctctgcccgttcggctggctgcaggagcttttgcataagattccctctcccaagctgtcaaccagacgcctgaaaccgctgcgctatatcaaatatgcggtactgctgatcatggtcgtactgcttccggctgttattgtcaacacatccggcatgggggatccgttcttctgcaagtacctgtgtccgcagggcgtactggagggcgcaattccgctttctcttacaaacgcgggcatacgagctgctttgggaaagctgttcagctggaaattctgcattctgctggcagttgtggtaggcagcgtggttttttaccgcccgttctgcaaatggctgtgccccttgggggcggtctatgcacttatgaatcatgtatccctgtttcagatgcgcgttgaccgcgatacatgtgtttcctgcggtgcctgcgcaaaagcgtgcccgatggatgtggatattaccaaaacaccaaaccacgcggagtgtatccgctgcggtaagtgtataaagtcttgtccgaccaaagcgatctgctatcagtacggtttcggcgacaagtcaaaaacagaaatcaaggagaattgacaatgaaacgtttttttgcatggatcacagcccttctgatgctgctctccctcgctgcctgcagcagcacgcagacaagcactgcggcagcttcccagcaagcatctacttctgagacgggcaagtctgaaaatgagcttatcgcagaggaaaacgatattctggcggcaaataacgccctgtgggaaaaggtttttgcctccatggacaagaatgttaccgacaccacactaagcagcaattacggtgatattcttatgagtgcgttggatcatgcgaaggaccagttcaccgatgaagaatatgctgctttaaaggccgatgtggacaaaatccgtgagatcgaaacacagatcgcagcactgccgcaggatgaagctgccagccagtctatgacgcagacggccagcacattcccgcagtttgaaggaaaggatttggacggcaacagcgtaagcagcagtctttttgccgataatgcgttcaccgttgtaaatttctggttcagcggctgcaagccctgtgtggacgagatggacgaccttaacgcattgaatcagcgcattcaagagcagggcggcgaggtgatcggtatcaacacagaaactcttgatggcaacgcggacaacattgccgctgccaaacagattctggaacaggccggggctgcattccgcaacatctattttgactctgccagtgatgccggtaagtttgccctcggcattatggccttccccactacctgcgttgtggatcgtcagggcaacatcgttggggaaccgattatgggcggtattgataaagaggataacgctgccacactgcaaaagctgatcgatgaggctcttgcgcagtcgcagcagtaaataagaaaatagcttaaaaaactcgcagcagtcattgatacgaaagtaccctttggctgctgcgagtttgtattttgctgcgccgccgtgtggcgggctatgtcccctgctccagggcttactgcccggtttgctttccctctatagcatatattttgtcttttcgattgtatatcagcattttatacttgacaaagtcaagcgtatggactatactcttttacgaaaggagatgctgcatccaccatgtatcaaaaggccctttcctactacatcgccatgctgtatcgcagctttgcggatttcacaggcggcaagctgcaggaagtcggactaaatttcgggcttttgttttttattgtatatatcggaaaaaagccgaactgtacgccttcggaattgacaaaagcattgtcccttgactgggggcacagtcaacggtgcatcaatcgtcttactgacgatggctttattaccaaggaaaaatcagggcgtcactatctgctcaacctgacagaacgcgggcaggaggcttttgaagccgcccaccggatattctttgactgggacgacagatttatgacgaatctgactgcaaaagaaaaggaacagttgcttgccttattggaaaaagcaacagaaaggataccgcaccatgtacgaaacgattaacagccccatcaattacggcggtttggaattgaaaaaccgcatcatttttgcccctaccacctttggccttgcggaggacgaatactttgaaaagatccgcaagatcgccgcaggcggctgcgccatggttatcatcggtgacgtccccgtcggcaaaagccaatttgagaaatctctttttgataaaaaaggcttcgcctattatcagaagctggccgaaatcgtccacagctatgactgccgcatctgcgcccagctgcaccagaccgactccaatatgctggccatgctgaaatacgtgcccggcgttctgacgaagaagatttcaatggaggagctgcgtcccctgctgaatgccgaggttgccccttacatcagcaagctgtccgcccgcaagatccataaaatcatcaacggcttcggcgaggccgccgtgctggctgtcaaagccgggttcgatatggtgcaggtccacggtgaccgcatgtgcggcagcttcagctccaccgtctttaaccaccgcacggatgaatacggcggcagcgccgagaaccgtgcccgctttgcggtggaggccgtcaaagccatccgcagccgtctgccggagattcccatcgactacaagctggccgtccggcaggaagatccccactatggcaatgccggtgtgctggagtccgagctgggtatttttgtaccgctgctgaccgatgccggtgtgaccagcttccatgtaacgctggcgaaccattccagtctggaggacaccattcccccggccaaccacccgtacttcaaagagcagggctgcttcctgaaattctgcgatgaggttcgccaatacacggacaagcccatcacgggtgtcggtggtctgaatcagcctgattttgtagagcagcagcttgcaagcggacgcatcacctgtgctgccatgagccgccagctgttggctgacccggaatggccgaacaaagtggcctccgggcagatcaaggagattcaccgctgtgttcgctgcaacaaaaaatgccttggcggcttgcagcagcatcagggcacccattgcatttatgaaaaggtatgacctgtgaaatacgctattgtattcagcagccagaccggcaatactaaacagcttgccgaggctgtttcctccgttctccctcaggcagatttgtgtttcttcggttccccgtcacaggaggctctgcaggcagagcgtcttttcatcggcttttggacggacaaggggcgctgcaatcaggaaatcaccgatttcctgaaaacgctcaagggcaaagaggtgttcctgtttggcacagccgggttcggcggcagtcaggaatattttgacaaaattctttctgccgttcaaaagtgcctcggtgcttccaatactgtcatcggcacctacatgtgccaggggaaaatgccgcaatcggtgcgggagcgctatgtaaagatgaaaaacagccctctgccgatcccaaacgttgacaaaatgattgaaaactttgatactgctgtttcccaccccgacgaaacggatttgcagaaattgaaatatgccgtggcacaatgcataaagcgctgatacaaagtaggtcctaaaaacacacttccgtctggttgcctgcgcaccggcgctggcctactgcgccgttatgacgatccactttttaaagcagcggcagacccaaccctgctgagccgccatgaccgcttttaccgcagtcatagcgagcccctttatttgcttatcaattgcgcacggctgcacgcgggcagaccttttacggtctgccctttttctttgcacgcttcctctgttctcgacaggtcggctgcttatatgctatactggtaccatcatacaaaggaggcgcatccgccatgaagcgcagcaatatccatctgcagtacaactggaggagcgctacggcagccgcaccctgctaagcggtatcctcatgactgcgcttgtgtccggcattgtatttatgctcatcatgctgtccagcctggccggcagtcggaacggcggtattccgatcactttgatccttgtcggtgcgctctacctgagccagcaggtatatgatattttgttcgtgcaggacaatgtagccaactttatgcacatcgtcggcggcgcctgcggcactgtgtttggttttgccgtgcgcagaaaataatacgcggaggtttccttcatgaagatccttgtcaccggttttgacccgttcggcggagagaccgtcaatccggcctatgaggctgtcaaactgctgcccgacaccattgccggggcacagatcatcaagctgcaggttcccacccggtttgctctttcctgcaccgttctggaagccgccgtaaacgagcaccggcccgatgcggtcatctgtgtcgggcaggcaggcgggcggtccgccatcacaccggaaagagttgccatcaaccttgcggacgcaagcatccccgacaatgcaggcgaccagcctgtggacgagccgatccggaaggacggtgcgcccgcctacttcacctctctgcccgtaaaagccatggtgcaaaaaatgagagccgccggtattccggcagccctctcctacaccgctggctcctttgtgtgcaactccctgatgtatacgctgctctatctcatcgacaggcagtatcccgctatgcggggcggctttatccatgtgccgtatgcgatggagcaggccgtcagcaagccgctgggaacacccagcatggagctgcatcaaatcgcgcgcggccttgcacttgcggtagaagcagtcgtcgaaaacgagcgtgaccttaccgtgaaccggtaatacaggcccgatttctcgaaatagtgcttgcattttttagggttcgtgctataatcatagcatcatcacagaataggaacgggacaatggggtcacgcacaggcaaggtgcgcgatcccgtttttttcgtctgcgcacaaaggcgtgccgcacttcattgggtgctgcacgccttttggcttttcttgttgcttgttttccgaatggagggatttgaaaatgcttaccgcacgaattgaaaaaatacgtcaaaactatgtaaacgccaaaccgcagatttcctgcgaacgcgccgcactttggacagtatcctaagacatccaaatctgctcttattccttttgacc

SEQ ID NO: 3371 - DNA, 8005 bp, Unknown
  16S sequences of unknown bacteria
cctgcgcctcggtgagttccaggtcttccgccacttttgtcttgtgttccaacgcgcttcgccgccctttcgtctctatgcctattgtaccatatttcctgcgcttcttcaagcttttttcgcgaatacgcgccatcgggccgcgaaagaattttggccgtcctttcgcaacctcaacttaccggcaaaaaatcgtgcgcgctttttcacacaaaggcgtttctgccgtcatattctcatgctatgatgatcgcataagaaccattgcaggaggaatgttttgtggccccggaaatcagcacgccgcgcccctacgatgaagcgcgcctggcgcgcgccagcaaacttgtgcaagccagctatgcggcgctcaacctcgcgctccttacgcactatgccctctcccgcgacctttaccacacgggcctggccctgggcacgctggcactgtttcccgtgatgcacgcattttaccgtctcacgcggctaaagcgcgtgcaccaaatggatatcttcatttatatattcacgctgatcgcctacacgggcggggaattgctgggcggatacgcccggctgcgcgcctacgacaagctggcgcacatgctatccggcagctttgtatacctgctggcgcacccgctgttttattttttgaaggccaaccacgcggtggaaaagagcgaccgaaatttgctgatggttttctgcgccgcaacctccctatgcgtggccgggctgtgggaaatcggcgagtactttttgagcatgctcaccggcatcgacatgcagcgcgtggcgaccatgggcatccacgattccatgcaggatatgatcgtgtgccttatcggcaccgtggccctgctgccttccaccagccgctacttccgccgcggcgttccggggattttcatgcgcccgttcgacgaatttttgcacaaaaacgcgatttttacttcccacctacgggacgcctaaagcaagccacattgcggcgcgcgccgccgcaaaaagaatggcctttgccgccaaagcggccaaggccattccttttcgcaacaaacgccaaatgccgctattgccgcagcccatagcgctgtgcaaattcctctttcgtgattcgataggtggctcccgcaaactgaccggtcaatccctttgcgttgggttgaaaatagtcgcccatatgcacgcttacgcaccgcatgccaagcgccttgaggggcgcgagtttcccttcatccgccgcggcccaccgcgcaagaatggctttcacacccatttcagaaaacacccgctggtacagcgcgcacagcgcttcttcttcatagccctggccagcgtattccctggccaatgtccatttcctgcccagcctcgatgccattctggcgaataaaacagatcacctttcccgtctctttgagcgcaacggcccagttcgccgcatccgccgcgaaatacgcgcaagcagcctgcacgccttctgcatccgtgggccacgcgaagtcgcacgcggaaaagtcatcctgctccttgcttatggcaatttcctgcaaatcgcgccaatcttcccgcgcaaaatggcgcagaatcagccgtcgcgtttctatgcgctctattgcttgacccatatccgtctccccctatcccctgggcaaattcgcccttacaatggcctcgatttgctccgcttcggcggcaaattcgcgcaggataccggcgatctgggcccggcgcgccgcgtcttgcagcgtggtcagcttgatgttaaagccgcctcccaccgcttccagatcatgtccctttccatccttccacagcgcttccatgcgttctttataaatcgcgcggatttcgcgcaaaaaacgccagatccggattccattccagcgccttatccaagaaacaccagctacacgccgcgttggtggccatgttgcagacgtagatcgtgtaatccgcccattggtcgaattgctccggccgcatgccggcgaatttgtcgccgctttccacctcgtccgcccaagcgcgaaacgccgccgaaccaaagcaatacgcgcccgtatccgtggaaaagagcgcgggcatggcgttcaccgcctggcgatacacctgctttatgggaacttcgcgaaatttttctcccacaaaaagccatccccaatgggaacgcacggcggcctcctccgtgaaattttccggcagcgcgaacagttgccccgcgtccacaatttcgggctgctcatggtcatccgttctccacaaaaagcgcttgccatagtcctcataccccacaatcacgccccaactatagtgaaaccggatcacggggatgccctgatcgatgctatccataagccgctgaatatacgcgtccaaatgccgcttcagttccgcttccgccacgtattgcgcttcatacccgcacgcgcgaaacgcttcttccgcaaaattgtggtgcgccgggtcgctcaagcggtaatccgtcgccccatcgccccggaatccatcgcgggaaaacacctgggcgagcacatcgcctgtgagccccgcgaacagccagtaatcatactcccgctcgcccaggcattccatcacgtagcgagccgcgccgttgaaccagtagttttcgccgtaatggtgcgtgatcaaccggtgctgaactggcacgcggcgatccgcctgccgcgcttgaaccataccgtttcctccttgagctgcgccttactctccaaaaatccgctgggccgcgcgcatattttccctcactggcacgccgaacgggcagcgcttttcgcagcttctgcaggcgatgcattcgccgccccgatgctccagttgcaaatagtgcgaacgaatggaaggcggaacgtttgcctcgtccagccgggcgacatccaggtatttgttgaccgccgcaatgtcgattccgctggggcagggctggcaatgcccgcagtatacgcaatgcccgcggaactcgctcttgagcgtgcccagcacgtggctatagtcgcgctcctcttcgctggcagcaaaatattccatggcctgccggacttcctggccgctctggcaaccgagcatcaccgccgcgaccgcggggcgggtcagtgcgtaatggatgcattgggcgaccgtcatcggctgggcgaacggcgtgtgctcgcgggaaatcagcttgcccgcgccaagcgccttcatcaccgtgatccccacgcccctctgttcgcacagcctgtacagctccgcgcgcacgggatccaagccatggaaggccgatacatccagcttatccgtctgggtcagccgctccaaagcgtcgatccccgcgggatgcaaatcaaaggccagattgatgctgaacatcatcagttccggcacgcccgtttcgatcaccttgcgcgctatcacgggattgtgcgaactaaaaccaatgtgccggatgtcgcccagctgcttgcgctcgagcacgtagcggataaaatccgtctcaaacacgccgcgatagtcctcttcggaatcgatgaaaaagatcatgccgaaatcaacatacccgaatagccgcagatactcctcaaaaaagcgcggcacaaccttgagatcccggctgatgtcgtattggcggcgaaggtctgtggaaccaatgtgcccctggatcgttacctccttgcggcgctcccccaacgccttggcaatgttctcccgcacctcctggcccggcataaagacatccagatgcgtaatccccgcctccagggcagcgtcaatggtctccttcacctgcgcgtacggcttgcggtccaaatgctcgcagcccaaaccgattgttcccacgcgcacgcccgttttgccaatttcccgaaactgcatggtttcgcctccgtttcccgtttttttcctctaccacaaatatatcataaaacgcgccgccgcgcaagggaaagcgcgacaaaactccaagttcgcttcccacctgaaagctccgcccccgcgacacccgggcgcggtttcttccacaaaatgtgcgcgcgcactttatttccgcgggcaattgtattataataagcgtgtagcgcaaaccggccagcacaaacccacaggaacgaaaggagcgtccccatgatcattcgagtatgcgccaaccctgaagcgctgggcgcggcggcggcccgccagaccgcgcagcttttgcgcgatgccattgccgagtgcggaaccgcgcgcatcgtgctttccacgggcgcctcgcagtttgcgaccatcgaccacctttcccgggaggacgtggactggagccgcgtggaaatgttccacctggacgaatacatcggcctaccggaaaaccatcgcgccagttttcaaaaatacctgcaagagcggtttgtggacaaagtgcgcggcataaagccgcattacgtgaccggggatccggtgcatgccgccaaagtaggcgccctgctgcaaagcggcccgatccatgtgggcttgattggcatcggccaaaatacccatatcgcctttaacgatccgccagccgatttcgagacggaagaaccctacatcgtggtttctctggacgagcgctgcaaggcgcagcaggtgcaggagggctggtttcgcacgatagacgaagtgcccaaacaggccgtcaccatgtccgtccggcagattctgcgctgcgaagccattctctcgtgcgttccatatccggaaaaggccgaggccgtgcagcgcacgctcttgagcggcgtggacgcccgcgttcccgcctccattctcaaaacgcacaaaaacttcaccctgtatgccgaccgcgatagcttcgcgcgcgtggaaccggcaaaaattgtgccgggcgggccggatatgccggtcgctctggaatataccccaaatccacaacgcatttagagaggatctgagtccatgcggaaactcaatcaatcgacgctttgtcaactgggcctggaaagcgcccgaccgacccatgtacgcgttctgcaattcggagagggcaattttctgcgggcctttgtggatcgcatgatcgacgacgccaaccagcgcatcggctttgacgcgggcgtccgcatcgtgcagccgatcccccgcggcatggccgccacgctaaaggaacaggacggcctttacacattgattctgcgcggcgtcgcggagggaaagaccgtgcgggatgtgcgcattgtgcgctcggtggtcgacgcaatggatccctatacggatttcgaagcgtttctggccgccgcgcgcgatgaggaactgcgctttgtggtttccaacaccacggaagcgggcatcgccctaaacgaaggcgaccgcctggaggatgcgccgtcggcatcgttccccgccaaagtcacccggctgctctgggaacggtatcgcgcgctgggcggccgggccggaacgggcctgattttcctgccttgcgagctaatcgacgggaatggccgccaactggaagcctgcgttcgcgaaacggcgcggcgctgggcgctgggcgacggatttatggcatacctcgagcgcgaaaacgtgttctgctccacgctggtggatcgcatcgtcacgggctatccccgggaagaggcgtccgcgctgtgcgcggaactcggctatgaggacgccctgatcgataccggcgaaccgttcggcctgtgggtcatcgaaggcccggaatcggtggccgaacaatttccgctggacaaagccggctgccccgtggtattcacgcgggacgttacgccttaccgcacgcgcaaggtgcgcatgctcaacggcgcgcacaccaccattgtctgcgcgggctacctcgcggggctggacgccgtccgcgattgcatgatggacgagcagatgcgcgcgttcctcactcgcgccctgtacggcgaaatcatggatcagcttccgctggaacgcgcggatctcgaagcctttgcccaggcgatgctggagcggttcgagaatccgttcaaccggcacatgctgctctccatcgcgctgaacagcgtcagcaaattcaccgcccgcgtattgcccagcatcaaggcttacctcgcggcaaagggccgcctgccccagtgcctgtcgttgggcctggcggcgctgatcgccttctaccgcggcgccagagcggatgaacagggcgaatacagcggcacgcgcggcgcggaccgctacgtcgtgcgggacgacgcgcatgtgctaagcgccttttccgccatgccgggcatggacgcgccggacgcgctcgcgcaggccgcgctcgcagacgcttcgctctggggcgaggatctgaccctgctggacgggttcgcgccgctcgtcgcctctcagctctccaccatcgcccagtccggcgtgcgcgccgccatagccaacgcgctcgcggaaagcgaggacgttcagccatgattccctggattcgcatccattccagcgacaatgtggccgtcgcgctgacccatcttccagccggcgaggccgtgcgggtggccgggcagtcgtttgtcctgcccggccccgtgcccgccgggcacaaattcgcgctcctcaccctaaacgcgggcgacgacatcatcaaatacggagcgcccatcggccacgccacccagcgcatcgcgcccggcgagtgggtacacacgcacaatgtgcgaaccaacctatccgggctgctggaataccggtaccggccgcaaacgccgcgcccctgcgcgccgctatcgggcagctttgagggctacgcgcgcgcggacggccgcgccggcgtgcgaaacgaactttggatcgtcaataccgtgggctgcgtcaacaagaccgccgaacgcctggccgcgctggccggagcgcgcgcggccgcgcccgtggacggggtgtacgcttttccccatccctacggttgcagccaactgggcgaagatcaggaaaacacgcaaaagctgctcgcgcgcatggtgcggcatcccaacgcgggcggcgtgctggtgctggggctgggctgcgaaaacaaccacatcggcgcgtttcgcaaggtgctgggcgacgtggatcccgcgcgcgtaaaattcctgtccgcgcaggacgtggacgacgaaatcgaggccggcatggcgctgatcggcgaactgttccaggccatgcaagccgaccggcgcacgcggcagccgctttcgcggctgaccctcggcctgaaatgcggcggcagcgacggtttttcgggcatcacagccaatcccctgctgggttccctggccgacggcgtgtgcgcggcgggcggtacggcgttgctcaccgaagtgccggaaatgttcggcgcggaaacgctgctcatgaaccgctgccgcagcgaagcggtattccaagcgaccgtttcgatgatcaaccggtacaaagaatatttcatgcgccacggccagccgatttatgaaaatccctcccccggaaaccgcgagggcgggatcaccacgctggaagacaaatccctcggctgcgtacaaaaaggcggcacgggcgcggtgacggacgtattggaatatgcgcagcccgcgcggacaccgggcctcaacctgctgtacggcccgggcaacgacgcctgcgccgtaaccggcctgatggccgccggcgcgcagatcattctcttcaccacggggcggggaacgccgttgggcgctccggtgcccacgctcaagatcgccacgaacagcgatctggccgcgcgcaagccgcattggatggattttgacgccgggcgcttgctcagcggcctgtccatgcagcaggccacgcaggaactcctgcgcctggtgctggacacggcaaacggccggcccgcgcaaaacgagcgggccggataccgggaaatcgccattttcaaagacggcgtcacgctataggcgcgcaagccttgcgtcccctttgccaatccctccgtcacggcttacgccgtgccacctcccttttcccttcgggaaaaagg

SEQ ID NO: 3372 - DNA, 14294 bp, Unknown
  16S sequences of unknown bacteria
ccgccgctgtgacttccgccggagcgtccgccgccaaaaccgccgccggatgatctgccgccgccgaatccgccggagccgcgtccggacccgccgaagccgccgtgcccgccggaaccgccgcggtcatgtccgccgaagccgccccttggaggggaatttcgccagccgcgtccgctgttcctgcccatcatgcttccgaggaacattccggtgaagaagccgcgtccgccgcctccgccaccgccgccgcgcggacggttatttccgcgaccgaacagtatgaagaggattatgacgattatgagtattgtcagcattctgccgcttctcctttccgccgtattctgtacgtagtcgtaggagccgtcatttgtcgtctcggggcgtatccatgagccgtcggaggaggataatgtggtttcggtcttcattccgtagatcccggcgaccttttcatacagcgcgtcgaagaccttcctgacgcccgcgtcatagtcctgcgacgcgaagtccggctcgaggtagtcggcgagtatgtcgcctatcgtgccggaagtcaggtttttttcgagccccttgccctcggtgcaccagtagtcgtcgtcgcctatcgacaggagcaggaggatgccgttgttctcctttgacgagccgacgccccacttgttgaagaggttataggcgtagagctcgaggtcgccgtcaggtacgaaatcctgcgtcacgacgacgatctgcgcgccggtctccttatagagctcagcgttcttcgagacgatgtaatcctctgtgccgctgtcgatgacatccgactggtcgagcacgtagaacgactttgagggctcgggcaggtcgaccgcgccgactgttacggacagcagcgcgagcgcgaaaacggcaagcagtattctgccgataaatattcttttgtgtttcattttctccttgcagtgtaaatctttccgcccggaataatcttccgggaaaacgcccttacagggcgtcagctgtagagcggcatctcgtcaacgccgatgagctccgctatctgcttcgcggggaacgcgttcagtatatcgttgaatttctgcgcggcggcgttgtagccgttgtgggatatacggtcgagcgtcgagtttatgtcctcgtagaggctcgcgcggaagccgcggtcggtcgtgttcatatcctctggtatcagggcgttgtagacctctgtgaccctcgccgcgacctcctggacggcggcgtatttgtcgccgatgttcttcacctcggtaagggcgcgtctcgcgtctgtcatcgcggtgatcttttcctcgagccccggaacgctgtccgtgtatctcaaggctatgaccttcaggttgttcacgttggcgcagagggtctcgatgtcgttctgtatcgaatagccgtctccgtcctcaccgttgtagaagtaatcctcgacattgctgcgctcctttttcagcgagcggccgcagccgagcacggcggacaggactatcgacacgatcatgatgatcaccgccacaggagtctttgtcagcagtttcaattctgatcctcctcagtttcagcctttcattgtgagcagcttgttcttgagctgatcctcgatccttgcgagttcagcttcagcctctttcctcttggctctgccgtcgttctggatctgtactacctcgtcgagcgtcgaaatgagcgtttcgtttgtctgcttgagcgtctcaatgtcgacgatgccgcgctcggacgccttcgctgtctcgatcgtcgagatcttgagcgcctcggcgttcttcttcagaagctcgttcgtgaggtcggtgacctgctgctgagccttgagggcctgctgcgagtgcgcgagaccgagagctatcaccatctggctcttccagagcgggatcgtgttgacgagggtcgtctggatcttctcgctcatgacggtgtcgttgttctggatgagccttatctgcggcgccatctgaatcgagatcgcgcgggtgagctcgaggtcgtgtatcttcttctcaaatcggttgcacattgccgccatgtcgttcgccgcctgagtatcctcgggcaggttcgacttctttgccttctcgatgagagcggggagctcgttcgcgcgcacctcctcgagcttctgcttgcccgcgacgatgtacatcgagagctccttgaagttcgcgaggttgacgttgtagagctggtcgaggacggcgacgtccttcatcagcttcacctgatgatcctcgagcgcggtcgcgatcttttcgacgttgacgtcgaccttgtcgtacttggtcttcatctgctcgagcttgtttgtctgcttcttgaagaaaccgaggaagcctttcgtcgagtcgtcgtcctcaaagtcgcgcagctcgccgacaagactcgttatcatgtcgccgacctcgccgaggtcctttgtcttgacgttctggagcgcgctgtccgagaagttcgcgatcttctgctgggagcccgcgccgtactggagcactatgttcgggtcggttatgtctatcttcgcggcgaaatccgcgaccatcttcttttcctccggcgtgagtgtgacgccgagatccttttcggcgccctgcgccgccgggacttccggctccgcgggcttttcgaccggcttgtcggcgaatggggtgagggtgagctccggcatcatgttgttattgtccatttttatgttttctccttgtgttttaaggtctgtagattcactcaatatcgttctgtcatcggggcatcacggcgccggttccttattcgccgcgtccgacagcccctccttctcgagcatcgtctcaaggacggttatatcggacgatatgtcaatcgcctgatcctcatagaggctgttgagctggttctcgaacgcgggctttatcacgtcgagtattccctctatgccggtcagggtcttctttatgttctcgcccttgatcttctggttcgagagctcgatgtaggtgttcatcagcttctcgagggtcggcaggtagtagttcatgaaccgccgcactctcgggagcttgtcggggttcttcgagacatactcgaagagcgtgctcatcgtcgagcgtatgtccgcgagcttcgacgcgagggcgggatcgagcttctgaagctccgcgcctatcttgtcgaactttctgatgtattccgctccggtctcgatcatccggtcgacgtcctcgacgccggagtgcggagcctcatacggcagaggtatccgctcgacctttgccggaatgagctttctcagtatgacgaattccgcggctgagatgagtattatcacgataaaatgtccgatcttatacatcgggcaaagcatggcgaagattatccagctcagcgcgatcacgtaatacggcgcgaccgaggggtgtctcacttcgcggtagtttttgtccttttcggtgttcatccgttcaacggttcctttctgtggttaatgaatccgacccgagcgcggtactctccgcgttcagattctcctgatacaattataccataaaaattctcgtttgtatatatcatacggtgaaatttacattttataaacagatgtcggcatgtttgttcaggctttcggaatcatgtgtttcagaatgaaatgcaccgcggagcgtatgtaccgcggtgtcgtgttttgtcgcttatcgtcgactgtatgtcactgcctcagggctttgaaatgactctgacgtcaatcggtcttgtcgggtcgattatgtcctcctctgtgaccgccgcgaagagaatctccttcgcgccggtgcgctcgcggtcgtaggagaggtatatcttcccgtcgtggaagtccgcgtcggggtacgagatgttgttccgcgtgtcgacgcagcgcttgtacttccatgtagcgccgtcgtcctcggagaggtacagcgtcatgttcttcctgccctgacgggagtcgttgttgatcagcagaaggcgtccggacggggtgcgggagatgtagaagcgtgtgtcggggctcccgatgccgctttccttcgcgtcctcccacgtgagtccgccgtcgcgcgaggttgtctcgccgagctcgcccgtgttcgtgcgcgcgagcatccttatgctgccgtccttcttttcgtatgccatcgactcatcaaatgacgtcgggacctttttcggtccggtgtgtctcacgaaggtttctccgttatcgtcggatatcgtgtagccgtacctgtcggacatctggtcgtagttgaagcacagccacctgccggacgaggtgacgagcggcttgcagcgcaggaagccggtgctgacgcagcgcggctcggagaacaccggtttatcggcgtcagggtcgtcgcagaccgagacccacatcgagtgccggaagtcgtcgaagatcgtcccgtccacttcgacatagggtgcgagatatgtacctgaagtgttcttttccccggttccggcgggatgcgtgttgttctgaacccagaagacgaacaggcgtccgtccggggcggtgaacagctggatatcaagcgcgtggatgttgttttctctgctcgacgggatgacaaacagcggggatgaccagctttttccgccgtcgtcgctgaagatgacgagattgaaattgtccatatgcggctcccgcgttcctccggcgtaccagccgaggtaaagcctgccgccctttgtcgcggcgatggtcgggcagccctggaactcacggatatgctcgtctgtgtatttccggtctgtcggatacatgatgaattcacacgcgatcttgtccgcgagttttctgatttcctgcattatattgttcctccgtgtttgaaaaaatgacatgaggtttatattccgtatgctgtctgtgcagattataccataaatcctgctgaaagtcaatatgaaaaccgaaaaaaccgcgcccacggtaaaagtgagcgcggataactgatcatcagccgttgtatgcttcctcgtcgcagaggattgtgacgttgccgtggaggttcagcattgtcgaggggttggaggtcgagatctttccggaaagcagacccatcaaagcctcatgcttgttcttcccgttgatgaggatgattatctgtcttgccgccatgatcggcttcatgcccattgtgagcgcgtggcgcggaacgtcggactccttctcgaagaagcgcgcgttcgcctcgatcgtcgactcggtgagatcggtcaggtgggtagcggcgacaagctcctcagcgggttcattgaagccgatgtggccgtttctgccgattccgagaacctgaatatcaatgccgccagccgcttctatcgctttgtcgtagtcagcggtctccttctccggatcctcgcatttgccgttcatcacgtgggtgtttgccttgtcgatgttgatgctgtcgaagaggttcttgtccatgaaatagcggtagctctgctcattcgtcgggtcgatcgggtagtactcgtcgaggttgtaggttctgacgcgcgagaaatcgagcttgcccgccttgttcttctcgatgaggcacttgtacattccgaccggagtggagccggtcgcgagaccgatcacgcagtcaggcttgagtgtgacgcacgccgcgactatgcgcgcggccttttcggacatttcgttataatccttgcatacgataagattcatgatctgattccttctttactttctgttttgcgcgtattccgcgcactttactgtcttcattataatataaaatccgacatttttcaaggacttcgcaaaatagtgcaacagaaaagcaagatactgccacggaatgttattttgcgggagaattaacatttttctcacggtactttttccacactgtctcgaaccagtcgttgcgctccggtatcggtctgacgctgcgccatccgagtttgactgacatatcgtctctcagacgtgaccggcagattttcgtgaagtgctccgtgtcgaccggaaccggcgtccttccgtccggaattctgtcggtgatgaggtatgatccgcggctgagtccgccgtcctcggcgtatccgagtatcgcggacaggtagacgagctgtgtcaggagtatatcgcggtttatcgagagctctctcagtgtctccgggctgtccgcctgataactgtcgaataattcaagttcggctctgatttcgggtatcgccgcgcggatatcgttcacgttccggatgaaagccccgcagtaggacattcttctgccgtatgaaagacgtttttcgagtatccgcaggaggtcaggcgagctgtgcttctcgcttccggttggcacgcacggtatccggatattttccggaagaggtagcattttttcgtctgacgcgagtatcgcctccgccgcgcgtcttgagccgacctgggtcgagttgagcgcgcttccgcccggtcggtgtacgccgaagacgcctgccgcctcgccgatcacatagaggttttcaaagccggtgcttctgtagtcggtgtccacctcgaagccgccgttgttgtgctgggcgcagatgtcgacctcgagcggttcggaataaaggtcgatgccgtggcttccgtacagctcgatcgcgggaggattcatcgcggcgagacgctctataggtgtgtccctgagcccgcctgagttttcaagataccgtttcggctcgtcctccaaaagtgaggtatcgaagcaggacgggttccgtctgaaatcgaggaacacgcgacgacctttcatcttttcgcggtagacggcgatatctatgagagatgaatcattcccggaacggctgtcgagcttcgccggatcgaacggccactggtatcccttgcggaatatcgcggtcaggagctttttcgggtcggggaacatatcggtgagaaattcccgctcgtccgagccgtcctcattcgccgaaaaatatcttgggagcgcctgctgataggttccggagaggttccatctgaacttgaccgacgcgatgccgtactggctctcggtgacgttcaccgccggggcgcccgcctcgagcaggacgccgtgcgagcaggtctggctctccggatagactgtcgcggagtatatggcggacggcccgccggtcgcgaagacgtagttatccgcgcggaatatggcgagcccgtgtcggttcgttttctcgtccggcgagaccgcggcgagaccggttatcttttcgccgtcggtcagcgcctttattacgcggtatccgtcaaataccggcactccatgctctctcactgacctctcaagcgcctcggtcatgtacttcgatgttagcggtccgcaggaggtggcgcgggtgcgtgtgtcgtggtcggtgcggtacccggcgaactccccgtagtcgttgtacgggaacggaacgccgagatcgacaagtctgagaaacgctctggcgctccccgccgcctcggtcagcgcgaggtctccgtcgacagagcctccgtcaaacagcgattttgccatgtcgccgaccgaatccggagagtcgccggacatcgtcagtttgtagtatgtctgcttgtccgatccggtgttgcgcgacgtgcccatgttcagcccctcggtcacgaccgcgaccgggatttcatggtatcggagcttttcgcctttcagcgccttcttccggacagttccggtcattatgaggtcggcgcagttgagccccgccgctccgcttccgacgactatcgtgtcgacggaatagatccgcgtttctgtcggtatgccgttcacggttattgattcctcggagaacagaatctccttgtcgtaaattatcataatctcgagagggtgaagccgccgtctatattcatgacgcttccggtcgtgtacgcgaaatatccttcggtcagggcgaagacggctttcgcgatatcctccggctgtcccatgcgctttatcgggagaagtccgccgtcgatcatcttttcgtatttgtccttgacgcaggcggtcatgtcggtctcgatgatcccgggacggagctcgtagacatttatgccatcacccgccagacggtcggcgaagagcttcgtcaccatagagagacccgcctttgatatgcagtattcgccgcggtttatgctagaggtctcggcggagatcgaggttatgttgatgatcatccggttcgcgtcggttccgcgttttataaggagcggcgcggcggtctggcacatgaagaacgtgcctttcaggttgatggatagcagtctgtcaaggctctcctcggtcatctcgagaaggtcctgtctgacgagcggcgcgcagccggcgttgtttatcagaatgtcgaacccgccagtcttttccgcggtgtcgaatatctccgcgcggcactccgcctttgaaatatccgccgcgacgtatagtgagtcaggcgagagagatgtgagctcgtttatgtattctgagacctgttccgcgggacgcgttccgaccgcgattattttgtagccgtttctcgcgagaagggtggatattccgcgcccgatgccgcgggaggctccggtcactattgctgttggttttgtcgtgttcatgtttatgaccatacctttcgtttactttttcaggcaggctgccttgtatatcggcgcgtagactccgctgtccctgacaggacagcccgtggtcgtgaacgcgcgcatgagctcggtgcattttccgcaggtgacgcagcactttgagggcttcatgtcaccggatatgagatctttcgcgaagccgtcgtatgcgaacgccatgcgcccgaagcccgctgccgagatcattccgcttccgaccgctcccgccgcgagatacggcgcgaggtggcgcaggaacgtgtaaccagtgccgatgaacgtgatgtccggaaacttcctctgaagtatcgcggctccgtttatcatccgggcgacaccgatgagcgggtgctccggcggctcgtatccgccgtgacagtacggacggttgacgtgcgggttgaagtacggtgtgcccatagtcacgtttatgaggttcacgccgagagcgtgtatctctccgatcagtctttccgcctcggtcgggtcgaacttttgggaatcctcgcggtcgtcgccgaagccgtaggggtatccgattccgtcgtgtacgccgagacgggtcgcgactgccatgtccccgacctcagacttgacggcggatatgacgtcgcggtagagtctcgtgcggttctcaaagctcccgccgtactttccctcgcgcgtgtaggcggagagaagctcgctcatcaggtatctgtggcacgccttgatgtcgacgccgtcgaagcccgcttctttcgcgagctttgccgccgtcacgtactgatcgacgagtgagtcgagataatcgtcggtgacgaccggatgctccggagggatattgaacggcttgttgagaacaggattgtggtaggcgatgataggcgcgggcttgttctcaggtctcgagaatcttccggaatgcgtgagctgacagatgaccggcgcgccgtctgtcttttcatgaaaatcgtcgatgagacgcttgaatgagtcgacgttttctctgtgtatccagagctgacggttgttcgagcgggactcgtgcgatatcgcgaccgcctcgaaccagtaaagcccggcgtcgctgtccgcaaagcgcatatatctgcgatgtgtgaggtctgacggcgcgccctcgacggcttctccctcaccgtgaatgctgtcgaagccctccatcgggtgaatcgcaacggcgtttcggaagtttattttctcacccttgaccgtgaattttctcgcgaggggtgagaggtcgtccgacagcggaaggtctgttccgagtttcacgagatcctcgcggacgtcgtcgagggtcttgtatctgaaatcaaaaggcatatctttttctccattcattaagggttgccgcgtcggcagcaaagtccgcgtccgagtcgtccttcacgaactcgagcagaagcgcgtgttcacggttatccgacgcgaggatatcgaggtatcttttccatacgtcggcatgatctgcgagcgggtatctgatgcagctgccgctccgggcgtcccacgcgaagacgtgtacggtcgagacgtatttcaggactttttcaagcgacatgacattgaattctatgtcccggtactggttcggctgccagtagagatgcgcgttttccctgtcaagcccgcgcatgagcctgagagccgagtccgggtcgtcggtgagcgtcccgccgtggaactcgaagctgatggtcagcccggattctgccgcgatatcggcacacagcgacgcttcgcgcgtcagtgcggctctctctgtttcacttacggagccgcttccctttgttcccgcccaaacgcggaggttcggcgcgccgagagctgtcgcggctctcacatattctccgaaggttttctccgggtcgggttgttctccgagtttgtagtatgtgccgtaggagacgacgcgcacgccctctttttccgccgccgcacggatagcctcgcagtttgctatatcgtccctcggcgcgtggacgtccgagccgatctcaatcgcctcgagattgttttcgcggcacatacggagtattttggatatgcttttctgacggaaggtcacagagacgagacctgtctgaaaattattcatgatatcacctcacgccatcgtctcaagcatcttcatagtgacttcccacttcgcgggctcgcccctcatgtatcttccgaactcctcgtacatatactctcccatccgcgcggtctcgtccccgagcgaaccggctatgtgcggcgtcagaaagacattgtcgagccgccgcagttcgctgtcggatgccggcggctcagggtaggtgacgtcgagcagagccacgcgcgcgggttcgtctttcagtgcctttatgagatccttctcgacgacctgcgcgcctctgccggtgtttatgaacgcggcgttcgggcgcatcaagtcgaagagctcgccgttcagcataccgaccgtctgaggattgttcgcgaggtggttcgagataacggtgcaatccgagaatatcgttttcagcggtgccatcgtcactccgagccgctccgccttttcgatcggaaggaacgggtcgtaggcgaggacctcgagccggtagtctttcagtctttccgcgaccatcgagcctatcattccgacgccgatgagcccgaccttgttgccgaagtttccggtgaagtatccgccggacgagcggtttgaccattccgggtcggagttccgtctgagcctctgataatatcccttgttcgcgaggatgatctcggcaatggtgaactcgacgaccggcaccgcgttcgccgcccacgccgagaagaccttgaccccgcgggaaaggaacggtctcgcgaaatactgaaccgaccccgcggcgtagaatatcgccctcagattcacgaaatatttccgtatcgtctcctcgtcaaggctgagcattccccatgtcgagaatatgactccgacgtcacgcagttcttcttttctctcctcaagctgagccgcgctcgttatcggggaaatgaagtcgagttcggcggtgagcttttcgcgcaccgttttgtagacaccggcgagatttttttcgtcaccggtcatgaataccgctttcatggctgtcctcctgatttattgtggtgtctacattataccatgctgctgccccgcagtcaagagtataagcaagaaaacatttatgcatatatgataaaatagtcgcgaatttgattctatacaagtgctatgtggcgaagcgcttttccggttggtcggatatcataagtcggacggagttttcggtgcggatttataaattttccgagcagaaaaagaacgccgcgcggaaaaacttccgtgcggcactcgaaaatataaacttttctatatattcaggtcggattcctcatccgaaagaaggtatttcagcgtcctctccggcgcgtcgagaaagtttttcatcgttctgaaggtcatggtctccttatatggcgtctcaaagatgccgtcgtcgcgcagctcgaaaacagtcgaatcacggcaggagagcaggatcggggagtgcgttgagatgatgaactgtgactcgtccctcacgagctcgtcgataattatgagcatcgccatgacccttgacggcgacagcgcagcctccggctcgtcgagtatatagagtcctttcccgaaaaagcggttcttcatcagcgcgaaaaaggactcgccgtgcgacatctcgtgaaggcttacgccgccgtaggactctatcagcttcggcgcggcggcgggttcagcgtcaagcgtctctatctcggtcgcgacattgtaaaagctctcggcgcgcaggaaatatccgtctttcgggcgcttcagtccgtgcgagatgtgaaggaacgccgcgagcggcgagacggactgcctcgtcgagaagtccatgttcctcgacccgccctcaggattgaacccgcaggcgaccgcgatcgcctcgatgagcgtcgattttcccgcgccgttctcaccgcagaaaaatgtcacgggtgtcttaagctcgagccgtgtcaggtgcttcacgaccggaagctcctttatatacctcccgtccggcggcaggggagtgttcgcgagcgcttcgcggtcgagctctatcgaaccggcgtacatacgtgaaatacccgagagcttcatctgtctgtccttaccttcgccatctcgcggtcggcggcgggctggtagttgcggtagagcgcgtctatgctgttcctcgttgtgacgccgctgtatatagcgccgtatgtcgcgtcgtcgagcgtgtcgaagccggacgcgaacatatgcgggaaatcgagcgacgcggtgctgattattgtctcaagcgatccgatcgatccgtcgtcccggagcatatagttcacgcggtcggagagatatatgtcggagagatagccttcagccgagacgttcagcgcctcgagtatcagtccggagtttccgaaatcggtcgtgttcacaagtgctgagaagaccggcgcgtcggacttgagaggggagatgtactccttctggctcttattatatttcggcatgggagcgagcccccagtcggttgagatatcggcgaggtcgggtatcatcgagagccttccggtcatgacggcgagcctgccgtccgaaaacgcgtcagacgcgtcggctcccgcggacagctgcgacgagtcggtgtagaagagaccgtaaagtgtctcgactatccctccggcgagccgcttgccgcggtcggttgacatataatcgaccgtcggggactcgccggacgggttcgagacatattttatgcccatcgacaacgcggcggcgtcgatataatcgcggtcggacagcgccgagccgtgaccgtagacattcccgccggacgcctccttcgcgatctctcggtatttgtcccacgtccaatcgccgttctttaccagtgtgtagatatcttcatccacgagccccttgtcgaaaaatacacaggaaagcttgtcgaaatcgaggttcgccgcgccggacacggcgaggagcttgctgccgaacatcgcggacgacgtgaccgaatcattgtagcatgagcccgtgtagtcggtgaacggcagactgttcatgttcgcgagcagcttcccgttcatgaactgcccgagcctgtcggcgggaattaacagaagatcggcgagatagtctccggagctgacggcgttcctcgcggcttcataaagctcgtccgccgtgtaggatatcgggatgatcttcgtcgtgtacttgctctcgaccgcgcggtaggagacgagcctcgcagcggagacctcgtcgtcgatgtcggtcgggattgtctttccgccatccgcggaggctattatgaagcccgcgccggcgaagctcttcttgtggagcgacgtcagtttttcgtcggcgtcggcacgcgggtcggcgggctccgacgttgtttcgtcagaggataccccggacgaggttgtatccgcagcggacgtgtcgggcgcggacgtcaccattgcggaggtttcgtcggtctcgggattatttatcacgatgaatccgcaggactccagagatatgagcgccgcggcgagcaggggcaggaccagatgatgctttgac

SEQ ID NO: 3373 - DNA, 11036 bp, Unknown
  16S sequences of unknown bacteria
gagccgaaaaacgaatgcgataccattgacgtccccgtcggaaagctgcaccgtgtggcgagaagatttcttccctgcgacatcggaatagcgggggagagcgttgcgggagacgactttcatcctcgttactcggttgtgagaaagacgtacgaatacaaaatgtacgactctcccgcgtatgatccgttcctcgcctctctcgcgtggcagctgaaaaagccgcttcccgaggacggaattgacatgatgaactcctgcggaaaagctcttgtgggaaagcatgacttcacctcgttcatggcggcaggctcgagaataacggacgcggttcgcgagatatattccctctcggtaaggcgggagcgggacatgacggtgctcagcgtgacggcggacgggttcttatataatatggtaagaataatcacgggaacgctgaccgacgcggcatacggactgtatactgcacacgacatagcagacgttctcgaagcgaaggacagaacaaaggcaggaaaaaccgcacctcccgacggactttacctgacagaggtggaatatcccgaaaaattcgactggaaagcagattgatacgggggtaaaaatgggcaaggaaagctccaatgaaaaaattcccgttcttgacggaatggagccgcgggtcaaccgatattacttgaaggtttcccgaaaatacatggcggcgggcatagctttgatgctcaccctcatcggctatattatattcgtaatgctttttctcgggcagtacgttacctatgacaacttaaaattcctcgtccgtgatatgagcgcgctctcaatcccgggcagcggagaatactcgagtatcgtctacaacggaagcgacgagcttgtgacatcttccttccgcggaggtactgccatatgcaccgttgactcgtatctgtactacgactcgggcggcggacttctcgttgaggattcgtgccaatacacctcccccgacatggtgacgagcggaaaatatctcctgctatacgacgtcggcggcagcggatactcggtctacaatcagctcacgagaataatagagcgcacctcgtcacagcccatcgttacgggagacatatccgacgacggctctcttctccttgtgacccgctcgcgtgagacaaaatacgtggtggagctgtataacgcggcgttcaacaaatccatgagcatttataaagaaaactacgtcctcggcgcggctctctctcccgatggggaatatattgttatagcatctggagttcccgcggacaccgacctcggatgtgagatatccattattaaaagaggctcagacactccgctgtacacctcgtcctacactcacacgatgccgcttgagatacaggcttttgacgacggattcatactgctgtgcgacaacggactttacttctttaactacagcggcggcataacctcgtcctacagcttcacgggaatgaatctccgctatgctgacataacaaaatccggcgcggtggtagtcggcagtgtgaacgccctcggaagcgaaaacaaatgcgcggtatttgattcgaccggagaaaacgtgtacagcgcggtgcttgacgtgagaatatcgggcgcatacggctcggtgaactatgacgactctctcgcgtacctcaccgccgccgacagagtgataaaaatacacccggacggaacggcagaggaatacacaccggagacagaggtgcttaccgtagtaccgctgaacaagggcgcgcttctgtgctcacgttcgtccgcggctccggcatttaactaaggatactctgaattactacctcaaatcagaggcttcctaaaaatttaagacaactgtaaataaacaggagggatacacaaaatgagtttagcaatcgacgcgataatattgctctccgccgtgataataatatggcgcggagcgggaagaggactggtcaaatccgtgatgggacttgtgacgtcggtggtgtcgttcatcgtggcatacgcgtatacgcccgtgctcgccgacatagtcagagacaagtatctctccgaacctataacaaacggcatatttgaaacgctgaaatcccttgcattcgacacgaacacggatctttacaacctcgacagacttgccgtggatatgcccgagccgtttacttccatactcgagaggtataacgtcaacattactaccttcaccgagaagataaagggaatcacaggctgcggagaaaacaccgtccgtgcgtttgcggaagagatagcaaagccgacctcgcagataatcgcaaactgcgcttcgtttattgtaatcttcctcgccgcattcattgtgctttcactgctgacggcggttttgaacctcattttcaagctccccgtgctgagtcaggcgaattccgtcctcggtatggctttcggtgcggttgaagctgtgctgtttgcatttgtgcttgcgacagtgcttgcatctctcgtgtcctccctcggttcaatcgacccctctctcttcggcaaagacgtagttgaggacacaagaatatgccgatatctgatagcgcacaacccgataaaagagataagttctataattaattggtaatataaggtaaaatatatgataatgtgttcaagatgccacaaaagagcggcagtaatatttctgcataatcctcaaatgggcgacaaacccgagggattctgcgtaaaatgcgcacgagagcttggaataaagccggtcgacgacatcatagctcagtcagggcttgacgacgacacaatagagcgcctcaacagcgatgttcaggagcttatagacaacggagagataaaccccggcgaaacaagcagtgcggctcccctgttcaatttctcaaagctcatgggcgacgcggcgagaaaatccgaggagaaagccaaaaagcgcgacaaaaacgataaaaacacagacaaggacgatggcgtgaaggagtacaagttcctctccggctacacgacgaacctcaccgaaagggcaaaggaaggcaagctcgacagaatagtcggacgcgatcgtgagcttgaaagagtgatacagatactctgccgccgtcagaagaacaatccctgtctcataggcgaacccggagtcggaaaaacagccatagcggaagctttagcggagaaaatcgcggcgggaaacgttccctacagactgaaaaaccacgacgtgtgcctgcttgacctcaccgcgcttgtagccggaactcagttcagaggacagtttgaatcccgcgtgctcggactgctgaacgacgtaaaggcaaagggcaacgtcattcttgtcatcgacgaggtacacaatattgtcggagtaggcgacgccgagggaagcatgaacgccgctaatatactaaagcccgcgctctcgagaggggagattcaggtcataggagctacgaccctcacggaatacagaaagtacattgaaaaggacaccgcgctcgagagaagattccagccggtcatggtaaacgagccttccgtcagcgatacggtagacatcctccgcggaattaagaaatactacgaggactaccacggcgtgaagatatccgacgcgcttctttcctctgccgctcagctttcggagagatacatcacggaccgcttcctgcccgacaaagccatcgacctcattgacgaagccgcttcgcatatatcagtgcatactcccgagataaacgaaagacacgagcttgccgacagaaaagtaaaggtagagcacgacaggagtgagcttgaaactctcataaacggcggagacgctcccgcaacggatgaagaagcggaggagagatacaagaagctcgcggacctcaaggcggaggaaatgcgcatagaaaacaggctgaccgagcttgacgagatatgcggaaacgtgaaaatgaccgaaaacgacctctgcgacgttatcgagatttggactggagttccggcgtctgccatagccgagagcgaatacgaaaagcttgaaaaactggacgaacgcctgaaaaagaggataatcggtcaggacgaagccgtagacgcggtcgcaagggcaataagacgctccagaaccggagttacatacaagaagaagccggtgtcgttcattttcgcgggacctacgggcgtcggaaaaacggagcttgtcaaggttctcgccgcagatctcttcacctcacccgagacactcatcagacttgacatgagcgaattcatggataagttctcggtatcgcgtataataggctcccctccgggatatgtaggctacgacgacgcgggtcagctcaccgaaaagatacgccgctgtccgtattccgtcattctctttgacgagattgaaaaggcgcacccggacgttatgaatatcctgctccagattctggacgacggaataatcactgactcgcacggcaagcaggtggattttaccaataccgttatcgtaatgacgacgaacgccggaagcacatactcccacaaccgcgccggattctccgattcacagaaggcagtggtggaggacaagaccagacgcgcgctggaagatttcctcagaccggagtttatcaaccgtgtggacgaaataatcacgttcaacccgctctcggaggaaaacttcaagtccattgcggatatcatgctctccgatctcgctactgtgcttgacaaaaagggtatcgaatctgaattcacacctgccgcgcgcgaatatatcgcaaagaaatcgtattccgtcaagttcggagcgagaaatatgcgccgccttatccagagcgaaatcgaagacaaaatcgcagagcttatcgtggcaaaacgcggtcagcttgacaaaatcacggttgacgcggacgaaaacggcataacagtaaaataaaccgaaaaggtagtctgaaatgaaagcaaaaaacgactggcacctgcttacggacagtgaagctctcgaaaaactgtcggtcgatatgtataagggactggatgagcgtgaggtaagaaaaaggcggcgaaggtacggcagaaactccatctggaaaacgtcaggcttgcgcacttctcccggaatgatagcgtcggtgttcgatatcgctacactgctccttgtgataagcgcggtttgtgcggcaatgttcgacaaaaactacgaggcagggtggctcaccgctattcttgtcacagccgctgtcattcgagccgttacgttcatccgcgcggagacgatacttgagggaactgcaagagcaaagataccgtcggtttcggtgatacgtggcggcagagttaggatgatttccgctgacgacattgttcccggggacatcgttttccttgaagccggagatacagttccgtgcgacggcagagttttgtccgactcctccgctgcagttaccgaaaagggcataacggaaaacaaagctccgctgaagaagttcaactccgtaatcaagctcgccgagggaagccacgatgtgccgtgtgaattccgctcgaatatgctttttgccggctcgactgtactctccggaagaatgagaatgctcgcggcggcaaccggggaagaaactctcgtgtcaatgaagcagggcggcatagaaatagagtcggctgaaattcccgagatagaaaagctgagggagagaagccgcacgacgtcgcttgtaatgctcggatgcgtcatggcgctaacgtttgtctccatgttctggcagaagaatttgagcctgcccgaggttttcctctcgtccatggcaatggcgacggcggcaatgagcgaattcctcaccgttatcggatatatcatattctccgtggcgatacgcgactgctccgacgtttcatgcaggctcggcagaaagaaaaacagcacccgcgcggtagtgagaagaccggaaaagctcggcggaataggagctgcgaaaaagatagtgttctgcggctcgtcgttcttcaaatccggcgaagcggttctctcggcgtgcagagcggacggaaaatattacgaggacaaggcgattggagacaacaaggacgtagaaagacttctcgaccatgcggcctgtgcggctctcggaatgcagagcggcttgtcaagcggaggagacgtcaagagcatgacctctcccgaaaggcttgttcatcttgcgaccgatgcgtatgtaaagctgtgcgggaagaatattcagacagaatgcgcacttgccgaccacagaggacatgaggcagaaggttcgatgggacttgaaacctctcttgtgctcattgaaaacgagctttacgcagtatcgtgcggcaatatcgacgacgttatgcggtgctgtacaatgatagagaccgaaaacggcacggcggagcttgacaacgagacaaaaaagaaaattttcaccgaatgcgcaagacatgagataagcggaggcagagttctcgcagtatcgcgcagacattctcagttcccgagccttgtgcgccttcccgtgctgacccagtacatgacgtttgtcggatacttcgttatctctgagaaggaagaggaatacgtacgggagaacatcgcgttcctaaagcaaaacggaatcacacccgtgcttttcacaagaaactcgcaggcggattattattacctccgaaagctcggtctgttcgataaatccgctgaggtttcaagttacaccgaagccgacgaaaacagctccgtagtgtcgtttgacggactgagtgagcatgaatacgccgcgtcttccgcttacgctatgaaaaacatcggcggggataacgtgatagcggtcggcaagagcgtgtggaactcgggcgtgctgtcggaaagcgaatacggcataacgatcgcgtcgtcgagcatgaagaacatccccgaaactctcgcgagaaactccgacgccgcggtttatacggattcggtgaattctgcgggaggacttgacggagttgttcgtgtgctgaaaacgtcaaaacgcgcgctcggcaatatctcttcagctgagttttatctcacggtgtcgcaagccgcaagagtggtgctcatgaccgcgtcggtttgcttcggagtgggagtaatgtcgccggtgttcatactgatatggggactgctgttcgactttaccgcggtgctcgttatggcgttcggtgacaattccgctgtcggaaaatccgctgtcggaaagcgcgggaataccgtaaaatccgcagctttcggagcggtatggggcgcggtgctgtctcttgtatcgctcggagtgacgcttatcacaaaatctgccgcagagagtgcgtccgtgcttgcgggagctgtgatactctcgggacttgcgttgacggagcttgtgatgaagccaaagctaaagctgtcgtcatacaacaacgcggacttgcttttcgtgctgttctcggcggctctcgcgtcgcttctcatgctgaccgaattcggagcgcgtctctgctcgggttctgcggcggggatttgcgcactgttttcacttgttcccgcggcggtgttgacggctgtatgcttcattattaaagctgtgagaaaacataagaacaaataaaaatgccggttgagtagtgattgaatgcttgctcatacggcattttttcgtgaatattcaaaatgtttcggtagattttttcctctcgaaaatggtataataaacagaatattacagtaagctggagaaacaaatgaaaaagacggttgtcgggataatcgctcatgtcgacgcgggaaaaacaacgctgacggaggggatgctgtatctcgcgggaaaaattaaaactcaagggcgagtggacaaaaggaatacatttctcgacacgcacgagcttgagagagaacgcggcattactatattctcgaaaaccgcgcgccttgacttcggagacagcaatatcatcctgctcgacactcccggacacgtcgatttttccgccgagactgagcgaacgctgtcggtgcttgactgtgcggtgctcgttatcagcggaagcgagggagttcaggcgcataccacaacgctctggtcactcctgcgcagacacaacgttccgacttttatctttgtcacgaaaatggatcttgtcggaagcgataagaacgccgtcatgcgcgacatcacactctccctcggaagcggagccgtggattttgactcacccgaacgtgacgagcatatcgcgctccttgacgacagcctgcttgactgcttcctcgcgggagagagcataacgaaagagcagaccgctcgtcttgtgggtgagtgcaggctgtttccgtgcttcttcggcagcggactgaagctcgacggagtacgggagctgcttgaagccatagacctgtactgctctgagaagggatacccggcggattttgcggcaaaggtgtacaagataggtcacgacacaacgggaaaccgattgacgtacatgaagataaccggcggaacgctcgtaaatcggcagaacatcacctacaccgtgaacgaagaggagataacggaaaaagtcagcggaattcgtctgtactcaggagcgaaatttgaagcggtcgactcggtttcggcaggagagatatgcgcggtcacgggaatgagcaaaacctacgcgggagagggtctgggacgcgaaaaatccgaaagccgcccgagccttattccggttctaagctacagaataaagctgccgaatgaggtgtctcccgtaacatttctcccgaagctgcgcgagcttgaagaggaagaaccgctgctcggcatagtctggaacgaacgcttcggtgaaatagacgcgcgcatcatgggacaggtgcagacggaaattctcgtgcggcttatttctgacagatttggcgtcgacgttgagtttgaggacggcaggataatgtacctcgaaaccgtgtccgattctgcggagggcgtgggacatttcgagccgctcagacattacgccgaggtgcatctcatgcttgagccgggcgagcggggcagcggacttgtatttgcgtcggattgcagcgagaatctccttgacataaactggcagaggcttatcctcacccaccttgaagaaaaaacgcacctcggagttatgacaggctctcccataaccgacatgaaaataactctcgtcagcggaagagcgcacctcaagcacacgcagggcggggatttccgtgaagcaacctaccgcgcgctgagacagggacttatgaccctccgagaaagaggaaaaaccgtactgctcgagccgtattattccttcacattggagctgccgggagagtatgtcggccgcgcgatatcggacatcaccgcaaaatacggcacgatagacgagcatgaagcaaacgaggatttttcacttctgcgcggaaccgttcccgtgtcggagatgggagactacgcaaacgaggtcgcggcgtacactcacggcaagggaagactgtcggtgcttgtcgacggatattacccatgccacaacacggacgagatagtcagcgaatacgactacgacccgacggctgacatagacaacactcccgacagcgttttctgttcgcacggagctggattcattgtgccgtggtatgacgcgccgtcgtatatgcacctcgagatgcgaaaaaccttgtcaagtgacgattctccagcgcctgtgccgagagtgatagagagcaatatcgacatagacgagcgtgagcttgaagccataatggagcgtgagttcggacccatacgccgccccgtttactccgacccgaaaaagcccgtggtggtgaacgaacgaccgaagaagaaaaaacgctcgctgtatataatcgacgggtacaacgtgatttttgcgtgggacgagctgtcggctatagcgaaattcgaccttgaagactcgcgcgtgcagctgtgctccattctcgcgaactataaggctttcacgggacgggatatcgtgctcgtgtttgacgcgtacaacgtgaaaggcgcggtaagacgtaagacggactacaaaggcgttacggtggtctacacgaaggagggcgagcttggcgacacatatatagaaaagctggtctatgagataggcgaggactattccgtgagagtagttacgtcggacggacttattcagctgcaggctctgcgttccggcgtgctgcgaatgtcggcaagggaattccgcgaggaggttttggagaacgacgccgagattgagaaaatactgaaaaagctccgcgaaaagaaataacagaagacaaacaaaacaaaccccgcaggcatatactgtaccgtaacagaatgcacgcgaggttttattatgcttattgagagaagatacaaccgcgaaagagccgtcgaatatgcgcgaagatgggcgttcagccgcagtccgctgttcgagagctataacggaatcggcggggattgcacaaatttcgtctcacagtgtgtctatgccggaagctgcgtcatgaactacacgagagatttcggatggtactattcctcccccgtgaatcgtgcgcctgcatggacgggagtggagtttttctacaacttcatgacggcaaacgagggcgtaggtccgtacatgagcgacacataccccggcggcttggagcttggagacgtgattcagctcggcaacacggatggggacttttatcacacgctgattatagtcggatttttgccggatgattatcttgtgtccgctcactcaaacgacgtgttcaaccgcccgttgtcgacctacgaatacgacagaataaggtatctccacgtcgagggagtgagagccgattacccgatagactgctttgacggattcataaacggggagagaatatgactttaccgttgacaaatgtcgcgttttgtggtatagtcttaggaagcctctgatttaaggttatttttgcaataaaagcccctatattttagacttttatcgcaaaaatccgatttattcagagtatc

SEQ ID NO: 3374 - DNA, 9788 bp, Unknown
  16S sequences of unknown bacteria
ggcgggcgtggtcacaccgctgccgatgcccaggtactggccgatgacgatgggcgtgacaaagtaggtgacggcgacgccgaggttgccgatgccggcgttgaggccgttggccgtgcccttctccttgatcgggaagaagaagccgatgtttgccatcgagccggagaacacggagagcgcaaggccgaggaacgcgaacaggcccgcgaacaccgcgaacggcgtcgaggtgtcctgcacggcgatgccgatgccgatgagcgggatgagcaggatggccgtgaacacgaacgtgaagttacggccgcccatgcgcgccggcaggtacgtgtagacgaggcggcccgtcgcgccgacgagtcctggaagggcggtcagcaggaacaggtcggacgacgagaagctgaatcccgcgtttccgagctgcgctgcgacctgcgcggcgagcgtgttgatgcaaaacgtgatgagcaaggcgatgatggaaaccaccaggttgcgcgtggcggtcttctttccgaacttctgccagaattccgcgtcttcggggttccagttctggatgatctccttgcgagtcgggttgtcgccgagcacggcgacgccagatgtgcttgtccctgtcataggtgcctctcacttctttccccagcgagtatataacctataagagtgtagaaaagcgccctgtgctggcgaaacagggatatccctcgcgcgctgcggggaaatccccctcgttcggaggacgcgacgatgctgcggtgccgtctagcggtccgtgctgcgccttccgtagtagtgggcgcccttgtcctcgtacatgaggtggtcgactttcgagatgaccgtgtcgatgctttcgagcggcgtggtgaagcttgcgcagcccaaggccacgctcgccccatgggccgtaaacccctcgcgcagcttggagacgatgccctcgaggtcgcgcccctccacgttgtccacgatcatcagaaactcgtcgccgcccatgcggaacacgcgctcggcgcccacgagagagctcatgacctgcgcaaccgagcgtatgagcctgtcgccctcgcggtgcccctgccggtcgttgaccgccttcaggccgttgatgtcgccgaagacgatgccgatgcggcgcccgtcttccaggtgctcgacgtgctcgatcagcgcgcgacggttcatcacgccggtgagctggtcggtcgtgccgagcgcgttgagatgccccacgatgtcgcggttgcgcagcatgacctcgagaaagcgcgtgagcgtcgtgagcagcaggctcgccgtgtggaaggtgtcgggtgacgggttgacgacaagcgagtagccggacagaccgctcgagaggttgaggtgccccgacacgatgctttttgcgccgagcacgtggacgacgaagccctcatgctcgcgttcgaatgcctggatgtcctcgatgagcgtgaccggactgtcgtcgaacctgtcgagcagggcgcgcacctcgctcaaggggatgtgctgcaactccggcagcagctcgagtgcggattggtcccgcttccactcgaaggtgccgttgacggtgccatctcctgcctcctcgaacacgtagagacgctcggcgcccaggatctgccctacgcgctcgatgaacttctgcaccccgacgctcgggtcgacctcctgcatgcccaccgcgatggcgtcgtttgccgaggcctccctgaagatgaagtcgtttcggtcgatatcgcgggcgatgtaggagctcaggtcaacgctgatgttgaagatgcggttcttgccatgccagggaacgagcgtgtcgcgggacaggtactcgatgcccgatacctggttgcgatgcggtctcgtgtcgaagcggtcgtcccgcaccaggttcttcctgcaaaacgggcacggctcgttgtacccctcgatgagctcgtagcatttctcccctgcatacgggtagtcttcgggcaggtgcagatcgcgcagataggccctgttcaggtagaggatctcgtaggtgtccgggtcccacatgcccacgcggtcgtccatattgtcgaacttctcgcggtcgaacagcaggcggtcgccaaccagaagctcccgtccgtacgactgctcctcggcttcattcaggcgctcgaccagcatgcgcatgaggccgtcgaaactacgggattccgagccgctggcaactgcatgctgcaaatacagcgtgcagctgcagccgtcgacctcggtgatggcatgcacgccgctggcgatggaaagcacgcgctcccgcagttccgcatcgtccgcgcgcttctgcagataggcgaagcagcagctaccgatatgcgcgagcgcgccgcccgccgcgcatatctttttcacctcttcgtagatgcgcgcgaacaaagcgtggcgaaacgtctcgccgtacatggcgcagacgcggtcgaattcgggcacgtcgatgagcgccataaggtagtcttcgccgttcagacggtagctgtcggcaaactgcagcccggtcatgagcatgctgcggtaccccggcaaccccgagacggggttggcaaggagcgctttcctgtcgcgctcgccttgcacctcgagctcggcgagcgtcctgaagcttccctcgagcccgatgatgcgtccgccctcgtacaccgggtacttcgtcaccgaaatcgagcgcatctgcccgcccatcaagcaggacacgaccgcatcgcgcacgggcctgccctcctcgaggaccgaaagctcatctgcgacctgcaccgaagcgttcgtataccaccccatgtcctcgttcgtcttgccctcgatctcggccacagacgaaaggccgcacacgtcgaggaaggcgcggtttgccccgatgaagcggcgctggcggtctttccagaacacgggggtcttgctgaagtcggcatgcgattgccacagattcgcccggatgtcgccgccgggatgctctgcctcgacgggcatcccaaacgacgcggcaaacgtgggcagcagcgcgctcacgtcgcgttggcgttccatgacgtcgtcgaatttgcagaacaggatgtctttgtgcgctgtgcggttgaggacgacggcgataaacacctcccagcgaaacgccccgtctccgtgccgcacgcgaaacaggtttgccgcctcggagcgctcggactgctctgccaaggtgtacaggttctcgatgcgcgcaaagctcaaaaaacgcggcaggtcgtccgggtgcatggtcttgcgggccatctcggcgagcgtccgctcgatccccgagatgcgctgcccgaccttcacgtcgggcaacatggtctccacgacctcgagctcgtcagtgccaacatgcaggtagtagatgccgtcgtaggtgagcacgaggctgcgcagcatctggtcgaagcgctgcgagctgctcccgtcgccttcatgagtgatgttgtgcagctcggcgcgcagaagatacgcatcccccacctccgcgacaacgtccaaatacagcctcaggtactgccccgcatcgacgtaggtcatcatctcgcgcttcccgctttcgatggccttcttgaaaaacgcgacgaacttgtcgtgcaggggatagtcgcgcgcggacaagatcttattggtctgctcgaggctgacagagcccagccccttgagcacctcgcggtacgccttgctctcgaacaggaattccatgctcggatcctggaacttgacgaccgccacgggagtatcagtcgcgatgttgacgagccccgccctgttgtagagctgcccctcgaagcgcgtctcggggaacagccgcatgcggtcgcaacgcgacctcagggcctcgggcggcagcgccttgctgaagtagaacccctggagcgcctcgcagccgatcgagcgcagaaaatcaacctgctcttgcgtctcgactccttcggcgaccgtgtgaatgcccaagcccttcgccatctggacgatagaggtcacaatggtgcgcgcgttgtcggtgaaatggctcagaaacatgaagtcgatcttgagtccgtcgacggagtagtccttcaagacgttgagcgacgagacgccgctcccgaagtcgtcgatccagacctggtacccgttcgctcgaaagcgcccgatagcctcctgcacgagctctccccgttctgcgatcgcggtctcggtgacctcgatgcgcaggtagtcgtgcgggacctcgtacctgctgacgaggcggtctacctcctcgaacacgttcacgaggctgaaatccgcgcgcgagacgttgaccgagaccgggacgacgtcgcgcccggcgtccatgtcggtgcgcagcctgtgcaccacgtactcgatgacgtgcaggtcgagcttgtggatgaagtgcgcgtcttcgagcacgggtatgaacgcatcggggctcaggcgctcgccgtgcggcgtgtcccagcgcgtcagcgcctcgaccgagcagaccttgcccgaaaacgagcggacgagcggctgggcgaacaccttgatgttgccgttttgcagcgcttcctcgaagttctcgagcacctgggcgcgggtctcgatccgctcgcccatctcctcggtgtagactgcccagcacgcgtcggcgctgtgcttgatggtatcgcacgcgatcttggcaagatcgaccgtatcttgcgcctcgacttcgagaagcgccggggtattggcgacgaagacacccgccttgaggtggatgcgcgggttgtcgataaaggcgtctgcctcggcacaggcagtctcgatgcgagagaacacgcccgtgccatctgggtcgagcaccacgaagctgtccgccgcaagatgcgcgacaaccccttcgcggaaatgcgagcgcaacatgtcggctatccgcccgaggcacgcatcgcccgcctcgatcccgtggagacggttgtacaccttgaagttggtgatgttgaagaagatcgggtagcgcgtaccgtagactccgcgagagctgtcgtccgcggcgagcgcgccggttttctcgtagaactcgtgtatgcccatgaggccggtgacggggtcgctttcgatgcctgtcacacgctgccgcatatccacgaagagcaaggaccagtattcgcacccatcgatgcaaacatgccttgcggagccttcgacctgcacgaagtggcccttggcgccacgaatcgagaacgaaaggtaatagtagtcggtgccggcatctcctgccgtgcagttgatgcggtcgcacaggctggcagcgggcctatcagctgtcataccacgaaagcgcccgcccgtgagctgcgcgaactgcgcgaagtcatcgcattcgaacagcttgagcacctcttggctggcaaaggcaacgcgctcctcggcatctgccgtgatcaagcagaacgcgccgggaacgacatcgaaaatgcgatgtatgtctgctgtttgggacatatgttccgtactaccctatctttttcgggtacaaaaactgtcagcttgcattctacgcgcagcggcacgtgaagcccatatctcccctattggaagcgccaatggaaaagcaagctgctaaagcgagatcaagccatgtgcggcagcgtagtcgaacagctcgggtttagagtggagtccgagcttggtcatgaccttcgacttctggctttccaccgtcttgaccgagatgccgagcatgtcggcaatcgcgctgttggagtagccgcgcaccgaaagcgagacgagctcgctttcgcgcggggtcaaggcggaggccgccgggtcgtttccggagagggagtcgcggatgaaatcgcccagcatctcctcgcagataaacgagtcgccgcgctcgatcgcgcggatggcgtgcacgagcgtctcgtccgacgagctcttgagtacatagccgcgcgcaccgcgctccatggcctggcgcaggtactcctgctcggcgtgcatcgtcagcaccagcaccgcgcacgcaaggcccgccccttcgatgcgctccgccagcagcaggccattcttgtcgctgcccatcgagacgtccgtcaccaggacatcgggcttgagctcgcgcacgagctcgaaggcgctgtcgggctcggaggcctcgcccacgacctggaaatcgccctgctgctcgaggatcatcttgaatcccatgcgcaccatggcgtggtcatctgccaatacgatgcgaatcatcgcgtgctcccttcttcgggcagctcgacacggacggttgtgccctcgccgggccgcgagtagatgctccaggtgccgccgatagctgccgcgcgctcgttcatgccctcgagccccagcccgccgccgcgtatggcggggtgcgcggtgtcgaacccgtcgccgttgtcccgcacctgcaagaccacgtttccactctcgcgccgcaaggcgacgtcgatcgtctcggaacgcgagtacttgcacgcgttcatggccgcttcctggaatatgcggtagagcgccgtctgcgtgtccgggcccaggcccgagacgtctgcatcgagctcggccgtcattgcgacgccgaacccgcgctcgagcttggcacagtgcgcttggatcgccgccgcgagccccagctcgtcgagcgccgccggacgcaggtcgctggcgagcgcgctcacgtggttcatgatcgcgcgcagcttgtcggaggcgcgctcgatgccgaggcgctgctcctcgccttcggggaggtacttgagcttgcgcagctcgatctgcgcaagcaggagctcttgggaaatgccgtcgtgcagctcgcgcgcgatgcgcttgcgctcggcttcctgcgcctggatgatgcggtgcgtcatctgcgtgtacgacgacggcgcctcgcccttcgaaggcgtgaagcagggcttcggcgccggcgtcagtccggtgcgttcttgcgcgaacgcgcggatgcgctcgatgagtgcgtcgggaaacgcgcggggggtgcggtacgcgcacagacacacgagctctaccgcgcccgactcgccgaacaacggcagcgtgagaaagctccacagcccctcggcggcgacgatcggatacttgtagagctccccttgcgcgatgtcggcatcgacgttttccacgagcatcggacgtgcccgctcgaaggtcatccccaccgcgcccacgccggcgggcaggaggatgcgctggtagcgcgtgttcgtattgcccgcgacgcactgccacgagagcatgggctcgtcggtgtctgccggcacaatcgagaccccgacaaaatcgaagccgaactcgtctttcagctgccgggcgagctcctgcccgcgcccgaacccttctgccgtgccttgtttgtccacgtgaccgcccctctcgatgccagctgtcctccaaatggcaaaagtgcctgctgaagggcataattttgctaccgtgcctcgtctggatatacagtagcgcgcaatttggcggcgggcaaactccgcggggccgcgccagcgcgaaaggcgatttcgccgcacacggatgggcatataatgctgtaatcgttctcgaattgaacgtctgcgcgctggcagagctgtcgaatcgagagcagctcagctgcgccagcatcggccgagtcccctcatcggaactcgaggaggggggtcatccgtggatgcagcactggcttggagctccgcgtttttcgcacgcaacttcatggacgtgatccaggcgctcatcttctcgctcgtcacggtcatgctgttcttcaggacagatgcccgcccacggcagctcgccaagttcgccttgtcgtttctcgtgtcgttcaacacggccaccatcatctccacgctcgtctaccaggcggtctgcgccaacgcagaactcaccggcacgctgtgggatttcctgctcgccaccgcctgcctgctcgtgcccatgctgccgatgatctatctgtacaaacgcgtgatcggctcgcaggcctcggtggcggccttcatctacgcgctgttcttcaacgcgaactgcgtggcgatgatcgtgtccgacacgccgctttcgcgcacgctgctcaccgtggggatgaccgtgctgctcgtgtggctgtttgccaaagagctgcgctacatcgcggacgagaagtcaatcttgcgcaccgaccggcgcttcaccggcacctcgcttgccttcatgctgctgctcggggcagaggcagagctgccgcgcatcacgttcaacggcgggcttcccaccgagggtaaccagttcgcctacgccgtgtccatcttgggcgtcctgctcgtggcgatgttcgtcatcttcatgaagttcaatttcttcgccatcatgaagtacgagaacttcatcagggagcacgacgaggaccaggtgaccggggcggcaagcctgagccgctttctggaagtggcgccaggcgccatcaaccgctctcgcgagcgcggcgtggaggtcgccatcttctacacggatcttgccaacttccgcgacgtcaacatcgcacacggctatgacgtggggaccgatatccttcgcgagatctaccggattttgaccgagcagtttcccacgagcgtgatcgcgaggatctcggggacccactttgccggtgaggtcccgctctccaaggcgcaagcgggcttcgagcgcgtcgcccagcgctgcgaggcgctgagcatcgacgagacgctcaggctgcgcatcggcatctacccgctctcctaccttggggacgatgaagattccagggtcgtgcccgaggagatgatgcaccttgtggacctggccgcgaccgccatgcgctttctcgccccggcctcgcaggaacacgtcaggttctacgacgacgagctcgagcgcaacgagcgaatcaggctgcatgttctggcgagtctggacaaggcgatcgagaaggactggctgcgcatctattaccagccgatcgtcgaggtgtccacgcgcaaggtggcagaatacgaggcgctgtcacgctgggtcgacccggagttcggctttctcacgcccgaccagtttgtcgtgccgctcgaggccgcgcgcatgacgtgcaagatggacctgaacatcctacggcttttcggcagggacgtaaaacgcctgcgaaaggagaatcgtgcggtcttccccatcagcttcaacatctcgcgcaccgacctcgagagcggcatcgacctgttcggggcgatcgaggaggcgatgcgacaggcggacttgccgcgcgagctcgtgcatgtggaaatcacggaaagtgctctgaacggcagctcgaccgccatggccgaagccatccgccgcttccacgagctgggcctcgaggtctggatggacgacttcgggtctgggtactcctcgctcaacgtgctgaaggactacgacttcgacgtcatcaagatcgacatgcagttcatgagcacgttcgacgagcgttcccgctcgatcgtgcgctcggtctgcgagatggcgcgctcgctgggaatccgcaccgtcgccgagggcgtcgagacggaagaacagttcgcttttctcgagcgcatcggatgcacgtacgcgcaggggttcctgttcagcaagccactccccgccgacgaggtgctcaagaagatggaggggtataggtaggctgcgcgcccgcggggtgcgggtgccgtggagcgcgccgggggagagcgggaacgtctccctcacgggctctcgcggcagccgggggccgtggatgccacggg

SEQ ID NO: 3375 - DNA, 6134 bp, Unknown
  16S sequences of unknown bacteria
ttacttactgcggacggcgcgggttttctcaatttttattatattgcggcttgaattttactttgtcattagctcgcagacaagcgcgctgtgctctgcggggtcgggaacgctcttaccgccgataaggcacgcctcgccgtaaagcagctttgcgtatttaccgagggtttccttatcctcgttataaagcgttttcagcttttcggcaatcgggtgtcctgcgtttatttcaagcacaagctgtgcctttaccttgttctgctccgctcccggcatagagtttaacaccttttccatttcgagtgaaattccaccctcgcttgtaaggcatacggggtggtccttaagcttgtttgtaaagcggacggcgtttatcttatcaccgatactttccttcatcgcctcaaacatatccttagcggcggtgttttcctcttcaagcgctttcttttcttcctcgctgtcgagattcaaatcgttatcacagatatttacaaactttttaccgtcgtattccgccagcattttaagggcgaattcatcgacattttcggtaaggtaaagtatttcgtagcccttatcctttaccgcgtcggtctgcggcagcatatcaatcttttcgtctgtctcgccgcaggcataatagatagaatcctgcccctccttcattctgcttacatactctttaagggtaacatatttcttttcattcgtcgagcggaaaataagcaggtcgcgcagggtttccttatgcgcgccgtaatcgttgtaaatgccgaatttaagctgtatgccgaatgccttgaaaaattcctcgtaagcctcgcgctcatctctgagcattttttcaagctccgattttatcttcttttcaagggtcttggcaataagcttcagctgtccgtcgtgctgtaaggtctcgcgcgaaatattgagcgagagatcctcactgtcaacaagtccctttacaaagctgaaataatcgggcagaagctctgcgcacttatccattataagcacgccctttgaataaagctgcaagcccttttcatattcctttgtgtagtaatcaaacggcgggtgtttgggtataaacagcagtgcggaataggttgcctgaccctcggttttggtgtgtataacgcgggcggggtcgtcgtaatcatagaacttttctttatagaaattgttgtaatcctcgggctttatttcgcttttctgctttttccaaagcggcaccatgctgttgagggtgcgtatttccgtaacgtccctatattcggtgggcttatcctcctcgccctcctttttcggcacgggctcttttgttgtgaactccatacgaatcgggtggcaaatgtaatcggaatacttctttacaagcgcgcttattctgtattgatcaaggaactcatcgtaattatcgtccccctcgttttcctttatgtgcagggttacagtggtgcccgccgtttccttttcgcagggctcgaccgtgtagccgtccgctcccgatgaggaccagcgaaaagcctcgtccgagccgaaggcgcggctttcaaccgttaccttatcgctcaccatgaacgccgaataaaagccgacgccgaactgacctataatatcaacattttcctttttctcgttttcctgcttaaaggcaagcgagccggattttgcaattgtaccgaggttcttatcaagctcgtcctcggtcattccgcagccgttatcgattattttaagggtgcgggcgtccttgtttatttccaggcgtatttcaaaatcatcgggcgctattcctaccgaattatcggtaagcgaacggaaatatagcttgtccagcgcgtcgcttgcgttggaaataagctcacgcaggaaaatttctttatgggtataaattgaatttatcatcatatccataagcttttttgattcggatttaaactgttttgtacgcataaaattatcaccttttttgagagtttgactttcactgacatatagtatagaacatctgcagcactctgttgttaacaaattgttaacgattcattaaattgtattgttgacttgtattttaaagatgctataataaccatataacattatcggaggtaatatttaatggaactcaaaggtacaaaaatcaactttctcggcgacagtataaccgagggtgcgggcacatcctcgcccgacaggatgttcacaatgttaattgagcgcgaatacggcgcaatatgccagaattacggcataggcggcacacgcatagcaaggcagaagacgccgaccgaggaaaaatgggacagagattttatatcccgcgtgcccgaaatggataatgacgcggatattgtggtggttttcggcggcactaacgatttcggtcacggcgacgcgccgctcggtacaatgagtgaccgcacgccctacaccttttacggcgcgctgcactgcctttataccgcgcttaccgaaaaataccccgatgtgcccgttgtgatactcacccctctgcacagatggaatgaagacagccccaaaggcgacaataagcccgagcctgtcggcacgcttaaggaatatgttaatatcattcgcgaggttgcggagtattactccttcccggtgcttgacctgtataaggaaagcggcttgcagccgaaaattccggtaattcagcaaaaatatgtaccggacggtcttcacccgaacgatgacggcaatgcgattttagcgcataaaatcgcacgcttccttgaaacgctttaatcctgtaatattaaaaatatgctccccgaagcacagtaatcagcgcttcggggagcatttattgcatttaaattaatagattgaaagccttccgtccgatgaacggagccaattttcgtgaagctcgatatccggtgatgatgacggaagcccgaccggcttgttatccgcatttgcccagtaggaaaccaaacgaacgcgaatatatgccgggtaattccccgtattttcaacccggatatcatgcttttcaaagctgtggcgggtaccggaggtatactccgccccgtccagcttttcgtgtgttatgcaggaaacctccgccgggaggaacaaattattagcggaggttttcctgaacataaaggcaacggtaatgctgactactgctatggtaagaaaaaccgcgaagagggctataactgttttctttttcaagataaggttacccctgccttcggttttgcacgggagcgctgtttccgttaagacggtactgctccgcggctgcttcgctgaatgttactgtattgtcaacgccttttttgaccgataccgtttgtgaagaatccttgtatctccttgaccagcttcccacctgctcgaccgtgtagtcgcagcaggggagatcccttacggtcacgctgccgctgccgttttcatcagcggtgagcgtaatgtaaaccgtaagcccggaatcggtgactgcggttattttataaacgaacacatgactgccgttaccctcgtcttttgcgttttaacgcttgattgtgagctatgaaaaggcaggcttaaacctttcatagaagatattggtttccggctcgggcttcagcttatcccttgatggtgttaagcagttggttgaagcgtaaaccaactcggaatccgccacggtggggttgttgcagactgaaatttatatctatatcgaaactttactttgtgtatctaatctgcaaataagctttaatttctgacaatccctcagccgctgacagcggcagctccctttacacaagggagccgagggtctgcacatctgacatctgccgtctaacatctaatgtctaaagttcaaagttcaatctcaaaatcgagaattttgatttttccgtcccttatttcaaacgcttttgaatagtctccgaagcctattctgcgggtgttctcataggacgcggcaacgccgccgatacctattataatacagattgccgccgtaagggagattccgaacgaccttaaaaaagctctttttattttaaccattccctatttcagattattaagtaaatccgcaagcgaattgcccacaagctctgcggaataatgcgcctcgtctacagtgtttgcgtcggttccgaattctataagcagcgagccgttcgtaaggcattcgttgtaaccgttaggtgtaaggcttaaggggcgcgcaagggtcgggtatttgctttcaatagtctgctgcaggcgcagcgccagctttaaattttccttccagttcggaaaatgcttctgcgctccgctttgcgagcccataacaagcattacctgcgccgcgcgcttaccgccgatttcggtagtgagctttaccttatcgttacccgaggacgccgcgtcgcggtggagatcgagaacgatttttatactcgggtattttttcaggtacccgtttattgtttttgccgcgcgggtatagctgccggtgtatttcggataatcgtgttctgttgtatcatgcagggtctttattcccgcggcgttcagcttttccgccacaatatcgcccacgctcaccatattgaccgatttatcccttgagcggggagagaacgcgtcggtgtaataatcggtgttttcggtcatataggtttcggtggtatgggtatgcattataagcacctgcggcttatcgtttttctcaatcttaaaggtaagcggtgcggacaaaagctcctttatgctgatatttaccccggcgctgttttttacatatacattattatatgaaagacccgacttatatggcgagatgtaattattgattatttttccttttaccgtacccttggctgcggcgggaacgcttgtctccgatttttcacttgccgcggcgacagaggaggtgctgccgcccgactccgtttcttcctttttctccgtttcttcgggggcggaagagctgttttcatagctttcaatctctcttttttccgatacgagcttcacagcctgtaccgcaggggtctttaaaagcctgccgtaaaaattgtagcctaaaagtaaaatacacaccgtgaaaacacaaataagccttgccgcacccgctccgtttttcattttcccgccccccctttagataattttatgccgagataacataaattagaccagtgcggaaattatttcggggtctgtttcgggctgcagaaacatatttattgcatccgccaaaagctttgcgagccgctgtgtgagcatatccacatccttcggggttacaaacatttcgctttttttctcgggtgatattcccgtgagcctttcggataaggtgtcggcgtcaatcaccgtaggcacgccgattgctattaccggtactccgacggttttttcacttatttccccgcggttatttttcactcccgagccgggagatatgccggtatcacacagctgaacggttttaaaaagcctgtccccgctttgtgcagccagcgcgtctatcacgattacggcagcgggctttattttctccgccgccgccttaataagctcgcccgcttcaatgccggtctgccccagaactcccggcgttatgacagatacctgccgcaataaatcaagccccgccgcctttgtaagctccttcggtatatgccgcgtcgcaaaaattccgcgggcgacggcagggcctaacgcgtcgggggtgatttcggtatttccgagtcccgctgccaatataagtccatctctttcgggcagcagatattcaagctcatcccttattatctcccttaaattttcggggtcttcaaacgaaatatcgggaaattccagcgttatatacctgccgaggggtctgccgaggagcctttcctcctcggaggtttttatctccagccgcaaagcatttacattgccgcttcttttttctttctttatatgtccgataaaattattttcgcaattctccgcaatttctattgcaagatcagttcttaccgccgtttttgtttcctcccgaagcttttatttttattttgtccttatttcaagaaaatatcgcttttgtatgtgttaaaatgatatgaaccaataagaagagaagtttcaaccaagatatg

SEQ ID NO: 3376 - DNA, 6097 bp, Unknown
  16S sequences of unknown bacteria
gcggcgggacaggctcgacgaccgcgtcaggcgcacggtcgcagctcggcgcggagggcaagcataccacgaagaccgtgacgctgtccgcttcgggttggtcaaacggaactcagacggtcaccgtttccggcgttacgtcgtcgaatacgattctcgtcgcgccgacagctgattcgcaggaagtctggggcaaggcaggtatagtctgcacggcacagtcggcggggaagctcacatttacatgcaagagtgtgccgtcggcggcggtcacggctaatatcgttattttgggaggataaaggtatgatcatcaatcagtttggaggcagcgctgtcgaaaaggtacttaagacggaaatattcaccacgtccggaaactggacctgtccggcgggagtcgagaagatattcgtgcggctatttgggggaggtgctgggggaagcaaaacaggcggcggcggtggtggctatatggcttatgcagagttgaatgtcactccaggatcaacatacccaataacgattggtacaggcggcagtggtgcagctcaatctcaaagcgctgggaacggcggaataacctcattcggaacacttttgtccgcgaatggtggcgaagctccgactacagatcacggtggcaacggtggggctggcggcgctggtgattatggttgtgccggcggaactggcgggcagttcggaggtggcggcgcaggacctaacggaattggtggtgctggtggcgcggacggcggcgcaggtgcgaacggtaattcaacaagccaaagtggcaacaacagctcatcaggtggaaaaggtggaaaatcatcatatgacaaggatggtagaagtggctattatggaggcggaggggcaggttaccaggcagacgggggagacgccgattatatgacgggtgcaaacgccgaaaattttaagaccgactatggtgcaggaggcggtggcggttacggaccagcggggcatggtgggaacggaggtggcggaggtggtgcctacggtccaggaggagatggaaacagagatggacttctgggcggtggaggcggtcagggcggctatagttcatactactcaggtccggcacgaagcgggaatggcggttccggcatagctatcatccagtactacatcgaaaaatctgcataataaggagacaacaccatgaaaatattccagattgtaagcaacgtatgctactgggacgcgacagcagtacatccgaccattgacaacactataggcaagtacccgccggacatcatctttgtcgaggcacctgactatgtcttcgagaactggggctatgactcgaacaaaaccggcgacgcacgcttcatcaagccaaccgctccggagggctggtactacgacgatgaaaccggaagcttcgaaccgatcaacccgcccgaaccgcagcccaagcccgacacggccgcgagcgtcctcgcggaagcgacggcggcatatgaggaaggagtaaccgaggcatgacaaaagcagaaatcctcgccctgatgaaggaaaagggcaaagccgacgcgctcgatctgcgttcccgcgcgaaggacctcgacggcacggcgatcatcgccgaggaatcgaaaattccgcagttcgacccgaacaaggactatagcagctgggcggtcggctctccggtatatgaaattgtagacggcgagcagcaggtcttcggactcatacagccacacaacgcttcgtactaccccggcagtacaccatcaaacacccgcgcactctggagtctcaagcacaccaaggacgctgaaaaagccaaagcatgggtcgcgccgctcggcacgtcgggactctacatgaaagacgaagtctgcaagcactcggacaaaatctggcggtcaaagcaggacaacaacccctacgaacccggcgtgaccggaactgaaagcttctgggaggtggtctcatgacatgggaaattctctccgcgctgataatcatcgtcgggtgtcttgtcacgctcggcggcgtactggtcaagctcgtccggacgctgacaaggcttgacgacacgatggcgcagctcagagtcgacctcaaccgtcaacacgacgagaacaaggagagtcacaggcgcatctacgaccgcctcgacgaccacgagagcaggatcgttgaactcgaaaggaatgtataatgaacggaatcgacgtctacaccgggcagggaatcatagactggcgatgtgtcgcgctgactcagggcttcgcgatgataaaggcaagtcaggggcgcggcgaaaccaaagcgaccgagcacctgcggattttcaccgactcgaagttcgtccggaacatcactgaagcgtcgaagacgaaaatgaagctcggcgtctggcactggatgaccgcgcggtcggtcgccgaggcatactacgaagccgattatttcatcgatgtcatcgcaccgtaccgggacaagatttcgctctgggcggcggctgatgtcgagtctgaccgctatctcggcgacctcggcaagtcggagcttaccgaaatcacgcgcgcgttcctgaatcgcgtccagagcgcgggctttcgtccgatgctctacacgaacccgaatttcttgaagtatcggttcgtgaagaacgccttcgcggacaccgacatctggctcgcgcattacggcgtcgcaaagccgatgagcgtcccgaacctgaaaatctggcagcactccgccgggcgcgtgtatggcatcagcaccgacgtcgacctcgacaccgggtatttcgacagcatgccatattcggtcggcgagaagtacacaatccgtttcggagacctctactctaacggattcccgattccggcgcggctgatcggaaaggtctgcacgatctcgaaggtcaagccggatcggattctcctgcgcgagattctgagctgggtgaagatatgagatatctgaaacggctgataatcgccgtcctagtgtacattgccgtgtacttaccattcgtcgcgatacttcaagcggtatcgggtggtgactacacggcggcgtacagcgtcggcggcattgtgggcgcgattgaactcgcgctcagctcaatcattaaaattaccgaaaaccgggaggtaaagaaaaatggatatatcgaaggtgattccgtgggtgattcttgcgctggctgtgatcgcggcggcggtggcgtttgtggtgacgctgattcaggcgtccccggcgagacggagggagattctgaactcggtgctgatgtcactcgcggtcgaagctgagcggctctacggcgcgaagaccggacaactcaagaagcagcaggtcattgcgtggctctacgcgcggtacaaatggctgacatggctgatctccgaggagtcgttgtcgcggctgattgacgaggttgtcgagaagatgaacgagtggatgaagagcaatccgatcggggcggagaatgcgctgaggtgaaaacacggtgtggcaaaggaattttctttgccacaccgtgttcattgtatatttacatttattcgcaaagaaattgtgcgaaacctattgacttttggtcgaccatatgttataatatatatgtgatcaggaaagaccacaataccggggcaagacgagaaaggagatataaatgaaaccaatgacaaggcttgaattactcgcagttcttatctcactcagagctttacttgaagaaaacaaaaacgataaggctctcgaactggtcaacgaactcattgccgaagcaaagaggacagacaaaaagaaaaactccgacgaataacgccggagcttaatccaaaaacgacttgggcggacttgccgccgccctcatcgtttctattatatcacgttttgccccgattgtcaagagaggacgtgatttttatcggcgagaaaaaaatgggcagaccgaccgacaacccgagaaccgaaaaagtcggattccgtctgtcaaaacaggaaatcgaagacattcagaagtgtgccgacgcgatgggaactcagcgtgttaatgccatcgtcgccggaatcgagctgctgaaggaaaagctgaaggtcgacgattgaggaaaaaacgctgccgcggaactattctgcggcagcgttatttttttcggattcgattgagtcagtgatttctgtttcggttgtttcgatggattcatactgtctggttatcttgctattcctcgattcgacagtaccgcacatccacatgacaaatacggagcaaagcaatatcccgaaaatcgcgtaaacgattatcaggggaacgcacgttttgagtgtgaattgcttttgtctggtcaggattcctacaaagtagaacataagaaatatgaccgtgacgaataccatgccaataatgagcgcaacggtgagaagccgatagatgctgacgtctctgatattttcgagaactgaggtcgaaaacgccataccgccgacgaacgcgaggacgaccgacgcgaagattccgagaatggcgatgtagtcggtctgggctttgtccaatgtttcctttaatgttcgggtttcgtttcttaagtctttagtttcttcggcaagcttcttgctcttgcagagtgaattgtccaacctgaaattgatactattgaatctttcttcgctcgacagtctgtcatcgccacgatctgaatactgaatacgcgcaatatcgagacttacatggtcatatagtttttgcagacttgaggcaatgttgatcggttcaccgttgagcttgtttatttctctatagttattatatagaaccgatatattttgaccaagcgtatcaatatttccattatccggagaatcatcattttgaatttcgacaagtgtccgaaatatatccgaataatagtgacgataccgactcgtactatctatataatacagtttttcgaagcgcaaataaaatcctgaacgctcttttggatcctgcaaaaaagtttgagaccttgcaagctcatgaagaatattacaaaactccaaacgctgattatcgtcgaacggtttatccataagtttgtcaacccaatctgcggatcaaatcattgtcaatgatgtgcttgttcccctgcccatggttgaaaacttttgaccatgctctaccttgcttgtgcgtatcctcaacaagatcccaaggatcaagcttccgtttttcttcaacaatcggatcaacatgacaacgatcgcttttgtcgatcacagtatcgtatttactgataatcggcatcgcgccattgccgcaaaaataataatatacctgccttataactggtccgaactgccatgcttcaaacaaatcatcaaaagcaagctcgttacggctgagataatctttctgaatatagtaaagtatcttttgcagttggagatttgttatagggcatttatcattggcgcactttgtgacaatgtatttcgacaattcaacagccgaataagccatactaacacctccagttcatttatagtatatgtgcaatctcgctttgggtattatcattatagcataaaaatagtcaattgtcaataacctgtgccaaaaacctaagcagaagattctaaaaatgagcggatttcagcaatcagataaaccctacacgcctgacgacaccctgacgacaaaaagccccggaaaagcctttgcaaagcccccggagcaaatctgtcatcaaaaagatcaagagccggaaatccgcatgaacactggattttccggctcttttcattggctggggatgagagattcgaactcccacatacagagtcagagtctgctgtgctgccattacacaaatccccaataaacggtttgttccgttaacagataatattataccacacagagaactatttgtcaagaggttttcgaaaaaaagtttttcgtttccgaaaaaacttttctcacgtaaatttgcaaagtaaatgcaagaatagcatttaccgattgcatttagtctggcaaagaatatgtggtagcatttagtctgagaaatccatcaaaggagaagcagacaaatgcaagctaagaagaata

SEQ ID NO: 3377 - DNA, 32759 bp, Unknown
  16S sequences of unknown bacteria
tgaacgaaaaccaacttgtttttgctttgtcgacctcgaccggaaccgaaggcagctacattattacgctaaacgtattatccgaccttgcagacatcgaagtgaagacggtgcgaagcaaggaagtaatcgacggtgaagttacgtttaccgaaagcgaatacctggcgtttttgaatttgcagaattatgacgaagcgtgcgactatcaggcggctgacggtgcgacggttgacgtaaatttcgacaatcagacgcatgcgcttatttttaacgttttgtctcaggataaaacgaatacaaacaaagcccaagtaaaaattaacgtagcgcttcctttcggtacgcatttactcacgggcggcggtgacaaaaaagacgccgtttacgactacgaaaatctcgtttatttgcttagcggttcggcaacggttacgaacgaagacggtgtgaatttgaacggtagttacgcgttttcggcgcaaatatatccgcaatcgcttgcgcaaggaagcgagtttgttttgtcagccgtgtacgcaaacaattatcagattcggtttgcgttaagaggcgtggatgaaagccattatctcattttctccgactacaaagacagatccaacttcctcaattacaaagagcacatttcttctactttgtacgacaaagaaaaaggaataacattgggagtaatcgtagtcgacggcagtatggtaatgaccgtcggcggcaaagtcgtttacagaagaacgcttgaagggctttcttacacggaaatgttcttaagcacctacgagtgcagcgtacaaatgaaaaatttgcaaatcgtatccgacgaagcgcaagcggaaagtatgtaccaagacgcacttgtaggttatcaggatgaattgacgggcatttccattataaatacttctcaaaacttgaataattttgttcaaaacgacgacggaagcctgtatgtcgaaggcaaaaattcaagtcaaagggtaatgggtgcgctttatcaaaacggagtacccgtcggcggctatgaatatgccgtttcgggacacttgaaaattaccgatacaaaaacttcgggtgctgcggcaagtaaagtcgaactgcaaattgccaaagataccaaaaactttgtaaaatttcacctgttccgttatcctaccaacaatagtttttacgcttatcccactgtaaacggaaaggatttgtctcaagttgcttgcgagaaaaacactatgccaagcggcactgagtatgaagtcgattatatattcgtttatagcggacgagatataaaggtctatcttaaagacggaacttatttgcccgagtacaaactcgagtatactttggatgcaagttggggttatacaatgttcgtaattgcgatgaggcagtattgcaacgtgactttcagtaatttcaaaacctactacggcgacgatttcgacgcacttgtaaattcgcttgaaacaaacaacgcaaacgttgagttctcggctgaaaaagacacgtttacagacaacggttgcttcattagcggcaattcgggtacttattacaaaactgaaagcgcatataacaaagcgtttgcattttgtgacggcaaggctgtaagcggcgaatattggcttgtttcgggccagatgcaattcggggaatacaaggcgtggacgcaaggcgaactgagcgcatacgtagacgaaacgcacgcggtcaggtacgtgttcgagtacacgggttcggcttatcaggtctttcacgaaattaaaaacggaaccgataattggacggggtatacgttgattgtaagaccgcaagttaaaaatgccgcaacgatgaattttacgcttgtaaattacggaggtaaaacttcgctgcttatagacggttatgtttatcatacagtcgagtcaggttttctgaaaaatgcgacggcaaccgtcggaggtaaaggcggtactttaattttgaagaacgtcgaagcaaacgcaaataatcaggacgtggaaaattttgtagcaggcatggaagattatacttacgtttcgccttacgaaacgagaataaacgaacttgcaaaccaatatcaatcggccgaaaagggcggagttcttttaatgggttcgagtaccatggattattggaaaacttggcaaacggacattggcggcaggctcggctataacgtcggcatcggcggaactatcgtggaagattggctttacgcttatgacaaacttgtaaaaccatttgaaccttctgtaattttggtgtttttaggcggcaacaatatcaacgatatgggacatacgggcgaatatgccgcaagtttaatggcgaatttgttaaacaaaatgcacaccgatttccccgaagccgaaattcattatatttattctatggctacgcctaacttctataaaggcggcaaattcaactatgaatatggtcgctttatagaagaaatgaagcaacttgtcgcaaaaaccgattggcttaacggaatagacacctttaattatttcacgcaagacggcgaagtgaagaaagaccttttcagaagcgacggaatacatttaaacgaagacggttacaaggtgtttgccgaaataataaacaacgcagttttcaataaacaaagcgaaaattaaaaagagcatataaaaatcgacggtgaaaacgttccgtcgccgtacgataaagaaatcttcggtttgtacgaacgcgcgcaagacaaaatttccgacgaggcgtttgaaaagatgagcggactgaaaatccccgcgctcccgccaaaaaagccgataacgtttgaaagccgatttaccgaccttaactgcacgtttatgggggaaatcctgtttaatgccattctgtccgtagcaaaaaaggatatgaaaaaagcgaaaaaacttcccgaaagcgtggaacgcgacaataaaataaaaggcgcgatgtttttgaaacggatcttagaaagcaattcggtcatcacaatgtccatgtcggcaggaatgagctttccgtaaaattttgcgacgggactcgtaaacctgtctataacgatacgtttgttgcgccgctcggacacgattacgaggaaacggaagttgcgaattatgttttaaataacatcgagaacggcgacaattcgaaatccatagacatttctttattgacggagtggcttaaaggtcgaagccacgtgtagctatttcgtatgtgatagccactaaaagaacgcttgtttatgacaggcgttcttttttttgtacttactttcataagcaggatttgaaccttaagaaggcgcgagggataagaaaacacatcgtgttttccccgagcgggcgagcggcggtgctcgccgcgaagccgacagcttttccgtcaggaaaaactgtatcctgcctaaggagccactaaaagagagtaccgaaaggtgctcttttttaatatattcttaagttagatttcgctttagtatatttagttaaagatatttctcaatcatctgatattcttaaaaaataaagcgcttccctcatcgtaaactgtgtttctttaatatttgccgtttttcatgcgtccgatttgtgtttttgtgcgtaattattagtactttttatctgcagtcagacagtttgaaacggcgtttcaataatgcaaaacgacgtaaaacttatcgtagaacacagtaaaaaattatgcatattgacaaacacgatgttgcggtgtataataaaacaaaagacagttttcggtctttaacagttaatattgaatatatacacggaagaaacaaacgtttgcgtaaaattaaatttataggccaaaacgctgttatttgcttataaaagagaagagtaattcattcaacagaaaaatgcggcaaggataatttcggtatttaaaaaggagaatgtacgcatgtcgaaggttaaggtattggcgttaacggcaatttcggttttgattcttttgtcgtcggcgttggctttgatgacggttatgcctgcaaacgcagaggaaactacgggtatagccgtaaacgaaacaaatttccccgacgaggaatttcgtagctatgtggcgagatactgcgacgacgacggcaacggatttttgtccgacgacgaaatttcaagacaaaagtccatgtatttgtcgggggcactggatgcaaatgtatatgaccttacgggtatagaacatttcactgctttgaaaattttggacgtttccgacaatcacctgacttcgctagacctgtctaaaaacactcagctggaaattctgaactgcagtagcaacaatctgacaacgttggatttgtcttcgaataccaatctccgcggcttaaattgtagttcgtgtgggctgacttcgttaaaagtctccgataatgccgcccttatatcgttaaaggcaagcgataattatctgacatcgatagagctgcccgtaaataactttcttcaaactttgtatataaattggaaccgacttaattccttagatttatctgacaatacggctcttatatatttatccgtcaacaacaacaatttgactgaacttaatataagcggcaatacgtcgctggaaaaattatatgtcaacaacaatagtttgaattcgcttgatttatcagacaatacttcgcttgaagttttggaatgcgctctcaatgatttgacggcgcttgacgtgtcgtctaattccttattgtcttcgcttaattgctcaaacaacgatttgacgacgctcgatatttcaaataacactgcgctcgattctttgaattgcagttacaatgacataacgtcgcttgacgtaaaaaacaacgcctcgctaaagtccttgaattgcagttacaacgatataaatgcgcttgatgtaaaaaacaacattgcgcttgagtctttgaattgtagttataatcatttaactacgattgacgtaaaaagcaacgccgcgctttcatcgttaattattgccgacaacaggctgacggagattgacgtaaaaaataacgccgcgcttgaaaccttaaatgtcagaaacaacttacttacttcgcttgacgtcagcgcaaacgttttacttgcggtgctgaattgcagcgacaataattatataaccatgctggacgtttcaaaaaatgtcgcgcttaatgaattatccgcaaaaaacaacaaattaacggcgcttgacatatcaaaaaatactttacttaaaagtttatatgcgggaaacaatgaactgtcagagtttgacgtgtcttttaataccgcacttgaatatttatacatagagaataacgacgcggcgacgcttgacgtatctaaaaatactttacttaaaagtttaaatgtggaaaacaataaattggcgacgctcgacctgtcgtgcaataaacagctttattatttgaattgcatcggcaataacctgacttcgctcgatttgtcggctaataccgcgcttgaatatttttatgcggaaaacaatgcattggcttgtcttgacttatccgcaaatacaaagattaaaatgctgtcttataacaatcaggataagagggtggaagtcgtatccccgagaaagggttttaagtttgatgtttcgacgattgtggacgatatgggtaaagtaagcaacttgtctgcggagggcggcgagttgggttcggacggaaaaacggtcacggtgtacaacgattttgccgtcgtaagctattcttatgaaatcggtcacggcaccgatttaatggaagttaatatcaaattgtgcaaagaaaaatccgtcagcctcgatgaaataaactttcccgacgagcagttccgtaattatctttccgaggaattcgacgtcaacggcgacggtattttgtccgcagacgaaatttttgtaatcactgaaataaacgtgaacggaaaaggtataagtacacttaaaggcatagaaaattttacacggcttgaaagtttatatgccgcttcgaacaatttaactaaggttgatttgacgcgaaataccgcgcttaagactttaaatctttcaaaaaattcattgacggaaatcaacctgacgggaaatcttgcgcttgagtatcttaatctttcctttaacgaattaactccgtttgatttgacgcaaaatacggcgcttaagaccttaaatctttcaaacaatttattgacgtcgtttgaattatctaaaagcgttgcgcttgaatatcttaatttttcctttaatgacttgattgtaattgacctgacgcataataccgcgcttcagtatttagacctttcaaataattcgctgatttcagtcgacgtatctgaaaacgtcgctcttgagtttcttaatctttcttccaatgatttaactaaggttgatttgacgcgaaataccgcgcttaagactttaaatctttcaaaaaattcattgactgaaattgacgtgtccgaaaacgttgcgcttacgagtcttaatctttccggcaataatttgactaatgtcgatttgacgcgcaatacggcactcatatctttatatattcacgacaactctttgatatcgcttgacctttcgaacaatatcgaactgatttatttggactgctcgaaacagtcaaggtcattggcggttgaagaaaaagaaggcgagtgtgtatttgactttttggcgtttgttttggatttagacaaagtaagcgacgtggcagtgaacggcggcagtctggaaacgaacggtaaaatttatattgacgacttatttgctaccgtaacttacaattactctacggggaataagacgaaaactatgcccgtcaagctgtatctggatcgcgcgtttcttctaaaggtcgaaaacggttttatcgacggggaaaaggaaacaaccgtttacattccggctaataacttcgtggtcgttgtggcaaaaagcgcgccttcaggtgaagtgtttaaaggctggagtttggacggcggcagaactataatcgaccataacaagagattggaattccgcatggacaaaaacatgactctgaccgccgtgtatgcagacgattcgatcggcaaattaccggatgacgaaaacaaccccgtaaatcccaaaccgacaggtctttccaacgacacaatagcgttaataatcgtagcctgcgttatcgttgcgtttattgtttccgtcgtgatatacgcacatcatgtaaggaaaaggcggtaaaaagcgtttttgccgtaagctgtttttaatgttttatcgggtatttgattttttattcggtccggcatggcgagaagcgcttatgtattaaaaacgaattcggaaaaaatagaacggtaacagaggattaaaggctttttcaaaaaaacacgaatttaagaatatcgccttgcttgccgccgcttttgtggaggaggcatacgtgcgtgcttatgcggagataaaactaaaagcggaagatacttatcgatgggcataagcgcttgtctgcgccatgatttttatggatattttccgttttttacatgcgctaaaccgcaaaaacatttgcctgcgtaagccaaaaaacgtaaatttatgtttagacgtaagttaaaaattcgggtgtcgtatgttgtgtccgcgatgtagcagattgctgacgctttagttctttgccgtacccattaaaaaagcgacggaagcaaaatacaagtcccgcgtttgcgacagcatggcataagaaactgttaagtaagcgttatgccgaacgacaagcattatcaaaagcgaaaacaacccgataaaagctaccactaaggtttggaaaactttacggattttttcgccgttgtcaacaattatttcggtttttaacgaaacaaatttcttgcttataaagtatcctgcaagcacagccgtagcggtgcggttaattacgtctatatctgattttgggtcgctttcgttaagaggaaaaatcatgcccgtcacaaggtggagaagctgtacggcaaaaaagaggataagacacaagtcgttcagacctgtttcgttttttatggatttaatcatttgtaatcctcgctatatatcgttttcaattttataatatgacgttataaaagtttaagttaaaccctgaagccgaaacattaaacgataaagcttgacacttaaataaacaattgttataatatataaaaatcaaataggacagttcgtgaccatcctgtcattaaacaaaactacggaaaaggatgggcgtattatgcgccttttttgtttgtttaagaaattcggttcgttacggactttgtctgagccaaggaaaagcttatgaaaaagaaattaatgaacgaattttacgaattcaaactgttgatgcgcagtgtgccttttgtcgtggtcgcgccctttgtactgtcggtattctgcatgaatctgcttgccaacaaaagcataactttacccgtagactggttggcgcttgactgcggaattatcgtgtcctggtttgcgtttctttgtatggatatcgtcacaaagcatttcggccccaaagccgcaacccaaatatcgctttttgccatagttttaaatctcatattctgtttgctgttttacgcaggaagccaaatacccggtatctggtcgcagtcttacgtcgaggggagtgaagacgttatcaacaccgcccttgacgccactattgcaggaacatggtatgtgcttgccggcagtacgcttgctttcgtcgcgtcagcggttatcaataattttgccaacttcggtataggtaaattatttaagtcgaatcccgacggagcgacggctttctttttaaggtcctacgtttcaaccgcaattggtcagtttgccgacaatatgatttttgcgcttaccgtaagtcatgtgtttttcggttggacgattctgcagtgcgttacctgttctcttaccggcatggtggcggaacttatttgcgaagcggcgttttcctatttcgggttttttacttgcaagaggtggaaaaaagataaagtgggcgaagagtatcttgcttacgttgaatcaaggagaaataacaatgaaagtattgctgacggggtcaagtaaaggtataggcagggcaattgcccaaaagtttcttgaatgcggtcactttgttacgggtatggacatttgcgaaagctcaatagaacacaagaactatacccacatacaatcagacgttttttcgtcggaattacccgatatcgaaggcacggaaatacttatcaacaacgcgggcgtgcaggattcgggcagggatatagacgttaatcttaaaggtaccatacgggtaacagaaaaatacgctttccaggataaaatcaaaagcgtgcttttcatagcgtccgccagtgctacaagcggttcggaatttccggaatatgccgcaagcaagggcggaatactttcctacatgaagaacgtcgcgttaagggttgcgcgttttaaagcgacttccaacagtctttcgccgggcggagtgcttactgccctcaacgacagggttgtttccgaccccgtgttgtggaagagaataatggaccagactcttttgcccaaatgggcaacgccgcaagaaatcgccgaatgggcttatttcgtcactgtcgtaaataaatccatgacagcgcaggatatcgttatcgacaacggtgaaatggcaaaggcggattttgtctggtaaagaattaatattttttatttgtttctattaaacggcggctgagtcccgccgtttttgattgttttgatatgcttttataagattatagtgaaaagacgaacaataaaattagtttgcgttcttctaaagcgtcggtagttctgtatttttcagcggatataatttttgatgaaagtaaacttttttagcgtaaaccgacggcgttcagctatcggtaaatttcgggtcgggatgtaaatcttaactgtatttatattttatttttgcgcataataaatgaatgacgggaggaactaatgaaaaaatcacctgtaattaccgcggcggtgctttcggcggaaggtgttgcggcggcgataatgattttttgcggaaagtatgcatttaacgaggattctttatattttgtacttacggcgtttcttgtcgtgccttacgtttccgcggcggcatcgttcgtcgcatttgtttataggtcgcggttttatgcggtcataccgtttttttctctcactttgtttgcatttttaccgctggcggttttttctgatttttactctgtgtattttctttccgcggtatcggggtgtgcaatcggcgcggcggcgggcagtatagtgcgcagactttttaaatgcggaaattctgcaagagatattaacgattgcaaaagacggaaagaaaaaagaaaagactttaatgaaagtccttcgacaagacacgaagaaagaaaatttacgggcgcctgataatttaccttttaccgctttacgtacactttaacattatgttataataatatggcaggcttttgagtgtaagacggtttttttcttaagacggatttttcctctaagactctaagcctatacagttttaatgtgtttaatatactgctgaacaaagcggacaaacggaggatttttttatgccagttgcaaaagtgacggaggatatttgcgcaatcggcgcaagcgaccgcgacggaaaaaagctttttgaaagactgtttcccattcccgaaggagtggcttacaattcgtatcttattttcgacgaaaaaacggctgtactcgacggtgcggctaaagaagtcgaagacgaatatttcgtcaatctcgagtcggcgcttaacggcaggacgcttgactacatagtacttaatcatctcgagcccgaccacggcgcggcaataggccgtcttataaaaacttatcccgaggctgcgcttgtgggtaacgctaagaccaagactatacttgagtcttacgtcggggcggagaaagtagaaaatatgattatcgtgggcgagggggaggaacttaagctgggcagacacagtcttaagtttatcatgacgcccatggttcattggcccgaatccatgatgtgctatgacgcaaccgacaaaattctgttttctcaggacgcattcggcgcattcggcgcggaagaagatattttcgacgacaaggacttcgacgaagagcgtttggaaaagatgagacgctattacgccaacatagtcggcaaatacggcgctcaggtttgtgcagtgcttaaaaaagcgtcggcgctggatataaaaacaatatgcccgattcacggacttgtgctgagaaaacacatcggcgaagtgttgcgcctttatacgctttggagcggttatcagcccgaagaaaaaggagtggtagtcgcttacgcttctatgtacgggcatacagcggcacttgcaaaagaggcttgcgaaaagcttaacgaaaagggcgtgaagacggtgcttttcgacgtgtcggaaacggatacttcttacttggtatcaaacgtgttcaggttcagcaacgtgcttgctttgtcggtgacgtacaatgcgaatatttatcccaaaatggaatatttccttaacgaccttaaagcgcttaacgtgcagaaccgcgccttttctttcgttgaaagcggaagctgggcaatttcttcgggaaaattgatgcgcgaaaaagcggagtcgcttaaaaactgcaggtttgtgggcgacattgtgacgcttaaagccgcctcttacgataaagccgcgttcaataagcttatcgaagatattgcagccgacgtaaaggcatagttttaaattttatttataaatcgactcgacgttttgttccggcgggaaatatagcaacaaaacagtattaatcaagcttaaacggataaaagaaacaaagggcgtaattttatgaaaattttgtttgtaagcaacagtttcggcgacgacgccggttggcagctttacgacgtactgtcaagcctgggcgaacccgattccgtagtgggcattttatttataggcggctgtccgctttcgctgcatgcggaaaatattaaaaacggcgccgcggcttacgaataccgcaagtttaacgcggacggctttactaaccgacccgaaactatggcagactacgccttcagggacgaggattgggacacggtaactcttcagcagtgcagcggtttaagcggcgtggcggaaagctataatgaagacatcgatatagttttgtccgccgtaaaaaagtattgcccccgttcgcgcgtttactggcacatgacctgggcttatgacgacgacagcactcatgcggagttttaccgttacgaccgctcgagaaaaaagatgtacgagtctattgtgggtgccgtaaaggaaaaaatattgccctcaaatcgtttcgacggaattattccttgcggaacggctattgaaaacgcgcgagaaaacggacttacgggactgacgcgcgacgggtttcatttgtccgaggggcttggaaggtatatagcctcgcttaccgttgcgcaggcattgacgggcaaggcggataaatgcagtttcgttccgccggctgatttgtcggtagaggcgcaaaaaggaattgccctgaagtgcgcaaaagccgcagtagtaaagccttttgaggtaaccgcgaatttataaacatttgtcggatagttacgaaaaaagcattgacaagtcactttatttgggctatactttaaacgtaacggagattggctccgtacttaaaaattcgatacttttcgctaccggtggataaagcggagtttaccgcagtggaacgaaaagtttgttttcagccgaccacctgggcaggaccgtttctcgcccgggtttttgtttgccactttgcttatataaagcgaggggctgaagacggttttttcggacttaattcgagaggtgaaaaagtcatgaagtacgaacaatggttgggatttaacggcggcgaatacgaaaatacgatagacgttgcggatttcataaggtgcaattacacaccttacgagggcgaagcggatttcctttgcggacccactaaacgcacgggtgcgcttatggaaaaggttaacgcgcttttaaaggcggaacgcgataagggcggcgtgctcgacgtggatacggagcgcgtttcttcgcttttgtcttatgcgcccggttacatagaccgcgacaacgaaataatagtgggactgcagacggacgcgcctcttaagcgcggcgtcaatcctttcggcgggataagaatggcgcgctcggcgtgccaggcttacggctataagctttcggataaaatagaggagcagttcaaatacaagaccacgcataacgacggggtgtttcacgtttacaccgacgaaatgcgtgccgcccgtcacgcgggaataatcacgggacttcccgacgcatacggcaggggcaggataataggagactaccgcagggttgcgctgtacggcacagacgcgcttattgcggcaaaaaaggcggacaaagcccgttacggcgctctcgacatgaccgaggacaatatccgcacgctggaggaactttataagcagataagttttctcgaggcgcttaaggaaatggcggcggcttacggcaaggatatttccaagcctgcttcaaacgccgaagaagccgtgcagtgggtttactttgcttaccttgccgctataaaagagcagaacggcgccgccatgagccttggaagagtaagcactttcctggatatttatatcgagcgcgacctgaaaaacggcttgattaccgaggaacgcgctcaggaaatcatggacgatttcgtcataaaactaaggctgggaagacagctccgtacccccgaatataacgaacttttcggcggcgaccccacctggaccaccgaaagcgtgggcggaatgtgctgtgacggcaggacgatggtcaccaaaaattcttaccgcgtgcttaatactctttacaatctcggttccgcgcccgaacccaatctgacgatactgtggtcggaaaatttgcccgcgtctttcaaaaagttctgcgccaagctttcggcggacaccgattccgtgcagtacgaaaacgacgacctcatgcgtccgatttacggcgacgattacggtatcgcgtgctgtgtttccgcgatgaaaataggcaaacagatgcagtttttcggcgcgcgttgcaaccttgccaaacttttgctgcttacgcttaacggcggccgcgacgaaaacagcggcgtgcagattgcgcccgagggcaaagttttcagcggtaaactcgattacgacgaggttatgtcgcaatttaaaaaatatcgcgcttggttgtgcaggctttacgtcaatactcttaacgtgatccattatatgcacgacaaatacgcctacgagaaaatccagatggcgcttcacgacacggaagtagagcgtttcatggcttgcggcgtggcgggcttaagcgtgattaccgattcgctttccgccataaagtacgcttcggtaactccgcgcacgggcgaaaacggtttgatagaaagcttcgatatacaaggcgatttccccaaatacggcaatgacgacgaccgcgctgaccaaatagccgtatccgtattgcgagacttttccgaagaacttaaaaagactccttcgtatcgcggcgcaaaacacactttgtccgtgcttaccattacttcaaacgtcgtttacggcaaaaagacgggcagtactcccgacggcagaataaaaggcgcgcctttcgcgcccggcgcaaaccccatgcacggcagggaacactgcggcgcgctcgcttcgctgaattctgtggctaaactgccttacgagtgctgcaaagacggcatctccaatactttttccattctgccttccgctttaggaaaagacgaaaaaacccgtacggaaaatctcgtccgtatgctggacggctatttcgcccagaacgcgcatcatctcaacgtaaacgtcatcgaccgcgaaaaactggttgcggcaatggaaaatcccgacctttatcccaatatcaccataagagtttcgggctatgcggttaatttccataagctgagccgcgcccagcagctggaagttttgcagcgcacctatcatgaaggactttaaggcgcgcatagattcgttttaccacggttcggccgtggacggggagggcttaagaagcgtcctgttcttttcgggatgcaatctgcgctgtccgttttgtcataaccccgaaacgctttacggcagcggcagggaaatatctctttcggaggcggtcaataccgtaaaacgctaccttccgttccttaaagggggcggcggcataacgctttcgggtggagaaccttttcttcaatcggagttttgcagtgcgttctcggacgaggttcacgcgctaggccttaccgtgattgccgaaacaaacggtttaaccgtagacgaggagcttataaaacgcttggacggagtaagactggatatcaagaaccagagcggcgagaccggcgaaactttgcttaaaaagtattcgccctttcttgacctttgccgcaacttaaaaaaggacgtgcttctcaccaacgtattaattccgaaagtaaacgacggcgaaaaatccgtatccgcgcttgccgcgcttaaaaacgcgtttccttttgcaaggggagcggagtttcttccgttcagaaaactgtgcgtaaaaaagtacgaggatttaggcaagattttcccctttaacgattttcccgaagccaccgcttccgactgtgccgccgctttaaaacttttcggctcattcgtaaatctgtgacttgtcgcgcttgacttttatcgtaaattatactaaaataacatagcgataaaagttaacgcttgcgccttgtgaatatgacgttattaattgcccttttgcaaagagtgacctcaggctttataagcgttataaattcattacgcaaaacggattggataataatttttatccgtaaaaagtcgattttgtcctcatagttaaacggatataacaagcccctcctaagggctagttcggggttcgattccctgtggggacgccaaaaagccacatttattgtggtttttttaatatttcacataagaagaagtcaaaaaattagatttacttttatcgcgtttatatctataaaaagtcaacgaggtttacgtatgacgacataagatattaacggtttactgcaatttgacggatgctttgacgattaatttgtatcgcctgcttttaatcgggagacagtaccaataaactttattacaataatttgcgtataaatatattgcgcataaagttataagctttgtgttaattacagtaattgcaagttgccattgtaataaaaacatgatataatataaacattccgataccatattcgtttttttagcggggatatgaatttgaagaaaagcaaaatttataaaatattgttgtcgacggttgtgttggccgtattatttgtatttacggcttgtggcagcgaagagcgattatctaatgaaacggaaaatcctgttgaaaaaaacgagagggaaagcttaagctatgctttatcggaggacggtacattttatatttgtgacggaataggcaccgtcacgggaacagatatcgaaatagccgattccgtagaaggtttgcccgtcaaagaaataggggaaaacgcattttcgggaaacaaaagccttaaaagagtacttgtgtccgaaaatgtggaaagaataggaaaaaacgcatttaagggttgttacgaattaattacggttatatttaaaaataaaatcggctggtcggtttgcaaaaacctgtcggacgaaaatgagaggagtattgacgttgcttattcatccgaaaatgcaaaaaatctcagcacaaattacatcgggtataattggaaacgcacgcctcataaaataaataaaatcgaagcggcgaatgccgattgcgaaattgacggaaacctcgagtactggcattgtgaaaaatgcggcaaaaactattccgataaatacgcggtaaacgaaataagcgaagaggatttcgtcatatccgccgccggacacgatatagaatatgtcgacttttcctatcctcaaaacgaatacgagggtaaaatctcatattatcactgcaaaaagtgcagcaaaaatttctctgataaaaacggagaaaaggaaataaccctggaagatttggctaaacccgttaaccacaatctgaaatatacggcagcatcgcctgcagactgcgaaagcgagggaaacacggagcattggtattgcgaaacgtgcggcaagtatttttcggacaaagacggaaacgtcgagattgcggagggcagcattacaaaacctgctctcgggcactccacaaaatactttgtgcctttttcggcaagctgtgtcaatagcggcagaatttcgtactggtactgcgaaagatgcggcaagtatttttcggacaaagacggaaacatcgagattgcggagggcagcattacaaaacctgctctcggacactccacacaatattatataggtaagaatgcaacctgtactgaaaacgggaaaagaaattactggtactgtgaaaggtgcggcaagtattttttggacagagaagggaaatacgaaacagatgaagacagccttataatatacgccgacgggcacaatctgaaatatacggcagcatcgcctgcaggctgcgaaagcgagggaaacacggagtattggtactgcgaaacgtgcggcaagtatttttcggatattttaggtgtaaacgaaatagaggaaaacagctgggtcacggaagccgccggccatactttcgataaggatacatggcactttgacgaaacccggcattggcatccttcgtcttgcaagcacaccgatttggtttccgataaggaacagcacgattttataggcggagtatgctccgtgtgcggattttccgaaaactcatcgagatttaaatacacaatcaacgcaaccggcactgcatatctggttacggggtacagcggcacaggcactaatgtcgtggtgcccgattatttcaaaggaaaacccgtcagaaacataaaccgtgacgtattcaagaatcataccgaaattcagcgtatcactataggtaaaaacgtgacatatataggtcagtacgcgttctatggctgtacggggcttaccgcgcttacaattcccgacggggtcaaaacaatctacgattacgctttttacggctgcgccgaaattaaagaactcaacctgggaagcggattagaagacataggaagtctggctttttataattgcgaaaagctggaaagagtaaacgtaggcgatttgactgcgtggtgcaaaatttatttctacgattacggggctacgccgcttagtaacggcggcgatttgtacataggaggacagctgcttaccaaagctatcatacccgcggacgtcgataccgtcaaaaaatatgctttttacaaaaacaagaatcttgaaagcgcagtcttgcacgacggagtgacaagtataggcgactttgctttcagcggttgctcgcggctgcaaaatgtaaccgtacccgacggtcttacctcaataggcgaccacgcttttgaaaactgctttattttgtccgaattcgattttccttcaaatcttaaatccataggaagcagcgcttttagtctgtgcagttctttacggaacgcggttataccctcgggtgtaacgtctataagctattgtgcgttcaacgaatgttattcactggaaaaagtcacgatagaaaacggagtcaaatacatcaacggctcggctttcaggaagtgttcgtttttgacaagcatagtgatacccgacagcgtgacggtgatagaggattatgctttttattactgcaccagactaaaaagcgttaaaatcagcgcaaacataagcgaactggggaaagaagttttttataataccatggcgtataaagacagcgctaaccgagtgggcgatgcgatttatatcgacgactgccttataagagtatcttattgtcaaggcgttttcattgtaagagagggcacaaaagccatcgcgggcgaagcgttttacgcgtgcacggggcttacgggcgttgtcattcctttaagcgtgcgcggcgtgggcgacgaggctttcgacgcttgcggtaaatttaccgacgtttattacgagggcggtctttccgagtggaagaacgtttatacgggatataacaactatgacctcaattacgccgatttttactggtattctcagtccaatccttatgtcagcggaaattattggcattacgaaaacggcgtgcccgtaaagtggtaaaagatatttttgcaatttgattttaaacttttattcggtaaggcttaacgccgttataaaaactgccgttatgtttattaaagttatcgttttttgcgggatttctttttttgcgtgccgtaaaaaattgcaatagcaggcggaaagtgttataattatttaaacgcttataaacacgttagggggtagaagaatgaaacttttgatagcaattatcagcaaggacgacaaggacgaagcggagcatcatctgactgcagaagggtttatgcttaccgaaatggggacgacgggcggattccttaagaaaaagaacgtcactcttttgataggcacttcggaagataaagtcgaaagagtaaaagaaatattaaaacatactgcaggtaaacgttcggtcaaaatgtattatcagtcaacggttccggtaaacaacgggcttgttccgcctgcggaaaacatgtccgtgcctctcgagtcggaaacgggcggatgcacgatattcgagctgaatgcggataaaatcacaaagtattgattgcaacattgcttttattgcaatctaatattgcattatcgataatttgattgtaaataagttgtttttttgtttatccgatgttaaaataacaacacaatacagttattttatttcggaggcattatgaaattaccgtttaacgtcgatttgaaagataaggtagtggcaattacgggcgggggcggagtgcttatgtccgctttcggagaagcgcttgtcgcatgcggtgcgaaagtcgcgctgctggacattaacggcgaggcggtggaaaaagttgcggcgtcgataggcgaaaacgcgttagccgtaaaaaccgattgccttgataaaaacgatattatccgtgcaaaggaaaaaataaacgcaaaatgggggaaggttaattttctcattaacggcgcgggcggaaacaatccgaaagccacctgcgacaatgaaacaatgactcccgaccttacgggcgtaaaggactttttcgcgcttgacgaaagcggtcttaagttcgtgttcgacctcaacattacttccgcatttctggtaactcaggtgtttgcggcggatatggtaaaaacgggcggcaacattatcaacgtttcgtccatgaacgctttccgtccgcttaccaaaattcctgcgtacagtgcggcaaaagcgggaatatccaactttactcagtggcttgcggtacatttcgcgccgtgcaacattcgttgcaacgccatagctcccggctttttcgtgaccaaccagaaccgcgcgctgttgttcaataaggacggctcgcccaccgcgagaacgggtaaaattcttgccgccactcccatgaagaaattcggtgaagtaagcgaccttataggcgcgcttttatggcttgcctccgacgaagcatccggtttcgttacgggcagcgtgattgccgtagacggaggatttgcggcttattcgggcgtgtaattctacgcgctttacttttgtatctttataaatcggtttaaccgaaacaaggagaatattgataatgacagcatacgaaactatttctcaggttaaaatcgtacccgtagtcaaaatagataacgcctcggatacgcaaaatcttctgggcgctcttgaccgcggcggaattcccgttgcggaaattactttccgtaccgcgtgtgcggccgaagccattgagtacgcgtctcataatttccccgaaatgattataggcgccggtaccgtgacgaatacggagcaggctgaaaaagcggtttacgccggcgcggaattcatcgtgggcccgggttggtcggatagcgttgcggaattctgcaaaagcgccaatatactttatcttcccggttgcgtgacccctaccgagataatgaaggctatggatatgggaataaacgtagtaaaatttttccccgcctcggtttacggcggccttaaggcgataaaagcgcttgccgcgccttttacgggcgtcaaattcgtgcctacgggcggagtaaacgcccttaaccttgccgaatatcttgcgtttgataaggttgtggcggtgggcggcagttggatggtggacggaaaacttgtcaaagagggcaggtttgacgaaatagagcgccttgcccgtgaggcaagaactattgccgattccgtacgttgatttattgtaatttgattattaatataagaaggattaagtccgggacttattcttaatatagcgatttgatatttataaaaaacgcatccatgaaatccgtttggacagggtgcgttttttttcgtgcgttaatttgttttaaggcgataaaatcataatcccgaaagtaatcggcgaatactaaaatatatttgatttattgcgactcattgggtgaatgaccgaaaaacagtttatagctgcggtaaaaagtagtgtaatcgtcaaaaccgctcatgacggcggctttggtggggcggactccgctttttatcagggaatgagcattaagcacttttttattgcgaacatactgcatgatacttattttcataactcttttaaacgagtgatacagtgtggatttggatacgtaaaggtcctgagccatctggtccaaggaagtaatggaagtcagattttcgcgaatgtattgcatgactttagtgttgaattcatccagataatggtaattttcgccgttatcgtttgagtcgattttacttatcagcaaaaggttttcgataagtatcgtctttatcagcaatgtaaattccgattcgtcaaatactttgttgtaatccaacaatttcaaaaagttttttgtgatgggagacgacccgcctatatggaagaactcgcctttggaaaatgctttgtcgattatattttgaggaataaaatccgaagtaacgttaaaaacgaaacggccgtaatgagtatgttccttgacctgaagatagtgatactttgtaggttttataagcaaaaggtcgtagggcataaggttgtacttatgattttcgattgtgtattctcccgttacctcggttataaaaagaatttcgtaatcgtcgtgaaaatgtctttgaaaatttttatttgtgcagtctgccgtataattatagccttcgcagaaaccgagtttttgattggcaacaacatggtttttatcgtaatcattgttctgcataatgaataactccataattttggtacaggtattatagcataatattgctaaaaatgcaatatattttgattttttttgatattgttataatttatttgttatgttatactctataagtaaagtaacagacactaacggagggatgcatgtatggagataggggctcaacttttttctttaagaaattttattaaaaacggaaaagacattgactccactttcggaaaaatcaaggatatgggttatacctgcgtacagttttccggcgcgactttcgagccgtttgaactgaaagatataatagataaatataatttaccggtttatcttactcatgtagacgcaaccaggatttccgaagataccgaaaacgtcattaaagaacataaaattataggctgtcagaacatagggcttggtgcaatgccccacgcatttccttttatgggcgacatagaagaagttgatgcatttatcaaaaaattctccgccgcggcccaaaagataaaggacgcaggattaaagtttttctatcataatcacgatttcgaattccgtaaactgaaaaacggacaaaccattttcgattatcttgtggaaaatgcgcctgattttaatttcactttggacacttattgggttcagcgcggcggcgtagctttgctcgagtacatagaaaaactttcgggaagaatcgaatgcgtgcatcttaaggatatgcagaccgttaaagagggcggacagaagttcgctcccgtaggtgaaggcgtcataaactggggcgcggtgttgcccgcatttattaaaagcggcaccaaatacgcgtttgtggaacaggacgacgcggtcgattatcccgacccgtttgctcaattgggtaaaagtgcagacaatcttaagaaaatggggtacattaaataatggctgttgttacattgtgtgcatttgcggatgaagcgtctaccgaatttgacggacagataaaggcgcttttacgcaacaatatctataatatagaactccgcggtctggacgggaaaaacatttccgctttaagcgaggaagaggctgaaatttatgccgaaaaacttgaaaaggcgggtataaaggtctggtcgctgggaagccctttgggaaaaataagtatcgattccccaagagaagaacatgaaaatcttttgagaaaattgcttaagcttgccgatattttcgggacaaagcgcataagaattttcagctatttcgtccatcgcgaagattatacaaaataccgcgacgaagtcattgaaagaatgcgcgctcttgtgaaaatcgctgacggttatatgctttgtcacgaaaacgagtccgaaattttcggagctaccgtaaaaaactgcgaggatatttacgataacgtagacgggctttacagcgttttcgattcctctaacttcattcagtgggacgaggacatcaaggaagcgtatgaaaaactgattaaaagggcttattacatacacgtaaaggattctcgttacgatacaaaacaaatcgtgcccgtaggttacggcgacggaatgtacgataaaattttatcgggactcgacaaagacaccacgcttacgctggaaccgcatctttttaaatttacgggctacagcgatattgacaaaaaagaacttaatgcgcttttttcttataaagacagtaacgaatcgttcgacgcggctgtaacggcgttgaaaacaatgcttaaaaattgcggatatatcgaaggagtaaacggaacatggacaaagtaagattcggggttgtaggtataggcaacatgggaagcagtcattgcaaatggctggacggaggcgaagtaaaaaacgctgttctcagcgcggcttgcgatataaatcccttaaaaatcgaaaacatcaaaaaacagcttaagcatcccgaagcggttaaattctattctgatgcggaaaccatgtttaaaagcggcgacgttgacgccgttatcattgccgtacctcattacgatcatccgcgcctttcgatagcggctctcgacgcggggcttaacgtcgtttgcgaaaagcctgcgggcgtttataccaaacaggtcaaggaaatgaacgagcgcgccgcaaaatcagacaagattttcgcgcttatgttcaatcagcgcaccaatccggtttttaagaagatgcgcgagatggttgcctcgggtgccgttggcaacgtaaagcgtacaaactggataatcaccaactggtatcgcagtcagtcctattacgacagcgggtcgtggcgcgcaacctgggcgggcgaaggcggcggcgtgcttttcaatcaggctccgcacaacatcgacctgtttcagtggattaccggtatgatgccctcgtcggtaaggtctttctgccatttcggcaaatggcacgacatagaggtcgaggacgacgttaccgcatatttcgagtatgaaaacggcgctacgggagttttcgtgaccactacggcggatacccccggcacaaatcgcttcgaaatcatgggcgacggcggaaagctggtgttcgacgacggaaagcttacatattacaagcttaaacaaaacgagcgcgaattcaacgcgacttataccggcggattcggagaacccaaacatgaaaccgaggttatcaaggtcgaggaagatccgcgtccgcaacacgtgcgcgtacttaacaacgttgcaaacgcaattctcgggctggagcctctttacatcgacggcaaggaaggcatcaggggagtggaacttgccgacgccatgctgttgtccacatggattgacaaaaaaatagatttccccatcgacgacgaattgtattataacgagcttagtaaaaggattgccacttccagacttaagactacggacgaaaaagtgctggacactgagggaacttacggcaacaaaaagtaattaaacttacagtttataaacgggaaaggtgacttgattatttattataatttatgaagacggataaggtataacaaaacccgcttataaattttaagtcagtaataatgaggagggaaatttgatgaagaaaattaaaattctgctttcatgtctgctttgtttggtgtttgtcgcagcaagcggtcttgtcggttgcaacggctacacatacaaaaaaacagaattgtcgcattacagttatgctgaaagcgaaagaacgggcgattacaatacaaagctgttctatcgcaacgattacgacgtgcctttgggcgaccctaccactatttatgtggacgaggggccttgggcggggaatttctattctaccgggacttacggcggcagctcttttgaaatttatcaaagcaccgattttataaactgggagcctgtgggaaaggggtttatgcctgatcaaaaccatttcggtcaaaaagacttctgggcgccccagcttctttacgataaagacgcgctgtggtcggattacaatatagaagcgaaagaaggcgaaagcggaaaaggattgtttttcctgttttacagtgcgcgcacaagcgatttcgaagagaaatactacaccgcaaactactatcccggcgtagccatatccaaaacgcccgaaggtccttataaggaatacgaaggcaccaacggcaacggttttgcgatgactgccgcagaccccgtgttcgaccttgaaaacatcaatcccgaaacgggcatcaacgttgacgaaaacgccgagcccggtcaggagctttataaagcgggacgttcgtttattgacgcctgcccttttatcgcgcctgacggaaccaaatatcttttcatggttcgcagccgtaaagtggataccgccaacgaggtgtggggcgtaaaaatgaaggattgggttactcccgattattccactgttaccagacttacttctttcggctacactactaccgaaaggaccgaggaatataattttgtcggttactccatgaagatagacgaaggtccgtacgtttattatcatgagggtaagtattaccttactttctccataggttccaccaaggataaactctatcccgtggctcaggcaattgctgacagcccgcttggaccctataccaaaatccagcccgaagacggcggtcttgtatgctctcccggtaccgattgggacatacactcttcaggtcaccactcgttctttgaagtgggcgacgaattgtggattgtttaccacagctatcccgtcctcggcatggacggcatcggcgaccgcgcgcagtgcttcgagcgcgtttatttcacgaccaacgataaaggtcagaccgtaatgcacgcaaacggccccacaaaggtaattcagccgcttcccgaagcagtttccggttataaaaacattgcgcctttggcggaagtaaaggcgaccaacatggtcaaagaaagcaacgtgtcttatcttaccgaccagcttatcgccatgcacaacgaaaccggtatcaacgacaacgttcccgagttcgaagcgaaaggaaatacggaaattactcttacattctccgactacgttacggcccgcgcaatcatgatttacaacagtcaggattatatgaagattttcaccgagatcgaccgcatcgaattttcttacagggatgaaaacggcaataccggtatggcttacatcgacgatctcgcattcaatctcgacgctaatctggttccgcttgattacctgttaagcgaagatgaaatggagtttatcgacgacagttattataccatgcgcgcaggcggtgcttcagttgccgaattcaacgaattaagcataaataaaattaaaataaaaatcaaaaaagcaaaaggtaaagacggattaaacatatccgacatcgttgtgcttggaaaaacggcataaggagggaagtcataaatgaaaaagaaaacttttttagttgttttacttacgttccttatatctttaagtattttcgcttgcggcaaggtttcgccccttggagaatataccgatttcaacggcgtaaatgaaaactatgtaatgtcgatagatgaaaatatgactattgacggcgtgctggacgaggacgtttgggcaaacagcaaaaacaaactttccgccgtcaacggcgacaagagcatggacgtttacgcttatctgggcgaaaacggcgtctattttgcttttgacgtaaaggacaattcgcttttctataatcccggacgtcagcagtccaggaattccggcgtggaaatttatcttaccacgctcgaccactttaaactcgagcaaggttgcgtcagcattcgtctcactcccaccggagaaggcaacgaagccgtagtaaattactatcgtcccaacggtttaggaacggagtggatggcttcgtcggctaaaagcaaatacatcggagcggcgtcggttgacggtaccgtgaattccgaatcgcgcgattcaatcggatatacggcggaaatgggcgtttcctgggaacttctcggagtagaaaaggctgacgtcgttcagtacacggcttcgttcattcagaccagaaattacgacggtttccgcgacgccaatactttcttgcccgacacttctcacgtgggcgtaggtagctggaaagccgttaccaacgacggttacgttgaaaacaaatacgattatctggatgctacttccgctgttcccgatgagtttatgtctattgacggcgtacttgacgaagaagagtggacggaagctatcaccgagaaaaaaggtaaagtttatactcataaaagtacgggtataactatgtccatatatacgttgatgacggatctcggcgtatatatcggtctggacagcaacgataacgacgtgtattttagcagcgacagagcgattaaatacaatacgggcgtagaattgcttatcgcgggaaacggaacgactgtgttcaaaaatgaaaacatcgttcaaatccgttataacgtcggtggtcccggcgaaaggtataggggagactccgcgaaactgtatccttatacctcggaatatttcccggcgcgtatggccggcagcgttaaaaacggggttatgaacagctccgataccgacggctggcagggcgaaatttttataccgtggtcttctttaggcgtgaccaacgacaacggaaaaagccagattgctattttccccagtatttatcactgtgaaagcgctacggcggtaagcgatcccgaatggaaatatcttgcaatagccggcagcgacgtttactctaacggttcgtctaaaatcaatcctcaggaatctttcttccgttttcttaaggataagggttatgtgcccaacggaatcaaaatacccgctcagtctttaagtaaaaacaaccttgattcgacgggaaattattatgaattaacagttaaaccggattcttacgacgctatcgtcgtgagcgggtttactaccgataaagaagaaatactcggcgcaacgttcgacttcggtgaagcggaaagtctttccgtcaccgacaattcggacggaacttatactataaaaattcccaaagaagacatttcttattttgaaaccgaacgttttgcgcaagtaagtgcggacggaatgacttcgcaatttacaataagctatgacggcaatttcgctctggacggaattcttgacgataacgtttacagcggaaaaaatcacgccgttttcgaacaacagtttaacggcgtaagcgtgacttcggatttcgttttcgcgttggacgaaaaagcaatgtatgtcggcataaaagttgtcgattccaaagtcaacacttccgtggcgtggggttccggcgtagaaatttacttcaatttcggcgaaacgctttcctctgcaaatacttatcaattgcgtttttacgctgacggaacatcgaggttctataattatgccgacagcgtggtaggttcggatgacttttcctgggttgataactcttccaaagtttccgttatctatttggtgggcaacatcgtgtctgacggatatgttttggaggcaaaaataccttggtcgttatttaatcttaccgccgctcccgaaaactgcggaatagcctctcttaccaagtttgcctacaacgatagcggcaatatgacggtcagatatgattctctcgacatcggcaacatcggctcaagaaatatagacaattatcttaattggaacgaagacggttttgctcccgaaaacatttatgccggagacgtcgttttcgtaaaggatatcaatgttaccgacggcaattataccgacgagtttatcttgtcttatctgcccggcggcgctctggtcgctaccggtgtggatttcggagattatagcgataaagtttccgaaaagggcaacggtaaatactctgtcagtattcctaaagccgaggtggaagaaatcgatgaccaattaagtatcggcataacgtccggcaatgcttccggccagcttactgtttattatatcgacgccaacgccgaagcctttgacgatactaaaatattgtcttatatcaacttcgacaacggtttggattctttggtaggctataatgcgtctatgcgccgcggcgaagcggaatttaactccaaagaaaactcttattataccgacaaatattatactctcgatatgagaaaccgtgcgcttatgcttaacgacgcaagcgtgggaataagcagtttcagcgtaacgatgcttataaacggcgacgatattttacataacgcttatactgccggcaacggttattcattgattttgttcggtacgggttcggttgacggtacggaaggcttctccataagaatcagatacgataccaccggaaacaagtcgaatgcgttccagattaaaatattggataattccaacggcgacggaacggatgccgtcatcactgcgcttaagaacgattggcagaggtgggtatttacgtttgaccgtaccgttgacgataagattaccgtgcgcgtttatatcgacggcgagcttttagtcacacgtacggtgaatattgcgcccggaacgtcgcttgacggcgcgtctaatgcggtgttcggcattggcgctcccggcgtggacgacggtaaaaacgacggatccagttacctcagcaacagaataggcatcgacgactttatgttgtacgacgacgtaatgacgcaaaacgacatttacaatatgttccagtatgtcaaggcgactaatgtgtctaacgctttcaaaatggacgacatcaagtttgacttttccgaagtcgattccgacggttacagcacccagttccttgtaaacgcttatcctgaagacggctctgtagtgcgtcttgacgacacgcaggttacgttcggcgaggagatagcggagtttatcacttatgtggaatcgggagatgaaagttatttcctgttcaaagtcggaagcaatcagctttccttgttcaaaaacggcattacttcaacttatacttacaacggcataaccaaaaaggttaacattacttatgtagcgctcgataggatctatgtcgacaaagactcttttgatttctggaagagcgataaaacggacgacagctatgtgtttaccataggcgtttatgcggattcgacgcttgttactcccgttaaggaaaacattgaattcagcgattggggagactatgttgtcaataacggcgacggaacttacacgtttaccgttcccgcctcggttttcgaagcgcttgacgcaaacaaagtgattaccgtttcctgcaatgatgcggaaacagctcagttgacggtaatcagaaatactttgtccgacgatcagttagacggaatttattcggcgctggaagcgtattatgattttgacggtaatttaaccgattacgtaggcggacacgttaccggccccgtacgcggcgacgcggcgtattatgcagacaagaccgacagttacgtaggcgataaggcgcttagcattaacaccaaaaacaacaccgtcggtattgaaaatcttttgttgggcaccgatagctttactctttcgttggatgtcaaacttgaggctgcttctttcgaaggaagcaacgcgtcttacgagatagtaacttctaccaagaacaacgacaccgatccttgcacgttccagctttctgcgcacggaattcaaaacaagctgcgcatacagctgggcagaaacgatcagggcttctattttgacggttccgccggcaaacttaagattgatcagtggcagcgttataccatagttgttacgcgcaacgtggcatccgatcccgatcgcgtaatcaacaacgataagtacgacgctcagggcaatcccgtaagctcgtcttctcctgcggctccgtatcacactcccgaaaagattaccatagacctttatcttgacggcgaatacgtcggtactaacgaattgtggtttaccgagggtcagtctttgggtaccggtattgtttatctcggcggtaatcttgcctgggatagcaagagcgcgacggtggataacttcgtgttcgttcgcaaggctcttacggcggaagaagttgcgggtcttagtgactactgtggcgatattgtgtctaaatacggctggacgaccggcaatacggtaatctcctttgcggacgtggtcagcggacagacttacgaaacggctctcgatatttccaaactccatgccgacgccgtaattactggcgccgagttcagcggcgttcccgcgggtgcaagcgtcaatgaaaacgacggggtttatactctcagtattccttacgcaaatctttccgatttcgaaggcggcgttaccataaacgttacgataaacggaatcaccaagcagcttaccgttacttatgtaccgcttgaaaagatttacgttgacaatagtgaaatagagttaataaaatcggataagcaagacggcgcttatacgttcagtgtcggcgtgtttgctgacag

SEQ ID NO: 3378 - DNA, 8650 bp, Unknown
  16S sequences of unknown bacteria
gaggtgggggaaaccttaatgtgttcggaaaaaagccgcaaggccgactgctccgaaatgtcggtgtcgaatcggttcaaaaaggcctcgagagagttaagtcgggagggattttgctccttaaaaaatttgttgagagcgccggattttgccccgccgaggcgatagcttttacaaaggctttcaaaggcagaatactcgcaatcgataattttttcgcggctttcggagttgagcggggttatgccgaaggtgttttctatttgcaaaaccgggggagagggaaatccgtcggtaccggaaacatatgaaatgaaaagtctttccgacggggcacaggcggcggtgtaaaacaaaaaaccttcctcgcaaagcccctttgccgaacggtcggccaccggcagctttgcctttaaaagctttgctctgtcaaggtcgctcaaaagcccgcccgaggacgaaagaccggggaaaacgccgtcgtttgcaccgagaataaagaccgctctcggcgccgagggacgcattcttgccgccgaacccacacctacctgatccatgccttttggggcgcttcccatgtcgagcagggacagaagatttgaaaaaagagaataaaagctcttaacatcggcgggattttggccgcaaagcagggcaatcctgtcaagagccgaaacaaaagcgtcccacgaacgttcgttaagatcggcggtttcggcgtcgccgtcaagccgaaagctctccgacagcttttgaagccgctttgccgtgtttccgttttcgaaaaatccgaaaagggcggcgcagcaatccttaaaagatgccgctttcgaaagctcgctctcgagctttaaaaacggctccacggcgcgctttcgaaggtcgtttaggtgccgaagtgtctgtttgtccgagtcggtaaagtcctgctccatacctctcggatttttgaaaaaggggcttttccaatcccttctttcgattttccacaaaaagcaatagtcctcaagctcgaagatttcttcgtcgcaaaggggtcctatgccgcatttgagacaggacagtattttttcggtggaataccccgtcaagaccacctcaagagccgactttgccgacagcatgagcggaagccccgaaaccggacggcgggcgtcgagaaaaaagggaattccgtggcgggaaaagaccgtttcgattgccgatgaatactcgtcggcgtttttggctataacagaaatttctcggtatctgaagccttcgttcctcacaaggcgggaaatttccgacgcggcgaaatccacctcgtcgtatttgcggtcggccgagtaaaccgttatacagccgttgttttcgggaatttcgccctcttctcccgcaaaaaccacgctttccatggccttcaaaacagggctgtgacggcggttttgcgacaggatttcgggctgctcatacgcaacgttttgctcctcgcacattttcataagctgtcttgcggtttttctgaccgaaaagaaaatgtcggggtcacgaagacccggacggtcgcagggcagggtgatgtaaaccctgtcggccgatatgataattctttttataaggttgagctgctgctcggtaaagcccttgaatgcgtcgataaaaacggtctttttgcggaaaaaatccttaccgtcaagaagggtgcaggctctcgatatgttgtccagcgggtcggaaaagtttttgtttataagcgcgtcatagccctcatacaaaagggcgatttccgacagcctttttttcagcgaaccgtcggtgatgaccgccgagacggttttcaaaagctcgggggagaccgagcagtttttaaattccttgacggtggaaaccatgctcttgataaaatcggggtgtttcatgatttttttgtatacggtaagcttgtcggacagctgttctgccgccgccgacatgaaaatcatgcgtccagcgtcgtctatgctttcggtgcacacgccgccgtaggttttgaaaacaatgtcgcacagtcttgaaaaggagagtacctcaaagctctcgcttttccccttaaattccgccgccgcgcgctcggtttcaaaggaaaattgctcggggacaatgagaatctgaccgcccgagtcctttccggtttgttctataagctctcttatgcggcggctttttccgaaaccggcgcgtccgagtataagtttaagcataaaaacctccttttgccgaagggttttccgaccttgccttcgacatttcgggtaagcatatgttgcttgcggcgaaaatcccgcctttttggttattttatcataaaaccgccgtgatttcaacaaaaccgtcggaatgtcttgacttgcgggcagccgcataatataatgtgcataaggggaagtgtccctttgaaaaaattataacaaaagcaatgtaccaaaaggaggatatagctgttatgataaacggatttgaaaaaaccggacatttgagccagcttttttcggtggaggaaatgcgtctttgcggaggtaagggcgacggaatgagaattcttcaaatgaaaaacggaaagggtcttatggcgacctttgtgcccgaccgctgtctcgatctttacagactcgaatataagggaataaatctcggatttttctcgcctgcgggttatgtcgctcccgcatactataataaggacgaattcctgcgttccttcacggcgggatttttcaccacctgcggccttgacaatgccggcgccccgagcgtcgacaacggcgaggagtgtgtaatgcacggaagaatcggaaacgtcccctgcgagcagctttgctataacgccgattattcgggagatcatccggtcatgaccgcctcgggagatgtgagagaaggggctgtttttgccgaaaaaatgtctcttcacagagaaataaaaatggagaataataccatatacattaccgatacggtgaccaacgaaagcggtctcacccagccttccatgcagctttatcatatgaacatggggtacccgctgcttgacgaaggggtcgagcttctcatccccgccaaaaacacccttccgagagacaagcgcgccgccgagggaatcgacgagtgggattatttccccgcccccacacccggctttgacgagcagtgttattatcaccgtctcggcgttaaggacgggaaaaccgccgtggcgatctacaacaagggactgggagtcggcgtcaagataagcttcaatgccgatacgctcaaccatttcacccagtggaaaatgcccggaacaagagattatgttctcggtctcgagccggcaaactgccgagtcgagggccgcgacaacatgagaaagatcggtcgtcttaaggagcttgctccctttgaatcggtcacattccgccttgcaatcgacattatagacggtgacgagcaggccgaggccgtgagacaggaaatatatgctttaaaacaggccgactgatggtctttttggatagaaaagacttgacataacacctgttttatagtaaaataacatagaacatttgtcatgtattttctattatgttcttttggagggaatttttaatgaaactgaaaaaatccatttcggttttggttgcggctgccatgcttttgacggtcgtttcgctgtccttcagcgccttcgcggattccgcggcgtcgcagcaggtggcggacgtcatcgaagggctgcccgaggattatatgatccccgtgagcgatcaaaacgccgttcttgacgccatgaacgcctatgaggctctttcggccgaagataaggcgcaggtttcaaattatgataagcttgagaaggatattgcctccctttcgagccttgccgatgtttggctcgtttacaacggcaacggcggcaccgccgagtcgggagacgcttcggttgcctttaaggcgggcggccgtgaggctgtcgtcggcaacaatatcttctcttcgggctataacttccttaattggtccaccgacctttcgggcggtctgaatttcgaggaaggtaagtccttcgacaccgtcgacctcatttgcgatatgctcgcaagagacgagtcggttgccgagcacagctataagtactactattatgtatacacaaataccgaggatcttaaggccgaccttgccgaggccgatcccgccgatccctacggtaccaacgccggcgcaagagccgtcagccgcgatgaaaacggaaatcccgtgaaggcatggcagatcaatttctatgccgtttgggacaatgccgacaagacggctttcaccaacacctattcttccaactatcccgacggtgtggccgaaaattcggttaaatattccaccgtttacgagggctacaacggatataccatcgaaaacccctttgaagaggtcggtattcccgaggagcacaaattctatgtattcagcggatggcttaacgaaagcggcgagcttcttcccgcaggcgagcagtataccgatgacgccgagggcgttgtgggcggttcttccttcctcgcagcatggaaagaggaaacccgtttcaacgttacctatgagcttaactatcccgccgattcgggattgacttcttcaaacttctccgaggttgcaaccgacgagaattacaagactctcacctgggcaaaggttgccgcaaagggttatgcaaagcccgataactataagcttgtcggctggaataccgctgccgacggaagcggcgaaacctatgccgtcaacaagaaaatcggcgagctgagcggcgacatcaccctctacggtgtgtgggctcaggccatgaaattctcctacaattccaactatcccggcaccatggagcagaaggaatcgatcaaaacctgggatgcacagaccacccagaagatcgactccatcgattcccttgtgggctttgaggttcccgtgggatatgagttctccggtaaatggaacaccaaggccgacggctcgggcgattcctacgatgccggaagcagcataaccgtcaccgaaaatctcaccctgtttgcccagtggacaaagcttgccgaaaccgttgtgacctataattccaacgacaaggcggccaaggactccacccgtatcgtatacggcgacgcatccaagggtattaagacaaacaccatttccctcacaaccgacgactttgcaaacattgccggattcctttcctggaataccgctgccgacggttcgggaacttcctatgcggccggcgccgagtttaccgtgaccggaagcataactctctatgctcagtgggaaactactgttcataacatggaattcatgcttcttgagctgcccgaaaaggcacaggtgacttccgacagcaccgaccaaatccgcaaggcaagaaacacctatgacgccctttcggccgatcagcaggccatggttcgcagctataagcgcctgaccgacgccgagtcctattcgactccttacgacgtttggatcatttatgacggaaacggcggtacccagactaccgacggaagcaagagaaagattgtttccgaccgttatcagctcagcgatacctttgtttcctcccaaaacatatttgcaaatatcaacagcaagaccggaatgtccttccccttcgttgagtggggaacctccatttcgggcggctttaccttcggcgagaaggcaaacgtcagcgtaagcaccgtcctcggacagtttgttgacgatcccacctcctctgcccgcagcgacttcttcggttatgtctatgcctccgatgaggacagaaagcttgacgaaaacgaagccatgatcgcaggtgccgagaacaccggaagcagatccctttacaagaatgctgccggacgcggtattaaggtttggcagattaagctgttcgccatttggaacaacatcgaggaaagatatgtcaccaacatctaccacgccaacttccccgatgccggaaagagccttgagcctgccgatgttacccaagaggtaaccgtcagctacagcgccttcaccattgacaatccctttgatgaagccgaggattacggccttatattcgaccattggagcaccgagcccgatgacagcggcgacgagtttagcgaaggcgaggagtataccgacgccgtcgacggcgttaccgaggctgtcgagttctatgccatttgggaggaagaggaagtcgagtacacaatcacctatgactccaacgacgagtacggcgacttctttgagcggactgtttccggtcccggatatgctcccattgaggatgaggttatcggttgccccatcgaattctccaacgaaggatacctctatggctggaacaccgaccccaacggcagaggaacctcctatgacgagggcgatataatccttgttaccgaggacatcacgctctatgccgtgtgggacggagatgtggataccggcgaaaagaccgccgtggcaggagctattgtgattgccgccgcatcggcagcgctgcttgttgttttcagaaaaaagaaataataagagctgaataaaaataaatgcccgtcatgagaaatggcgggcattttcatcttaaatgacacctgcggactcagggtgtcattttttgtattttctgttataaaaaaagctgccgcaatttttacggcagcttaataaactgtttttaaaagcaatttaaatcacaatatattcaatattattcggtcaaacggtcgagcacgcttttgtaaagccccgacgggtccttaaggaaattttccttaacaatgtcggcctgcattccgtcggccacaaggaatttcaccgtcataagctcaaggttgccgtccttgatgattattgcgacctcatagcccttgtcggttttggaaacgttgatttcgttttccttaagagctcttgcctttgcaagcaaagcggtggcctgcttgaccgccctttctctcaccgaaaagggaagggaggtttccagcatttcggcatactctctgcccttgacggtcagagaatagcttttttctccgtctccgccgcttgcgatgacggcgtcggtcttgacaagctcggaaagagcctgggacagattccaatagcttgcgagagcatcggtctgaatggcttcgtcaataaggcttctggaaaggggagcgccgacggttttaagcagataacagacgagtatcttaatgtcgtcaatgtcgcgcagcccgcccacttcaacgccatagtcaaatcccgttgtgtggcggcgctggggaacgtcctctaccactcttgccgaaaccttgtcaagctcgccggcaccgaccgttatgataaggtcgccggggcgggcgattttacgcagaaactccaccatgtcgtcaaaatcaggcatataatatgagccgtcgatttttgccgcaagatcgcgggatgtgatgttggtggtgttcttttctctggcggcgtagatgtcggccaaaacaagaatatcggggcgggaaagctgagtcacaaagtcgtcgaaaaaggcggcggttcgggtgaaggtgtggggctgaaaggcgcatattatgcgttcatagcccatgctttgagccatgtcgaaaagcaccttgagctccccgggatggtgagcatagtcgtcatacaccatggctcccgaatactgccctttaaattcaaatctgcgtgcaactccgccgtaggaggaaagaccgcgttctatcgaatcggggtcgagcccgattgaaagggcggccgccgccgcgccgagagcatttaaaatattgtgtctgccgggtacgagcaggcggatatgagcctgtttttcgcctttgcagcagagatcgaattcacctattccgtggttgaattttattttttgagccgtcacatcggcgtcggagtcgatgccgaaggttataattatgcggtcaatgccgcttatcgtttccatggtgtttttgtcatcggcgtttgcaaccacaatgcctctgtcggcaggagtcttgagggcaaatttcctgaaagaatgtttgacatcgtcaaggtctttgaaaaagtcgatgtggtcgcattccacgttcatgatgacggcaaccgtggggaaaaatttcaaaaatgaattgcagtattcacaggcttcgaggattattgtgtctcccttgccgactcggtggccgccgccgataaggggtagggaaccgcctatcatgacggtggggtcggcgcttgccgccatggcaatgtgggtcagcattgaggtggtggtggtttttccgtgggtgcccgaaacgcagacggcgtttttataccgctgcataagagctccccagccctctgccctcgaataaacgggaataccgagccgtcgcgcctcggcaatttcgggattgtcgtccttaattgcggccgagcggattatatagtcggcatctctgacattttcggcaaaatggccgatgaaaatcttaaccttacgtttggaaaggcttttggtcgcagagccgttttgcatatccgaaccggttattttatgaccgctttcaagcagcgtttcggcaagagaacacatggaaaccccgccgataccgataaggtgagcggt

SEQ ID NO: 3379 - DNA, 18584 bp, Unknown
  16S sequences of unknown bacteria
aaaccctccgtcagggtgcagatttaatcccaggtgctttaagtgtggggatatttgtaaaaatcaggaacctaaaactgtaaatatcaatgacagacacactgttgcctgccacctttacaaggagttataatatgaaaaaaattcttttcacaatttgtggcagagccggcagcaaaggcgttgcaggcaaaaatttaaaaacaatttacggcaagcctatggtgtactattcactttcggccattgacctttttataaaagaaaatccgaaatacgactgtgacattgtgcttaatacggattcctctcttttggtggatttggttacagccaaatacccggaagtagatgtaataatcagagatgaaagccttgcaggggacagtgtcgccaaagaagacgtttaccgtgattgtgttttgcaaatggaaaagcgcaaaaacaaaaagtatgatatgttaattgatttggatataacatccccattaagacaggcggaggatttgccgggtattgtaaaaatgtttttgtccgaagatgatttggatttggttatgagtgcagccgaaagcaggcgaaatccttattacaatatggctcgccttgatgataaaggctatgcctgccgtgttatagaaaacagaaataccgcccgccagcaagcacctatttgttatgatgtaaacgcatctctttatgtattttccagggattttttagttgagaaaatgacttttgatctgtggcagggcaaaatcaagatttacccaatgatggacacgggaattttggatatagactctgaaaatgactatatgatgattgacgccctttcttcaattctttttgaaaagattgacggctttaaaaagataagagataatataagagaataatttttaaacaccgacggcatcggccacggcggtataagaatgtaatttagaaactatgatgtaacttcggtaatatggagttacatcttttttatattgtaaaaaatatatgtgtcgtataaagttataaaatgtcgaataaacaagataatcattgcaatgtgttaaaatgaatacaaataagtcgtaaaaaggagaaagttatgagtaacgatgaaataaaagatttatttgaaactttgggagttacaagaaggtacattggttattattttttgctggacgctgtggaaattataaatcaagatgaaacaacacttttaaaagtcggcgaatacatatacgagcccatagccaaaaagtacaactgcaacactgcaaccgttgaaaggaatatacgaacggttattctgcatatttggaaaaacaacaaggggcaagtagaaaaaataatgggagcgaagtttgcaacagtacctaccgtgtctgagtttattgacaatcttgcttactatatcagcaaaggtaagggcaagccaaacaacatataatatttataacgcctaagaggggatctgcctgttaaaattcataatttgtaaataattaccctcttttatatttcgacaataaatgttataatgtactcaaaagttagatatttgaggttttaaaatgccaaaacattataaacagccatttccggtagaaaaatggagaaaaataagagaattgttatatttgtttattctctttttctatacaattttattattgcatgatgcagccacggcttttcttacatatgatgtgtacagttgggccggcactattgcaaaattagagcaagttgttattccggcgttgctgattgttttgtatttgtcaaatatcatttttgatagatcgtattttattctaaaaaaagaagtcataaaaattgttttattcattgtatgtgccattgtcagcattatacacacttcgatgtttacattcggggctcttatgctttgctcagactttacatcaataaaaaaactggcaaaaacatcggctcttgccatattttggtgtacggttataggtattgtagcttgttttagatacgcctatgtaaacgatataatattagacagatttggcagacagcggcattattttgccttcggccactatgcggtgtgggcaagacagatgttgtatgcaggaattttatattttatttcaaaagataaccccattacattgccggaacttggtatttttgcggttttgcaatgtgtggtttattactattcaacccaaagattaactttgcgggtttccatacttacggtaattgtttttgcggtgtttgtaaagtatcgagctgttaaaattgacaataaagtaatgtccggtctgtctgcgattgcttacccggccacaatggcatttactttgtttgtgagcttaaattatgatgagacaataccgtttttttcaaagctgaacagtttgctcaatagccgtgtttccctgcaaagtatgatgtttgatgtatttaatgtgcaattatttgcccaaaaagtaaaaaatgtaacggatttttatatgtatatagacagcggttatctgtatatgttgtttgcatacggtttagtattgacggttttgttgctggcggttttctcatatatgttttggcattcttgcaaaacgaatgacacacggcttttcgctgtattgatacttacaatggcgtatctgtttgtagacaataccccatgtgacttaacttgcagcggtgttgtacttctgtttttcccgattgtccttaaagaacacttaaatgagaaaaagcaggtacagtcctaataattttcttttatattttatggcaaaaaatggcaaataaggtagatatttgtcgtaaaatatggtagaattataaaacaagagaaaagtattatattttatattaaggagtacacaatgaataatcattacgatgagtatgaggaagaaatagatttaatcaaattgatgttctattgtctcagcaaatggaaaagtatgattgccgttttgcttgtgggcatagttcttggagttggattttcatttttcaaagcttcaaaatcggatgccatagtaaccgagcctttggacaaggatggtatagaaagaactgttaaaaaagaagagcttatggctaaggccagtgagtattacgaaaaatataaagagcagattgatgccgaaagtaccgctgataattctgacgacacaacaagcgataagacagacgacataagcgaagaactcgcctctgcaatcttcgaacttgaaaagacaaatcttttcgatgttgacgcagacaagatgtgctatggtgaaatcaaagttgtttcttttgctactgacgaagaaatggctttaatacgcacagcccttgaaagttatgctaaaaacggtgtgatttataacgacttggattgcgaatacactccacaggatttggaaaaacttatatctcttgaagttataaacgatgaaaactcaccggaaactttggcggtagtcaagacatatggcgcaaacgcaggtgatgttacatatttgttggcattggcaagcgaatcaatcagaaatatggcaaaatttgccgttaattataccgaaaaagttcgtttagacaaagattatgaactttcatactatgcggtttcaagcgatattacacaggctaaaaaccccgaaattgcggcatatcaggacacattgtataaaaaattaactaagttaatgaattcagatgaggctgagggagttcggctttcaagtaagccgtcagttaaaaaatacgcagttatttttgctttggctgcagtagtagtttactgtggtataatcggaatgaaattcattttccggggcggatttaacgcagtaaccgatataaatgctaaattcggcactaaatatatgggctctgtaagagtttacacaggcgcaaacaagtttgataaatggatttttgaacagttaaacggtgtttacagcagtttacctgaaagtgagcagaaaaaagttgttgaacttaatgttttgaatgagctgaaaaaagaagaaaatattcacaacattatgcttgtaagcacaatgaccgataaaatcggcggttctgcccggtttatcaaaacggctcttgaaaatgccggttattctgtgtccgaatgtgttgacattgtaaaggatacagacaagctcggtaatacagctaagtatgatttggccatcgtaattgaggatacggacaaatcctccgcaaaacttgttcgggaagaaaacaagttgattaaaaactttatcggtaaaaaatcatataccgtgttggtttaaacagaacaatatacagcacttgttgcctaaaatcggcagcaagtgttttgtgtcacttttgcgtcaatcggtgacagaaacttcaaggggatttatctgatttcgaagaattttaaattgtaattaggagaaaatatgtatcagtatcgcaaaacaagattttctaagcacttagattttttaatatctgatatttttgcttttgagctgtcccttttctttgcgtatatgtttcgctttggaaaaaatccaattgccgtaaaagcctatggctataccgaaatatctgcattgattgtccttgttaatctgattgttgcatttttcctggaaagttacagcggaattttaaaaagagataatgtaaatgagataaaatttacatttgtacatcggatagctgtgtttgccgttgtaatttgctatatgtattttgtgtcaatcggtgatttggtgtcaagattggctatcggttacgcatttttaatggctctgcctatatgctactttttcagatttgcattaaaaaaagttgtaatatcaaggctaagtcaaaaaggcaaaacaaaatataatttggctgttgtaaccacaagaggggctattgataataccgttaaaaatataggtacccttgatataaatataatgggcgcttgtgttgttgacggcaccgatagtttcagttatgaaaactatcctatcttcaagaattttgattatttcttggaatttttaaagaataatcctattgacggagtttttcttgatttgggcagcgattatgttgtgcctgaaaactttattttaagatgcagggcaatgggtattgccatacatcgaaacatcggaataatcggtagcaacagcaatcaaatggtaaataaaatgggcaactttacggttctcaccacagcgattaaaatcgcatcttcaagacaggttttcttaaaaagatgtttagatgttgtcggcgggataattggatgtctgttgaccgggatattattcatttttatcggcccggctatttataaagcagatccggggcctatattttactcacaagaaagagtagggaagaacggcagaaaattcagaatttataagttcagaagtatgtacatggacgccgataagcgcaaacgggagcttatggctcaaaatgaaatgggcgacggctttatgtttaaaatgaaagacgacccacgaattttaaagcccatcggaaaatttataagagattacagccttgacgaatttccgcagttttggaatgttttaaaaggcgatatgtctcttgtgggtacccgtccgcctacagttgacgagtacgaaaagtattcttatcaccataaggcacgcttggcaacaaaaccgggtataacaggtatgtggcaggtaagcggaagaagtaatattacaaattttgaagatattgtagagttggatacagaatacattacaaactggagccttgcactggatatacaaattcttataaaaacagtaaaagctgtgcttaaaaaagaaggcgcagaataaaataaccggcaacatttgcttgtccttagaggtgagcagtgttgccgggtttttatttaaaaatatgtggggtcaagacagaataaatatgatattttataatcacactaacacagcaaatgaataaaaccatagatgatgaataatttttgcaattttcaaaatatttaaaaatataatgaaagcaactaaaaatattgattttttacaaaacaatacaatataatcaaaataaaaataagttattcaagacctgatatctaatctttaaaatcgtttgtactaattataaaaatatgatatactcatattatatcgtagtataaatttaatgctttatatatgttataatgagtaattattatagcttttagggggataaaatgccaaacggaaataatgccaatatcggctttgaaaaacaaatatgggacgcagcgtgtgtcctttggggacatatccctgcggcagaatacagaaaggttattgtaggtcttattttcctgcgttacatttcaagtgcttttgaaaaacgctatcagcagcttgttgatgagggcgacggctttgaagatgacagagacgcttatgcagaagataatatcttcttcgtgccggaggacgcacgttggagcaagattgcatcatctgcccatacacctgaaatcggaactgtcattgatgacgctatgagagccattgaaaaagaaaatacaactcttaaaaatgtattgcctaaaaattacgcaagccccgatttggacaagcgtgttttgggtgatgttgttgacctgttcaccaatatggatatgggcgatacagaggaaagcaaagacctcctcggcagaacttatgagtattgtattcagcagttcgccgcttacgaaggtgttaagggcggcgagttctacactcctgcaagtattgttaaaacaatcgttgctatcttaaagccgtttaagaactgtcgtgtatatgacccttgctgtggttcgggcggtatgttcgtacagagtgcgaagttcattcaggcacacagcggcaagcgtagtgaaattgccgtttacggtcaagagtccaatgccgacacttggaaaatggcaaaaatgaatatggctattcgtggtattgatgccgatttcggtccgtatcaagcagatacgttcttcaatgacttacataaatcactgaaagcagatttcattatggcaaatccgcctttcaatctttccaactggggacaggaaaaactcaaagacgatgtccgttggaagtacggcacaccgcctgccggcaatgccaactatgcgtggattcagcatatgatacaccaccttgcaccgaatggaaaaatcggccttgtgcttgctaacggtgcgttgtcctctcagtccagcggcgagggcgaaatcagaaagaatatcattcaggccgaccttgtagaaggtattgttgctctgccacctcagttgttttacagcgttaccattcctgttaccctttggtttattaccaagaataaaaagcaaaaaggtaaaaccctgtttattgatgcccgcaaaatgggttatatggttgaccgtaagcacagagattttaccgatgaggatattcaaaagctggcagatacatttacggcattccaagaaggtacgcttgaagatgtaaaaggcttctgtgcagttgccgatttgcaggaaatcgaaaagcaggactttatccttactccgggcagatatgtgggtattgaagaagccccggacgacggcgaaccctttgaagaaaagatgacccgcctaacttctgaattattggtgatgtttgcaaagtctcatgaactggaggatgaaatttgtaagaaattgaaagggttaggatttactgtggatataaaggatgtgaataagtatggggaaatatgataaggcgtatgtttattttgatacaaacattttagaatgtcgtcactcaggaaaatcgctatacctctcacaatttacggtgaaccctatatattatgaaatcgaagatttaattcgtactatgggattgactgacaaagtcgaaatttgtattccagatattgtttggcttgaacttcaagagcatttagtaaatcatttcaaagcagagaaaaaatctatggaagccaaaatagatgcctttcgtaaatcttttggcaatttagcagaaatatattgcgagtttaaggattgtgtagatgattccgattataaaaattatgtcagcgaaattgctcaagattttctcgataatccaagagtaaactcaaaaattattccttgccccaaagatgaagattcgatgaaaatgattatttatcaggcaatccattccgttcgaccttttagagttgccaaagcaggtagtaaagaatatagtgatgcaggatttaaagatgcattaatatttcacacgatccttacacatacgaacgagcaacttggaattttaatttcaaatgacaatgatttttcagagttatttaatggcgaatatgcaagtaacttaaaaatgtgtaataatgtcaaagaggttcgaaatatcctgtcacaagagttcgatataacaatggctgatatggtagaaacactcttacatacagatgattatttaattcagcgaattctttcagagtgtgaatttgataaaaatgcccatatagatagcttatcaataaaatcttgtaaatcgaatgaagacaatgctgaagttggctttaaagctctgataaacggtattcagtactcctttgatattgagtataatttaaatgctaaagaattgttaaatgcatcttgtgaaataatagatgaaacggaggctgactaaatgtcttttctatttgaatacatagatataaatcccaaagaaacaattattaggggttgtttggctaaaaaaataccaatggacaaactgcaaccattttgtcgagatataccggaatatgaaatatccgagtttaacggtggctcgaaatttcgtaacggtgacaccattatggctaggattactccttgcttggaaaatggaaaaacagctatggtaaacattcttgatagtaatgaagttggatttggttctacagagtatattgtatttagagctaaaaagaatttaactacacctgactttgtctattatctaatatgcagttcttttgttagagatcctgctattaaatcaatggttggttcgtcagggcgacaaagagtacagacagatgtcatagcgaatttagacatttattttccgaaactctctgatcaagtcaaaattgcaggtgttttaaaatcattagatgataaaattgcacttaataatgcgataaacaataatttagagcagcaagcgaaagctatttttaagtcttggtttgttgactttgagccttttggtggtgttcagccttctgaaatgcaattcattccacttcaagaactctgtaaagtggttaccaagggaacaacaccaacaacgcttggcaaatcatttacaagttcaggcataaatttcataaaagcggagtcaatacttgataatcattctattgacagtagcaagtttgcttttattgatgaagaaacaaatgcactattgaagcgttcgattatcaaagcaaatgacattgtatttactattgctggcactttgggtagatttgcaatggtagataatagtgtgcttccggctaacaccaatcaagcagttgctattatcagacctgatgaaaccaaggtaactcctgcatatctttatagtttcttcattggtaattggcataatgaatactattctaaaagaattcagcaggctgtccaagctaatttgagccttactaccattaaatcgttacctattgcagtcttaaataatacaacaatgagcaattatgaaaaattagtaagtccgttatttgctctaatgaaaaacaatgaagaagaaaatcgtaggctttccaaattaagagacgcacttttaccaaaactgatgtccggcgaacttgatgtttccgacatcgagatttaaaccactaaattattgtttatacaaggaggtagtatgctacaacgacttattgacgatatgaataatgctctttctgcgaattgctatcttgcagcactgtctattgcacttatgctaccagatatatgtggaaaggcggcttaccccaatttgaaggtaggcgatagatataaagcatggtatgacgagtttgtaggaaaatatgaggttcccccagcagaggaaagctgtccagatgatacaaaaatgccgtatctaagtggcgaagtggtgtattctttaaggaattcttttcttcaccaaggcacacctaatattgagtctgaaaaaataaaagcggaggaaaacagaatagacagcttttctcttgttgtagagtcaaagcagaaattcggtatttattctgacgcttcgggactcgggaatggcaaaatccgtacatatagtgtaaatatccgtagactgtgcataatcatcggggagagtgcttctgcttattacaaagaaaataagtctaagtttaactttttcaattatacaatcattgactgggatcaagaagtagaaaaaatgaaaagattaaggcattgaggagggaaaaacatggcaggattatataccgaagccgattatgaaaactctgtaatcgagctgttcagaaatgatttgggatacgagtacgcatacggtcccgatatagaaagggatttttactgcccgttatatgaggaagttctgcttgactctctgtatcgtttgaacggaggtctgcctgatgacgcaattcaggacgccttatttaagctcaaaaactttgaaaacggagagcttgtgcagaaaaacgctgtctttatggactatctgcaaaacggtattcctgttaggtattttattgacggtgaggaacgctcctctatcgtctatcttgttgactacaaaaatcccgacaataactcctttatcgtagcaaatcaatggactttcattgaaaacagcaataaacgccctgatgtaattctctttttgaacggcttgccggtagttttggttgagctgaaatctccctcccgtgaggaaaccgacgcttccgaagcgtataggcagcttcgtaactatatgcaggaaattccgtcaatgttcatatataacgccatctgtgttatgagcgaccagttgacctccaaagcgggtacaatcacctccggtgaagaccgctttatggagtggaaaacaaaagacggcgactacgaaaacacacaatatgctcagtttgatactttctttgagggtatgttccaaaaagaaagattgctggatattatcaaaaactttatctgcttttctaatgagggtatcaattcattcaaaattcttgcaggataccaccagtattttgcggttagaaaggcaatcgaatctacgaaacacgctaccgttaccgacggtaagggcggtgtgttttggcatacacaaggaagcggaaaatcgctttctatggttttctatgctcatttattgcaagaagcgttaaacagcccgacgattgttgtaattactgatagaaacgaccttgacgaccagctttacggtcagtttgcaaagtgcaaggactttttaaggcaagagccggtacacgctacttgcagaaagctgacagaaacttcgggtaaaaatgatgtgggattaaaggactggctggacggcagacaggcaaacggtattatctttaccacaatgcagaagttcgaggagtctcacgaagcattatctgaacgccataacattatagttatggcagacgaagcacatcgtggacaatatggtctttctgaaaccgtgaatgaaaaaaccggtaagattaaaatcggtacagcccgaattatccgcaacactttaccgaacgctacatatatcggctttacaggtacacctatttcttccaaagaccgcagcacccgtgaggtgttcggagattatatcgacatttacgatatgacacaggcagttgaggacggtgctacacgccctgtttattatgaaagccgtgttatcaagctcaatcttgacgaagcaacattaaagttgattgacaaagaatacgatattatgtctttaaatgccgacgaagaagttgttgaaaagagcaaacgagagctcggtcagttggaagctgttctcggcaacgataacactgtcaactcccttgtctgcgatattctcgaccattatgaaaacaaccgtgagaatctgctgaccggcaaggcgatgattgttgcttactctcgccctatcgctatgaagatttacaagcgtatcttagaacttcgccccgcttggtcaaaaaaggttgcagttgttatgacatccggcaacaacgacccggaagaatggcgtgaaataatcggaaacaagcaccacaaaaacgaacttgcaaagaaatttaaagacaacaacagtccgcttaaaattgcgattgttgttgatatgtggttaaccggatttgatgtaccgtcacttgcaacgatgtatgtttacaagcctatgtccggacataatcttatgcaggctatcgcccgtgtaaaccgtgtgttccgtgataaagaaggcggtcttgttgttgactatgtgggaattgccaccgctttgaagcaggcaatgaatgactacacctctcgtgataaaaagaactacggtgataccgatgttgcaaaggttgcatatccgaagttcttggagaagctgtcggtttgccgtgataagttccacggatatgattattccaagttccaaaagggaacagaccttgaaagatcaaaaacaataagcggtgctgttaactttattatgggcagagaaaaggttgatgataaggactctttcgtaaaagaagcccttatgcttcatcaagcattgtctctctgttcttctttggttgataaggacagcagatttgaagcggcattctttgagtctgtgcgtgtactggttctcaggctgacaaataccggtgtggacaagaagatttctctgccggaaatgaacgcaagaataaacgagcttttgaagcagagtatcaaaagtgacggagttatcaatcttttctccgacattaaagaggagttctctctgtttgacccgaaattcctccaagaagtcgcaaatatgaaggaaaagaaccttgctgttgagttgcttaaaaaactgattgcggagcaagtgtccgtttaccgcagaacaaatgtggttaaatccgaaaagttcagcgaaattatgcagcgttctctcaatgcgtatcttaacggtatgctaaccaacgaagaagtaattgaagaaatgctgaagttggcaaagcagatcgcagacgcacagaaagagggcgacaaactgggacttactgccgatgaacttgctttctacgacgctttgactaagccacaagcaattaaggatttttacgaaaatgacgagttaattgcaattacaaaagaacttgccgacaccctccgtaagaataagacgattgattggcagaaacgagaatccgcaagagcaaaaatgcgtatgcttatcaaaaaactcctaaaaaagcacaagtatccgcctgaaggtatggaagatgctgtgcagactgttatgatacagtgcgaactttggaccgataatgtgatggatgcttaatttataacagcatattattatcgttgaaaataatattaaaggctaacttaaaataataactaaacacttatataagtattataaaaatttgatgatagcaatgatatagttgctatcatcatttttaaatgaactatttataattattgactttttaatatggattataaacggaaatagttgtgataaaataccgtcactaaaaggggatttttatctgtcaaattttataaatatatttcgctaaattaaagtttagcgaaatataggccggataattataacttacttaattaacatcgtatacacatgtgctttcaacttcacagttccgctttcgctgttttcgtcaagtttaaccggcaagttagatattacataataactttcgttattaacttcacaattataaattttgccgtcagaacctttgatttcaatttagatttaagcgtgagttttcaaaatttattggcttcttgacagttgcccttgttgccgctggattaatattcgatgctggtggtgtgagagacgtactgttagagctgttcaataagattattagggcgtaagtactttaaataattactggaatgtggtataattattattgccctgccccgctcaactgagaggttgagttgatataaggtctacggacggaatgagggctaaaattctatcaatatagcgaggtgagtgttattatgagtaagattagtgatttggcaaccgtgataagttttcttatgatgatttgtataaaagttatgaatacgaaagtagtaacctctctgctgtgtggggttatgcaatgagaagaaaaaagagaaataaaaaagttaagaaatataacaaatttttcagttataactgtactgaaagaaaaaataaaaatttttcttacaaaaattttagttatagtaattcatataatacatgttttaccaattcaatattttacggaaacagtttttacaaagctactatgaaatattgtgggtttaatggttgtaaatttagttttattgaattcaaaagtgttaatttccatggttgcagatttaaaggggctcattttgaaaatgtaatttttgaaaattgcaatttatccaatacgcattttcaaaatgcaacctttcaaaacgtatatcttgtcaatactagtctaaaaagtgcaggaggaatacaagataaggatttattaataaacataactaaatctaatttgaaaccgagccttactcctcaacttttagaagttatagaggaaagcaagacaaatccttacattatagcttctggaacaatttttcaaaagaaaaaggggcatttaagtaatgctcaaaaaaaggcagaaaaattattgcctaaacaagaacgaaagcgtctacaaagagaacgtcaaacaaaacttttgtcacaagtcaaacagatgtctttcaataaagcaagtattatccgcttgttagataattttaccgaaagcgaaattgctcaaggtttacatttggctacattatctattgataaagatttttcatctcttagttattttataccatatataaaaaaagcgaataatatcacctaaagcagttagtcttaaaattgactgctttttctatactcaagatttcagattggagtaatgtaatgaacgatatttttagagatatgcaggcaaaagtcggttgtgaaaatatttcagacttgccctcttacaagcttaatttgcggcatgaaatgaatcaactgaatcttgccgattatgaagaaaaacagttagaagatttttcaaaatatgtgtttgatatgtcacgtcagactttaaaaaatgtgataaaacaacagaaagaacgtgagtaacaatgcaggaaaagctgtaaaactagataagcagacactcagcgaaacaatcacggcagtaaagagtgtgaagtatgttcccgattaaatatatcaacaactttgtttggaacagggataatgaggtgttcgcttattatgagctgataccatacaattacagttttctatccgcagagcagaaatttatcgtgcatgacagtttccgacagttaatctcacagccctgtgagggtaaaatccataccctgcagatagcaacagaaagctccataagaagtatgtaggaacaatcaaaaagttggttatggggaaactaaagggagttgcctaccagaaaatagacgagcataccaaagcatttgtttctatgattggggacaaccaaatggactaccgcttttttcttggatttaagctcacggttacagaagaacagctcaatctgaaaacctaaaaaatcggcatggctgacctttaaagaattcctccatgaagcgaaccacacgctgatgaatgactttgtttccatgccgaatgatgaaatcagccattacatgaagaggaactggaaagactggcttgttaatatcggaatgtatatttactactcatttactacttttggttgcattttcatgctggtaaataccagcttatgcaaggtatcttccaaaaagaaaataccggtaaagccctaaaatatgggatatacctgaatttactaacttattaaaagatactcagaaatttagtaagttttttatgaaaaaatcatcagttatgtactcataatcataacacaatccctcaatccactgttcgttatcagacagctttatttccggaaaaaataagctgtttattgacaaccgtatcgctttatcaaaatggatttaatgtcggaatatacatatcattagaaaataaaattgcaaaaaataaagatttgtattacaatactcttaatcaaactcaaatattaaaattatactttgtgatagagaggaataatgatgaaaacatacaccattattggcggtgttaacggatgcggaaaatcaagtttgacaggtgtactgaaaagtttagaacctaatatggggattataattgacccggatgatattgcgaaaaaaagcaatctcagttcttacggagtgggacgaaaaaccatagaaaagatacagaaatgtctctctgaaaatattagctttacacaagaaacaactcttgcagggagatatacacaaaaagttgctaaacaggcccaatcacaaaattatcatataaggctgtactatgtggggcttgatacccttgaggaaagtcttgaaagaatacaaaatcgtgtaaaaaaaggcggccataacattccgcaagaaattgtcagccgcagatatgcaaagcgttttcggtcattatgtcggatattgccttactgtaataaagccgtattatatgataattataacggctttacagaagtggctcaatataggaacggagaattgataattgaaacgccaactcctccgcagtggatatcggaattccaaaaatatttacaaaaaaattggtaaaaaaagacttagtcaaaaaagtgtgtaagttattttatggcttacacaccttttttacaggctcatttctaattttttaatgcggttatcggaacaatatacacgccttaatttagctatgttttatcattcattacccaatattagttcacttgccatataattattcagcggcaatattctctattgcatacaatggcaaattaacaagccaatcttcttttttataatcagccattctattatgatttaacaaaactgaaaaaagatgcaagtattttaattcgcttacaattattattttagtacccaatatcagccattatcttaatcatcaaacaataaattacagctgattttttcttcacgacgatattcgctcatgtaaaatttcaaccagttgttttgtttatatattccataagctcgcacataagaaaaacgcataggtttccaacatctcctgttttcattttaatttcacaagttatactactatttttaggattgcaatcaataaatgatatataactgataccatctatatcataatatttacaatttgaatgtgccactgagtttctgatatgtcgatagtagttaaaattatcttttgtttcctcaccgtgatatgttgaataaaattcataatcatacttttgtacttctttgttaaattctttcttccagtgatcattttcgaccttttcctttggtataaccagaagagcatacataaacatttgcaacattgctggatttccaatccctgattccatcaaaatttgtttaatatattcttcattagtctttgcacatgaccatttcatttttcgataatattcgctttttaaaaaattgttatttgccagttcggtcataagtgatatatttgcaattatttgaagaaatatgctctgcgtctcagatattgccatactcttgttctcctccgatattcataaaaaagtagtaacttctataaatcaatttcattttatacatatttttataaaaagtttttcgcttttatttaaaaagctctctttctttttgcaaatcgaataaaggtaatactttcgaaagcaagtttaattgtatttctacaatcagactaaggtcgcagtcgaggcctttattggattatattatatacccttttataactaaatacaactgagcataatgctaatttcttttttatacttttatttttccttttttgttttcaaaaaaatagagccattcatctgcacgccaacaggcggcagctttctggctctactttttgtaaaccactatcttcttttagttctttcaagtctgcttcaagtaacttttggcgaagtttaaaattcttgttgttttctggaatatcgttgattttttgtttctcagtaggttctgaagttgaatgttcatttttctttggcttataaaacttataataaacaaaaaaaataagtaatacaataaaaataaattttcccattttttaatcctcctatttttaaaaattatatacttcgttttggaatttgtatatataatattataattttctatg

SEQ ID NO: 3380 - DNA, 23150 bp, Unknown
  16S sequences of unknown bacteria
tttgcgctattttaatctctgcgagcagtttttctgagtttaataagatatgaagcaatgaaagcggctcagacgagcttctttttattttttaataaattttataatgcagcgcccgaatttgcagtctgccggataaatactttagagcggcagaaaatgcattttagagagaaagcaaaatagacctatcttgtatattgcattaaacttcatcaagcaaaaaattgaaagttaaagacaccgcgctgtcagcgtctttattgcttgcggcataaaattcgatatgctaaaataaaaacacaaagattaaataaagcaaaactgaaaaagcgataattaaaaaggaagggtaaaaatggaactcgtaaaaggtataaaagaaagaagaagcataagaaaatttaaagagcagaaggtgccgcgtgagcttataacagaaatcgtggatactgcgcgctatgctccttcttggaaaaacacacaaacagcgagatatatcataattgacgatgccgaaaaaattgccgagctctcaagtatagaatgtatggcgaactttgcatataacagtaaagtggcagcggccgcgcctgcgatcgtgctgattacatatataaaaggagttgcgggatttgacagtgacggcacaccatcgactaagaagggcagcgaatggcagatgttcgacgctggaatagcagcgcagactttttgtcttgcagcgtacgagaaaggccttggcacggttattatgggttatttcgatgaagatgagatcaaaaaggtgatagatattccgcaagatcaagcagtggctgcgatgattcctatcggatatccgaatatcaatccgcaggcgccggtgagaaaggaagccgatgaacttgtcacatttatttagcgcagagatatgatgggcttaaaaatgatttagatacacggttcttaaatattttaattgtttatgaattatcaaaaaagtgcaaaaaataagtgctgtataataattgattgtgcttgcgcaaaagtatttttgaggttataatggttgtataaaggaaattattccattaaactttcgatattgtaaggaggatttacaaaatgaaaaaagcggatagacttaataagcttgaaatgtccaaaatcagaatgacaagcaagaagatggacgcgatcgaagcttccggtcagaagatcattagatttacttatggtgaaccaaactttaatactcctgattacatcaaagaagctgctaagaaggctattgatgaaaatcacacaaagtatacggattatactggatcgccggcgttccaggcggctgtagctgctaagtacgaaagagaaaacggccttaagtttaagccgagccaggttatctcaactcacggcggagcacaggctgcttacctcgttctcactactttcttaaatcctggtgatgaagtaatcatccctaacccgatgtacaatatctacagaatcatcggcgaaatctgcggagcaacagttaaggaatacaaacttaaggaagaaaacggattccagattgaccttaaggaaatggaaagccttatcactgacaagacaaagatgattgttatttgctcgccttcaaatcctatcggttctgtgcttactgacgaaaacctcgagggactcggtgaactcgttaaggacaaggatctcatcatctgctcggatgaaatgtatgagagacttacttatgacggagtacaggcaagctcacctgctaaatttgatacaatgagagataagactatcattatcaacggcttctcaaaggcattcgctatgacaggctggagaatcggatatgtaatcactccggaagagtggtttgagcctctctatctccatgcaggacatcaggtttcgggtatggctgacttcattatcgaagcatgtacagtagctcttaatgacgagcctaagtacggtacaatcgaaaagatgagagctgagtttgacgagagaagaaagttcctcgtaaaggaaatcaacagcatgaagcacttctcgtgcctcaatcctgtaggcgcattctacatcttcatgaacatcaagaagacaggaatgacttcagatgagttctgcgattggatcgttgaaaactacggcgtagcaatgattacaggctcatgcttcggttcggaaggcgaaggcttcgtaagaatttcctacgcttcgtcaatggaagactgcaaagctgctatggaaattctccataaggctgacgaagacctcacagcgcagggaaaataataaaagactgaaaagcgttttagactaccggctctcgcagccggtagtttttgtgtataaaaattgtttgccgaacaatttttaaattgattgcattacttgcccgctatataattaaggcatagaaaagcggctctgcacagctgccgccccggactgctgcaatgcacaggtgaagagtgctttgcactaagccggcagatatgtacaattttaatattataaggagggcatagatatgaaaaaggcagacaggttaaacaagcttgaaatgtcaaagatcagaatgacaagcaagctgatggatcagcttgaagcggaaggaagagatattatcagatttacttacggtgagccgaattttgatacgcctaagtacatcaaggatgcctgcacagatgcactttataacggacatacaaagtattcggattacaacgggccgattcatttccgtcaagcagtgtgcgataagtacgaaagagaaaacggccttaagttttctcctgaccaggtaatttcaacgcatggcagtgcacaagctgcttacctcgtgcttactacattcctcaatccgggagacgagattatcattcctaacccgatgtacaatatctacagaatcatagctgaaatatgcggcgcagcggtcaaggaatacaaacttaaggaagaaaacgagtttcagattgatcttaaggaaatggaaagcctcattactgataagacaaagatgattgtcatttgctcgccttcaaaccctatcggctctgttctggcagaagaaaatctcagagggctcggcgaactcgtgaagaataaagatcttctcatctgttcggacgaaatatatgatagactcgtatatgacggcgtagaagcggtatcacctgcgaagtttgatacgatgagagacaagactatcatcatcaacggtttttcaaaggcgtttgctatgacgggctggagaatcggatatgtaattactccatccgagttttttgagcctctctatctccatacaggacatcaggtttcgggtatggctgatttcatccttgaggcatgtacagtagctctcaacgatgagcataagtacggagctgtcgaggctatgaggagcgaattcgatgagagaagaagatatatctacagggaaattaactctatgaagcatttctcgtgccttaatccgacgggagcattttatatctttatgaacataagaaaaacgggcatgacttcggacgaattctgcgattggcttgttaagaattacgatgtagcagtgattacgggcagctgttttggtacggagggagaaggctttgcaagaatctcatacgcatcttcgatggaaaacattaagaaagctatgacgaggctccatgaggctgataaaaaactcaccgagatgggcagataaaaaaggctatgcgttgtgcatcaggcgcgcattatactgccagatatttcaaacactcggcggtacaaatgtgcagctcggtatatcaatacaatgcgtttgagggtttatatcgtaacggcgcttctgggcgtttatcctaccgataaatttgctgtaaaaagatatttctttttcgataagcggtattatgattcttgcatatgtatatgccgcgatatgccgcgttcgtagcgttgtgctcgatgccaatattattatgggcgcttaagtctgctgtacttatgacttacgagaaagcacttatcaaggatataaacaacttcggcgatgagaaaagcacaggaagcgcttattgcagctgcttgctcagagccatcgagccgtactgggctatgaaccataacaaaaaatgtcttgcaggcaaatgagtgatgaacataaaaaaaataagcaaaaataacgcttgcattgcagttaaaacgaatatataatgtatacatagctaaaaattaaatcagcgggaagacccgctgattttaaattgaggaaaatgcaaggtaaaaaaggccaaaccccttgacacttttggggttttgttataaactattctagcgactttatgcaattatacaggaggtggagcaaatggcaactggtacaagagtaaaggtaactctcgcatgcacagaatgcaagcagagaaattacagcaccatgaagaacaagaaaaacgatcctgaccgtatcgaaatgatgaagtactgtaagttctgtaaggaccacacacttcataaggaaacaaaataggaaataaggagataagcaagatggctgacaataacaagaaggtacctgcagctcctaaaaagaagcgcggtagtatcggcgagtatttcagaggcataaagaccgaaatgaaaaaggtcgtatggccgacaaagaaagagctcggatcgtttaccgcagtagtgctgattacatgtggattttttgcacttgcgttctggggtgtggactcagcagtactcgcagtgctgagaggtattctcggaatcaatatgtaatttaaaatcttagggtaaagaaggtacaatatgtctgaaacagcgaaaaatccggaaaatctcgattttggcggcagagaaggccgcgatggagaagcaaggtggtatgttgtccacacctattccggacatgaaaacaaggtgaaaatgaatattgagaagatagttgagaacaggggaatgcaggaccttattctcgatattgttgtgcctactgaagacagggtagaggttaaaaacggacagcgcaaaattaagaccagaaaaatgttcccgagttatgtcataataaaaatgatagtaacgaacgaatcctggtaccttgtgagaaacactcagggtgtaacgggatttgtagggcacggctccgaacctattccgctcaccaatgaagaagtggcgagaatgggcatagaaaagatatggattgatctggatgtggagatcggcgacactgtgaaagttatcagcggaccttttgagagctttatgggtactgtagaagaggtcaatatggataagcagacacttaaggtcatcgtttctatgttcggtagagatacacttgtcgagctcgaatttggacaggtagataaaatctaaagaaaggagagatgaaaaatggcaaaaaaggtagaaggttatattaagcttcaaattgccgcgggtaatgcaactcctgctccgcctgttggtcctgcactcggtcagaagggtgtaaatattatggacttttgtaaacagttcaacgctaagacagcggatcagccgggaatgattattcctgtagtaatcacagtttatgcagacagatcgttctcgtttatatgcaaaacaccgccggcagcagtacttcttaaaaaggcagcaggtctggagcacgcttcgggcgagcctaacaaaaagaaagtagcaactattacaagagcacaggcagaagaaatcgcaaagacaaaaatgcctgatctcaatgccgcaagcatcgaagcagcaaccgaaatgataaagggcactgcaagaagtatgggtatagtcgtagaagactaataatttgggagaccgtccaagatgaaaatccggcagaacagaaaaacgtcatgctggcatcagtggacataaaaggtcgcttgcaccaggaaaaggagaaaaaagaatgccaaaaagaggtaaaaagtatcaagaagctgcgaagcttatcgacagacagaatctttacgaaatagaggaagctgttgatcttgctgttaaggcagcaccagctaagtttgatgagactatggaagttcacattaagctcggcgtagacggaagacacgcggaccagcaggtaagaggcgcgatagtacttccgcacggaacaggaaaaagcgtaaaagtgctcgtatttgccaagggacctaaggctcaggaagcagaagaagcgggagctgattttgtaggagcagaggagcttgctcagaaaatacagcaggaaaactggttcgattttgacgtagttgtcgctacacctgatatgatgggtgttgtaggaagactcggtaaagtgctcggacctaaaggacttatgccaaaccctaaatcgggaactgtaacaatggatatagccaaggctcttgaagagatcaaagcaggtaaagttgagtacagactcgataaaacaaacatcattcacactcctattggtaagaagtcatttggtactgaaaagcttacagacaatctgaatgcgcttcttgaagcggtagcaaaggcaaagcctgcggctgcaaagggacagtatatgagaagcgtaactgttgcttcgactatgggcccgggagtaaaaatcaatccggcaagaattactttttaaatattaccggataataactgaataagaaaacaaaaccgaagacagcgggtgcgcaagcttaatttcccgccgaggtacaatataaaatattggcctcgctccggcgaggcttttttatggagtaccatattacttgaccgacaaggtcggaaaggagacgaatatgtcagtagaagcacaagcacaaaagcagataataattgacgagataaaagaaaagcttgaaagggctcagtccgcagtagttatcgattatatcggtataactgttgcagaggctgacgctatgagaaaaaagcttcgtgaagcaaatgtagactatacggtttacaaaaatactcttgtgaagagagctattgaaggcacaaagtatgaagagcttgcacaggttcttgacggaccttcggcatttgccttaagctatgaagatgccacagctccggcaagagttattgacgaagtgatgaaagactacaagaagatgtcttttaaagcaggagtggtagaaggagtttattacgatgccgagggtattgaggcaatagcagcaataccgggaagagatcagcttatcgcaaagtttatgggaagcgttcagtcgccggtatcaaagctggtacgtacattccaggctatcgcagatgcaaaagcagagtaatttttaattaaaaaatatcgaaaaggagaatagaaaatgaataaggatcaaattatcgaagctataaaagcgatgacagttttagaattaaacgagcttgtaaaggcttgtgaagaagagttcggagtatcggcagcagcgcctgttgcagtagccggcgcggcagctggcgcagcagctgctggtgaagagcagacagaattcactgttgttcttgcggcagctggcggagaaaagatcaaggttatcaaggtagtaagagaaatcacaggccttggactcaaggaagctaaggatcttgtagacggagctcctcagaatgttaaggaaggtatcgaaaaggcagaagcagaagctatcaaggctcagcttgaagaggttggcgctactgtagaactcaaatagttttaaaacatattatttgtttacggcgaaccgatttggaaatcaaatcggttcgtttagtttataaagtgaggaattatttatgcttctgaatattaagtcgattattgttgatgattttttgaagttatgtgaaaaaagagcaatcggtaaaattacgatacagaatattttggacgaatcgggagtaagcagaaaaacattttacaattacttcagggataagtatgatttaattcaatattgttatgatacaaaaattatacctcagtgggattatataccgggcgatgaagaaaatgcaatggagtgggaaatggaaatgcttcgctcaatgaggaaacatgcaggctttatgaaggcagcgtgccaaatgggcggaaaagactgtttgagagagcacatggtaaataacggaagggatgctgattttaaatggtacagtgcgataaaatcagagcccattgatgatgaaatgaaaaaaagcatctattatcattcggcagcggcccgctatatggtaatagagtggatactcaatgatatgccgttgcatgaagaagaagtggcagagattatcagaaagaacagcatattatataattataataaaaaatgaattaaatatggacatatagtcgtaaatgtcaaaaatgaaacaaaaccgtaaatctatgtgttgaaagctgcctctataaatgttaatttaaaaatgttggatcagaagcataaatccgggttatatttctgaaagcggctgcgatgcgatcggttgcgctgcaaaccaatctatatttttattataggaggcatattatgcaaaaacaaagtactttcagaaaatatgcagcactcatatcgcttgggtttatgggcggaacaatatacacaacgacatatataagatttacattttatacacagcttctcgatgcgcttaatatgtcaaatgttcagcttggactggcatcaacgattacaacgggactgtatatgatcatcggcattccgggagcatatcttgcggataagtttgaggcgaagaaggttatccttgtgagctccggcggagttgcgctgcttgcacttttgtttcctgtgctggttcacggatatacgacatatcttcttttccagtgtggcaacacaattgttatggcggcgtactggggatgcctgattaaatatatcaataatctcagcggagagggcgaatccggaaattcattcggtacatattatatgataaacggtctttcgggagcgctcggcaatgcgattccgctttgggtgagcacgcatttcggtgcaaattcattaaatatcgtagttgtttcaatgggtgttgtttcggcagttggcacggttcttattttgcttttcctcgacagcgaaaaacagcttgcggaacgcggtatatacttaaaaggcgacgagccgattcagctcaagcatattgtatatgtactcaaatggccgggtacatacatgctgacttttgcttattgcagtacaataattctctatgaaaatatgacatatatgggaccttatcttacggaagtattcaacatggatgaaagcctttcatcggcgctggcaatcgtaagacagtatggcacactcgtgctttctccgctgggcggatttatgtgcgataaagttttcaaggctacatataagtggtatattacatcgttcataattattgcggctctgtatgcgggtctcgcgtttatgttcggaccggaaacgccggttatggttgtcggagtgtataccgttcttccggcagcggcttcgatggcgctctacggagtaacatactcaatcataagagagctccatataccggcaatgatttcggggactgccgtcggtttaagctcgacaattgccagcgtagagtcgatgattcttccgccgcttttcggatactttctcgacagcttcggaacaaacggttacagatatgtgttccttgcgcttgtagttgactgcatactcggcatcttaaatgctatgtgggtgggttcgcacaacagaaagtgccttgcaggcgagagaacgatgaacctctccgcgcttgagaatgcagaatcgaaatagtagtgaaagcttcgctgaataggaatatattgtgtaagaggagcggactcatttattgagttcgttccttttcttttgtaaaggatcaggaatcttgacattttggtgtgcatgttgtaaaatatacaatatataaagcataaaaatggagctattacaaaattattaaaaatcacggaataacaatggggcgtttcattacaaagtgattcgtctttttgcatgcaaagaaaggaaatgattatagcgatgaatattaaagcaattattgcagatgcttttttagatttatgtgagaaaaaagcaataacaaaaattaaaatacaggatatactcgacaaggcggaagtaagccgagggacattctataatcattttgaagataagtatgatcttattcgttattgctatgatgcaaaggttttaccgcagtgggattataaacaggaagaggatatggatgctgccgatgccagatggagacttgatatgctgtacaacataagaaaatatgctcgttttatgaaaggcgcttgccttatgggcggagcaaattgcctgcgtgaatacatagtggataagggcagaaaagcggatcttgaatggtataaagagaaaagcaaaaaaacgattacaaaagaaatcgaagaaagtatttattatcattccggtgcgtgcagatatatgattatagaatggatccttgacgatatgccgattgctgaggaaaaactcgcggatatattgagaagaaatggggttaagggtgtttattgaacatataagcaaaaaagtacatatataaacaaattgcatcttttatagattgagaaaaagtaactttaatggtactgtgagtaaggaattaaaattttatattctattttgctcatttataaaggaggcatattatgaaaaagcaaagtacttttagaaaatatgcagttcttgtctcgcttggatttatgggaggaaccatttttacaacatcgtacataaggttcgctttctatactcagctcatagacagcctgcgtatgacgaatgtacagctcggccttgtttctacaattacgaattttatttcgtttgcgctgacaattccgggctcattcctttcggataaacttgaagcgaagagggttattgttttcagctcaggcagcatatcgcttcttgcgctgctgttcccactgtttgtacacggatacgcttcatatatattcttccagtgtgcaaatgctgttgttcttgcagcatactggggatgcttgatgaagtacataaacaacctcggaggagaagaggaagcgggaaattcattcggtacgtattatcttatcaatggcctttcgggagctgccggtaactttattcctctttgggcacagtcacactttggtggggaaactggtgtaaatgtagctgttttttcgatgggtgtagttacaactgtcgctacgattctcgtgctcatcttccttgaagatgaaaagcagcttgctgcaagaggcgtataccttaagggcgacgaaccgatcaagttcaagcatctcggatatgttctcaaatggccgggtacatatatgctcattcttgcatatacgagtacaatcgtgctctatgagaatatgtcttacatagctccgttcctgacaaatgcgctgggaatggatgaaaatctttcatcaactcttgcaattgtaagacagtactgcacgcttgttctttcacctttaggcggatatatgtgtgacagagttctgaaagcgacatacaagtggtatattttagcctttgcgatcattgcggttctctatgcaggactgggaattttctttgaacctggttcaagcccgcttatagctggtatatattcggtacttccggcaggcgtatcgatggcactttacggcgtaacatactccattataagagaatgtcacatcccgcctatgctcacgggaactgccagtggtttaacaaatctcggtggaactattcagggaatgattcttcctgtaattttcggtacatgtcttgataattatggtgatgcagctcataatttcgcgggatacgattatgtattctacattatggcaggtatctgtgtacttggtatattcaatgctatgtgggtaggatcacaccacaagaagtgtcttgctggaactagaaagatgaatctttccggtatcgaaaaggtagaagcgtaaaagttaaacataaaaatagcataatttactgaattgaaagatgttgttacaaaaagaacggacgtttaaaagtccgttcttttttcaaatataaattatgcaaagcagtaataatggggaatatttttgaaaaaattgtataacaactcttgactgcttgacaaaaatatgataacatataagactgccacgcaaatgtagttttgcaatcccaacaggggagaaaagaagcagtttctttaaatactaaaggagtgatgaatatgccacaacccgtaaaattcggtaggaaaacacgcatgagcttctcgaaaataaacgaggtagccgagatgccaaacctgatacagatacagaccgattcgtatgattggtttataaaggaaggcatccgtgaggtgtttgacgacatatcgccgatcaaggattacgcaggaaatctgattttggaatttatagattattcccttacagatcctccgaaatacgaacaggaagagtgtaaggaaagagacgtaacatatgcagctccgcttaaagtaaaagtaagacttgtaaataaggaaaccggagaggtcaaggaacaggaagtatttatgggtgatttcccgctgatgaccgagaaggggactttcatttataacggcgccgagagagttgtcgtaactcagctcgtgcgttcgccgggaccttattatgatgtaactgtagacaagtcaaacaatagactctattcgacgacgattattcctaacaggggagcttggctcgaatatgagaccgactcaaatgaaattatttccgtaagagtcgaccgtacgagaaagcagcctgtaaccacgcttattcgcgcgcttggatttggtacggataaggaaattatagatatttttggtgaagacgtccgcctgatgagaacgctggaaaaagatacggcagacagctatgaggaaggacttaaagaaatatataagaagctgagaccgggagagccgccgacactcgacagtgcaaaatcgctgtttgagtcgctgttttttgatcccaagagatatgaccttgccaaagttggccgctacaagtacaacaagaagctcggtttgtcaaacagacttccgggttgcacggccgctgaggatgtaacagacccgaacacgggtgaaattatagtggaaaaggatcagcgcatcactcgcgatatggcccttgccattgaaaatgccggcgtaaagtatgtactggtatacggaaagacggatgaaagccatattacaaaggtaataggcaataactttgtcgaccttgaggcgtatgtcgattttgacacaactgatctcaaggtaccgggcaaggtttattatcctgtgctcaaagagattctcgaagagaacgaggatgaaaaagccattaaagaagcaataattgcgaaaagacacgaactttcgcctaagcacataatagtagacgatattattgcatcggtatcgtatattctcaatttgaattacggtatcggtaatattgatgatatagaccatctcggcaacagaagacttagaactgtgggagaacttcttcaaaatcagttcagaatcggccttgccagaatggaaagagtggtaaaggagagaatgacgatacaggatatcgaagttaccactccgcaggcgcttatgaacataagacctgtaacagcagctataaaagaattttttggaagctcgcagctttcacagtttatggatcagacaaaccctcttgctgagcttacgcacaagaggcgtctttcggcgctgggacctggcggattgtcaagagagcgtgcgggatttgaagtgcgagatgtacattattcgcactacggccgtatgtgccctatcgaaacgcctgaaggtcctaacattggacttatcggctcgctcacgacatacggcaagataaacgaatatgggtttatcgaaacaccttacagaaaggtagacaaggcgacgggcagggtatcggaaaatgttgaatacctgactgctgatgaagaagaaatgctcatcattgcgcaggccaatgagcctctggacagcgagggacactttgtaaatcagaaggtggcatcgcgcggtgcgggcggtgaaattgacctcgtgcagagagaaaatatagattatatggacgtatcgcctaagcaggtagtatcggttgcgacggcaatgataccgttcctcgaaaatgacgacgccaaccgtgccctgatgggctctaacatgcagcgtcaggcggtgccgcttcttgtgacacaggcgcctatcgtgggaacaggtatggaatacaaagctgcgagggattcgggtgtagtaatccttgcaaagcatacggggactgtcgagtttgttgacgcagacaagattgttataagacgcgatgacggtgaaggcatagattcgtatacgatgttgaaattcaagcgctccaatcagggcacttgcataaatcagaggcctatcgtcagccacggcgagcatattgaagaaggcgaagtcattgctgacggcccttcaacagacctcggtgaagtagcgctcggaaaaaatcttctcatcggctttatgacttgggaaggctataactacgaggatgctatcgtactgaatgaaagactcatcatggaagatgtgctcacatcgctccatatagaagaatatgagacagaggcgagagacacgaagctcggacctgaagagattacaagagacataccgaatgtcggtgacgatgcactccgtaatctcgatgaagagggtatcataagaatcggtgcggaagttgattcttcggatattctcgtaggaaaggtaacacctaaaggcgaaactgagcttacagcagaggagagacttctgcgcgcgatcttcggcgaaaaggcaagagaagtgcgcgatacttctctcagagttccgcatggtgaaacgggtattgttgtagatgtcaaaactttctcaagagaaaatggtgatgaacttgcgcctggtgtgaacaagctcgtaagatgctatattgcgaccaagagaaagatacaggtcggagataagatggcgggccgtcacggcaacaagggtgttatttcgagaatacttcctgaagaggatatgccgtttatggataatggacagccgctgcaggtaatgctcaatccgctcggcgtaccttcgcgaatgaatgtagggcaggtactcgaggtgcatctcggacttgcggccaagagcaaggactggtatatttccactcctgtatttgacggcgcaaatgaaaaagatataattgagcttctcggtgaatgcggcttccctgaaacaggtaagctgagactgagagacgggcgtacaggagaatttttcgataatcctgtaactgtcggatatatgtatatgctcaagctgcaccatctcgttgatgataagatacatgcgagaagtacgggaccgtactcacttgtaacgcagcagccgctcggcggtaaggctcagttcggcggacagcgtttcggagagatggaagtatgggcgcttgaagcatacggcgcagcttatacgcttcaggaaatccttactgttaagtctgatgatatagtaggaagagtaaaaacttatgaagccatcgtcaagggcgagaatattcctgagcctggtattcctgaatcattcaaggtactcattaaggaaatgcagagtctcggacttgatataaaagtgctgtctgaggacaatcaggaaatagaaataaaggaatcaagcgaatatgaagacactgatatcgaagctatgatagatattgtcggggaagatcctgcgggcagcttagagaatgacaatgacgatgactatgcagacgaagatatcgatgaattcgaggatgattttgacgagtttgatgatgaagaagacatcgacattgagcttgaagaagataaggattttgctgaagagttatagaaagggggaggaactccttgaacgaaaataataacacgggctacgagctgaataattttgaagctataaagataggtcttgcatccacggagaagattctgcaatggtcgcacggcgaggtaacaaaacctgaaaccatcaattacagaactttaaagcctgaaaaggacggactgttctgcgaaaggatatttggccctacaaaggactgggagtgtcattgcggtaaatataagagaataagatataagggcatcgtctgcgatcgctgcggtgtagaagtaacaaaagcaaaggtaagaagagagagaatggggcatatacagcttgcggccccggtgtctcatatctggtattttaagggcattccatcgaggatggggttggtgctcgatatctcaccgagaagtctggaaaaggtgctttactttgctgcatacattgtaattgatccgggcgaaagcgacttcgggtacaaagaagtaattaccgagcagcagttcagagatgctaaggaaagatacggcgcgggtgcattcaaagcgatgatgggagctgaggctatacgcgagcttatgatgcagatagatctggacgcgctttcagaggagcttcgcaagaaactcaaggaagcgtcgggtcagaaaaagatcagaatagtaaggagactcgaagttatcgaggctctgcgccagtcgggcaataagcctgagtggatgattatggaagttattcctgtaattccgcctgatctgcgccctatggtacagctcgacggaggaagatttgcaacttctgacttaaacgacctctacagaagagtaataaacagaaataacagactcaagagactgcttgaactcggagctcctgatatcatcgtcaggaacgaaaagagaatgctccaggaagctgtcgatgcgctcatagacaacggccgccgcggcagaccggttacgggaccgggagcaagaccgctcaagtcgctttcggatatgctgaaaggtaagcagggaagattcagacagaacctgctcggcaagcgtgtcgattattcgggacgttccgtaatcgtagtaggaccggagctcaagttctaccagtgcggtctgcctaagaagatggcgctcgagcttttcaagcctttcattatgaaaaagcttgtagaggaagagtatgcgcacaacatcaagagtgcaaagagaatggttgaaaaggtaagacctgaggtatgggacgtgctcgaaagcgtaatcaaggagcatcctgtaatgctcaatcgtgccccgacgcttcacagactcggaatacaggcatttgagccggtgctcgtagaaggtaaggctatcaagcttcatccgctcgtatgtactgcgtttaacgctgactttgacggagaccagatggccgtgcatgtgccgctttcggtagaagcacaggcagaggcgagattccttatgctttcggtaaacaatatccttgcacctaaggatggatctcctataacgacacctactcaggatatgatacttggttcgtactatctcactcatccgggcgtggaagagagaaatacggcggcggaaaagggagacggcaaggtatttaccgatatggacgaaatgcttatggcataccagaacggcgatgtaggcatccacgctaaggtaaaagtaagaagatttcttgatgaaaacgatacaagaggcaagctcatagaatcgactgtcggcagatttatattcaactcggaaattccgcaggatctcggctttgttgacagagcggaagacccatatgcgcttgaagtagatttcctctgtgacaagaaaaagctcggcgtaattatcgacaagtgctacagagcacacggcaatacgggaacggcgctgatgcttgatcatatcaaggatatgggtttccattattcgacaaagggagctgttacgatcagtatttccgatatggaaattcctgaaaagaagcaggaaattatagccgaatcggagaaactcgtagataaatatgagaaagcatacaggcagggacttatgtccaaccaggaaagatacgaaaaggttatccagatttgggccaagacgactgatgatgttgccgacgcactaatggactcgctgggaacgctcaataatctctatataatggcgcattccggagccagaggttcaaaaaaccagataagacagattggcggtatgcgtggtcttatggcaaacgctacaggtaagaccgttgaaattcctatcaaagcaaatttccgtgaaggactttccgtactcgaatactttatatcgagcaacggtgccagaaaaggacttgccgatacagcgctccgtacagcagactctggatatttgacaagaagacttgtcgatgtatctcacaatgtaatagtaagagagttcgactgcggcactgacgagggtatcgaagtaagagcattcactgacggcaaggaagtcatcgaatcgctcaagctgcgtatcataggcagaactgcatttatggacatatatgatcctaatactggagagctcatagtggagcagaacgaggagattacggaagacgcggctgacaagattgaagctgcgggtatagagtccgttgccatccgttcggtaatgacttgtcacagcgaacacggtatatgcgctaagtgctacggcagaaatcttgctacaggcgagcctgtaaatatcggcgaagctgtcggcattacggcggcgcagtcaatcggcgaaccgggtactcagctgacaatgagaacgttccatacgggcggcgttgccggaagcgatattactcagggtcttccgagagtagaggaactttttgaagcgcgtaagcctaagggacttgcagagatctgcgaggctgacggtactgttgtttctatcgaaacgagaaaagataataaaactgaaattaaagtgcgcggggaagaagagaaaatctatgttgtgccttatggtgcgcgtctcaatgtaaaagagggtgattatgtccttgcgggcgacaacattaccaaaggaccgctcaatccgaacgacatactgcgcttaaacggtgtggaaggtgtatatcagtatcttctcaaggaagtgcagcgtgtgtataagaatcagggtgtagatatcaacgataagcatgttgaagttatcgtaagccagatgctctcaaagagcaggattgaagatgcgggagacacagaccttctgtcaggcggactttacagcaagtttgaaattgaagaggctaatgaagcggcaattgcagcgggcggtgaaccgtgcaccgcgaagagagtgcttctcggtattaccaaggcttcgctggcgacaaactcgttcctgtcagcggcatcattccaggaaacgacaagagtgctcacagatgctgctatcaaaggtaagactgatcatcttatgggtcttaaagaaaatgttatcatcggcaagctcattcctgccggaacgggtatgaagcgctacagaagcgtaaatgttgattacggcatcaatacggagcttatggagtcgtattctaatatgaattatgacgaatcggtatacgagtttgaaaacgataatgattacaaagagctcgccggaatgaatgaagcatttgaaaacgatggctacgatatagtagaaatggatgatatacagaacgaacttaacgattaaataaaaagtaagaataaaatgtgccccaatgtttgaaaatacttgacattgggggcattttaatgataaaataagttttggtttccgcccggagacgggtttggatatattgttttattttttgaagaaaggagaaacaaatgcctactattaaccaattagtacgtgaaggaagaacaagtgcggtaaagaagtcgactgctcctgctctcaacagaggtatgaactcactcaagagagtaccgacagacgttcattcacctcagaagagaggcgtatgcacttcagtaaagaccgtaactcctaagaagcctaattcggctttaagaaaagttgccagagttaagctgactaacggaatcgaagtaactgcttacattccgggtattggtcataatcttcaggagcacagcgttgttctgataagaggcggcagagttaaggacctccctggtgtaagatatcacatcgtaagaggcacgctcgatacggccggtgtaaacgatagaggtcaggctcgctcgaagtacggcgcaaagaggcctaagaaaaagtaatagtcgggaatttgagcccttaatatagaatattaacttatgatatattgagcgccgcggaccgggagagagacccgggacgagtaccccagctaaagacttttgcgtctatttgattgcagggcgcaagagagtaatcctcgcatgagggtgaaggaaaaatgcaattcacaaaataagaattagcaagcaaggagggaagcgaagtgccaagaaaaggtaacgtaccaaagagagaagttcttcctgatccggtatacggaagcactgttgtggcaaagctcattaacagtattatgttggacggaaagaaaggaacagctcagtcgatcgtttacggtgcttttgagatcgtagaaaagcagaccggcgaaaacccgcttgaagtatttgaaaaggcaatgaacaacatcatgcctgtagtagaagtaaaagcgagaagagtcggcggtgctaactatcaggttcctgttgaagtaagagctgacagaaagcagacgcttggaatcagatggctcacaaagtacacgagagccagaggcgaaaagactatggctgagagactggcaaaagagcttatggatgcagcaaataatacaggcgcatcagtaaagaaaaaagaagatactcacaaaatggcagaagcaaacagagcgttcgcacattacagatggtagttttgagagtacagagtttatttatagcagaaaggaggatataagatgcctagaagtttttcacttgaaaaaacaagaaatatcggtatcatggcgcacatcgatgccggtaagacaacaacgacagaaagaatactgttctacaccggaaagactcataagatcggcgaaacgcacgacggatccgcaactatggactggatggaacaggagcaggaaagaggtatcacgataacctctgctgctactacagcacaatggaaagacacaagaattaacataatcgatactccgggacacgtggattttaccgtagaggtagaaagatcgcttagagtccttgacggagcggtaacagtactttgcgctaaaggcggagtagagcctcagtcggaaactgtttggagacaggcagaaaagtacggtgttccgagaataatattcgtaaacaagatggatattatgggagctgacttctttagagttgtcggaatggttaaggacagactgaaggcaaatgctgtgcctattcagcttccgatcggtgctgaagacagtttcgtgggaattgtcgatttagtagaaatgaaagcagaggtttataaagacgatcttggtaaggagatagagattacggatattccggctgatctcgcagatacggctcaggaatggcacgaaaagatgatcgaggccgttgctgaagctgacgaggaactgatgatgaagttccttgaaggagaggaaattaccaaggcggaagttaaaaaagctatccgtacaatgacgatcgagggcagaatggttcctgttctctgcggatcggcatacagaaacaagggtgttcagatgcttcttgacgccgttgtcgactatatgccgtcgccgcttgacatccctgctatcaagggtgttatcccgggaacggaagaagaagcagagagacctgcggatgataacggtccgtttgcggctcttgcattcaagattatggctgacccgtttgttggtaagcttgctttcttcagagtatattcgggaacgctcacaagcggttcttatgtatataactcgacaaagggcaagaaagaaagaatcggaagaattctgcagatgcacgctaacaggcgtgaagaaatcgagcaggtttactccggagatatcgctgctgcggtaggtcttaaagatactacaacaggcgatacgctctgcgacgaaaagaacgaaatagtgctcgaatccatggaattccctgatccggtaatcgaaatcgctatcgagcctaagacaaaggcaggacaggaaaagatgggcatcgcgcttgcaaagctcgcagaggaagacccgacattcaaaacttatacaaacgaggaaacaggccagactattatcgccggaatgggcgaattgcaccttgaaattattgtggacagactcctccgtgaatttaaggtagaagcaaatgtaggtaagcctcaggtttcatataaagaaactattacaaagcctgctgatgtcgataacaagtacgctaagcagtccggaggacgcgggcagtacggtcatgttaagattaaggtttacccgagagagccgggtgcgggctttgaatttaagaattcaatcgtcggcggtgctattcctaaggaatacattccgaagattgaagaaggtgtaaaggaagctatgaacaacggtcctatcgccggctaccaggtagtcgatgtgggcgttgaactttacgacggatcgtatcacgaagtcgactcatcagaaatggcgtttaagatagctgcatcaatggcattcagagaagccgcgaagaaagcagcgccggttctgcttgaacctgtgttcaaggtagaagtaacagtgcctgaggagtatatgggcgacgtaatcggtgatatcagttcgagaagaggaagaattgaaggctcggatatgaatgcgggcgcagtagcagtaagagctatggtaccgctttcggagatgttcggatatgcaacagacctccgttcaaagacgcagggaagaggcgtatatgtaatgcagttcgaccattttgaaaagctgccggacagccttttagaaaaaatcaataaataaccgtttgaaaaaacaatagggaggataataaaatggcaaagcaaaagtttgaaagaaataagccgcatgtaaatatcggaaca

SEQ ID NO: 3381 - DNA, 6418 bp, Unknown
  16S sequences of unknown bacteria
ggggctgccgcaagccgcagagcaagctgatgagctgcgcccagccctttgtctacggtgaatacgagctggcggaggcaaaaggcagatggtacgtgaaaagctgccaagtccgcgaaattttttataatctccggatggatcctatgatcctgacggctgcggggcaggccgtgcgcgccgcccgtgaatttgccaacccggaggaggagaacgccaagctgtttacgctgctgctgctgacgctggcccgcctgtgtgaggcaaaggcggacccggtcgcggttctggcgttttatttggcaaagctgttggcgtttgctggcttttgcccggaaacggaggcatgcgtgtgctgcggggcggaggaggccctggattggtttgacggcgaatccggtggcgctgtatgccgccattgcgccaagcacctgcccaccgcaaagccgctgagcagcgcttgccggcgcatgctgggccgtatggcgcaggcgccgtccgcaggctatccggcgctgctgacgcagctgcagcctgtggcggaggaggcgtatgcgcatctattgcgttcgtatgccgccacagccgccaagcccctgccgcatctgcatacgttgatgccgtctgcctccgcgcagaaaggctcgctcgtttgactttgaaacgcaaagaggcgttttggatttatattttcttttttagaaaagggggcaaaggggatgaaacaatacgttttcacctttgaacaaggaaacgcgaacatgcgccagctgttgggcggcaaaggcgccaacctggccgaaatgaccggcctaggcctgcccgttccgccggggttcacgatttccacagaagcatgtaacaactattacgaaaacgacaagacgctggatgaagagatcacagcgcaggccatggcggccctggagggcctggagaaaaagacgggcaagggctttggcgatgcgaaaaacccgctgctggtgtcggtgcgttccggcgctgcggtctccatgccaggcatgatggataccgtgctcaacctgggcctgaccgacgaaacggcccgcggcatggcggaggccacgcaaaacccacgctttgcctacgattcctaccgccggttcatccagatgtttgccaacgtggtgatggagctggatatgacgccgtttgaggccgccttggaggccgccaaacaggcgcagggcgtaaagctggaccgcgacctgagcgccgaaagcctgatggaattggtcaaaacctatcagggcctgtatgaaaaggcgacgggcaagcccttcccgcaggacccgaaagagcagctggtccgcgccatcgaggcggtgttccgttcttggaatacgccgcgcgccaattattaccgccagctcaacgatatcccgtccaccctgggcacggcggtcaacgtgcagtccatggtctttggcaatatgggcgacgattgcggcaccggcgtggcctttacccgcagcccctctaccggggaaaataaattttacggcgaatatctgatgaatgcccagggcgaggatgtcgtggccggcatccgcaccccgcagcatatcgaccagctgaaaaacgatatgccggaagcgtacgaaacgctcatcggcatcgcgcaaaagctggaatcgcatttccatgatatgcaggatatcgaatttaccatcgagcgcggcaagctgtatatgctgcaaaccagaaacggcaagcgcaccatgcaggcggcgctgcaaatcgcggtggatatggtggaggaaggcaagatcggccgcgacgatgcgctcttgatgatcgacgccaagcagatcaacaccattttgcatcccacctttgatgaaaacgcgctaaagcaggcggcgcctgtggcggtcggcctgcccgcttcgccgggcgcagccaccgggcaggtatatttctctgccggggaagtggaaaaggcggccgccgacggccaggcctgcatccttgtgcgcacagagacttcgccggaggatatccagggcatgaacaaggccaagggcatccttaccgccagaggcgggatgaccagccacgccgccgtggtatgccgcggtatgggccgctgctgtgtggcgggctgcaacgatattttcgtcgatgaagaggaaggctttttccgtaccgaggagggccgtatcttcaagcgcggcgattggatctcgctggacggcaataccggccgcgtgtacggcgagcagctgcccaccgtgcccgccaagatcagcggcaattttgaaaccatcatgcaatgggcggacgattaccgtaccatgggcgtcagaaccaacgccgataccccgcgcgacgcccaggcggcccgtgatttcggcgccgagggcattggcctgtgccgtaccgagcacatgttctttgatgcagagcgcatcgcctccatgcggcgcatgattttggcggacaacgaacgccagcgcaaagcagcgctggaagagctgctgcccatgcaaaagcaggatttcaaggcgctgtataaggtcatgggcggccgcccggtcaccatccgcctgttggacccgccgctgcatgaatttatccccaaggaagaggaagaaatccgcgcgctggccgaatccatgggcgtaacgtttgaagagctcaacgataaggccatctccctgcacgagaccaaccccatgctggggcataggggctgccggctggcggtgacctatccggaaattgcgcgcatgcagaccacggccatcatggaagcggccatcgaggtatgcgaagaagagcgcgtgatgatccagccggaaatcatgatcccgctggtgggcgaggtcaaggagctggcgtttgtcaaaaagatcgtcaaggatacggcggaatcggttatcaaccgcatggtgcaccgcatcccgtacctcatcggtacgatgatggaaattccgcgcgcctgcctcacggcggacgagattgccaaggaagcggagttcttctccttcggcaccaacgacctttcgcagatgaccttcggcttctcccgcgacgacgcgggcaagttcctgccggattactttgaattcaagatctttgagcaggatccgtttgcctcggtggatgttaaaggcgttggcaagctcatgcagatggcggtgcagatgggccgcgaacagcgccccaacatcaagctgggcatctgcggcgagcagggcggcgatccaaagagcgtcgagttctgccataacatcgggttgacgtatgtttcctgctctccgttccgcgtgcccatagccaggctcgctgcggcgcaggctgccattcgccagaaacggttctaagcacatactgcaaaaagcacgcctttacggcgtgcttttttgattgacagcatacccaacgattgttatggtaaaagcagaattatgccgaataaaaacaataccaaacggcatgcggggggcatatgaaactaagagctatatgggtccttggatgtttggtggcttgcgcgctggcgctgatgggctgtgcaaagcccggcttggccggtacgagctggcaagcatccagggtggaattggacaccggcagctccgtaaaaggggaggatgcttttatcatctccggagacctatccctggcgtttttggatgaactacgctgtacacgcacagactggcggggaacggtagagggcgcctataccttagagggcgatacgctcaggctgacgctggacggcaatgttacggaatgcacctacaacggcaaggaaatcggcattggcccggataagatcggcctaacaacgtatctgacaagggtagataaataaatgcgaaagagcagttcatgagatgtgctctttttcattgacaaagcgcatacgattctttatgatgaatataaataaaatatgccgcaattttgacaaacacggcagaaaaagtatgcatttgtgttctatgcattttagagagaaaaatggtaaacgccgcttaaaagagcggattttcactgaaaaaagtgctgtatggaaatgcttattttttgcttcggcaaattaaaaaagggaggaaacttcaatgaaaaagaaactggctttgcttttgtcctgtatggtactgtgcgcgctggtactggttggctgcggtggcggcggaaacgcctatgccggcacgacctgggagctgacccgtgcagaggcttatggcgtaacgatggaaggagaaatgctggatagcacggtaggggaaatgaccatcaaattcgtagacaacagcaaaatggaaatcaatggtatgggcatgtccggagaagccacctatacgctggagggcgataagatcatggtaaccgagggttcccaaaccatggaatttaccgtggcaaatgacgagatctctgttgaagccagcggtgctacgatgtactttacaaagaaataatcataaggcgcccccgcaagggggcttttttattggcaaaagggcaggggttctatacaatgccaaatgacacatttttgacaaattaggggatgattgaattgaagaaaaaaggttgtttgctgttggcttgtttgttggttttggcgttggcgctggtaggctgcggcggagaagaaaaattggccggaaccaaatggaagctggtaaagtttgaatcgcagggcacgacaatggaaggcgatgcgctggcgtccatgggcgacctgggcatggagtttgtcgatgataccaccgtcaaaatgtctttgatgggcatgtccatagagggaacctatactgtggagggcaatacggtaaccatcgagtatttcgatcagccgattgcttttcagcgcaacggaaaccagctgtccgccgaatatgacggcgaagccatggtattggaaaaagaataaaaaaaggcccgtgcttacgggctcttttttatagcggaaatgtgcgtcagcttaaaagatcatcgatggatacgccgagcgcttcggataaaatgaccagctcaatatccgtgacaaaccgttcgccgttttcaatccgccggataaaatgattgtctacatcatatcccatagcctggatcttcgcggctaacttgtattgagacattttctttgccaaacgatattgttttacctttttgccagagatattgttgcggccgtctggggctttgattttgaacatgctatctcctaaaaatattgaatggtatttactatttccttcagtgtatgctaagataaggacgaatatgttatatactatttaacatctgtaaaggagatttgtctttatgaagccggattggagagaagaccaaatgtgtgatatcgcatttgatatgtttttggaagattctaaatacgatgaaacggaaaatgcgatctttacactgatgcataaggcctttttggaagggttcaaggcggggaagatggcgtccgaatcgatagaccgcatgtccatgtactataaaggtaggatcgacgccagaattgccaatgctggcttgcagagaaggcaaatggtcaaaataacatagattaagacagaaaaatacaacaaaaataaaaagcaggacggccgtcctgtttttttatgcctgaaaacgaaaaattatttggcctttagccacaaaaggtaatctacgcttaccccgtaaagctgcgcaagctgaatcaagaggggggccgtccattcgatcttgcccgtctcatattgcgaataggtattttgcgccatatgcagcttttgtgcaagctgagtttgagttagatgattctgctcacgcagagcacggatattttcgtaaatcatagtatcaccaagcaccagtatggttcatttttttcggtttggatagctattatcttgaatatagatagcaaaaaatagatggtaaatacaggaaaactattgatatttcagcacttcttccaggatttgtcaaaaacgccctgcattttcctaccccaaaaagcaaggaaccccgaaaatcaaaattttttgagtatagattggcctatggcagcgaaaaacgcatggcgaaagctgctgaaaaccgctttttgcaaaaagtcaagaattttttgatgcaatttttgaagaaaaaaagggattttcccttttatggagaaactattaaatacaaaaggatttggaggtggtacgctttgatttccattcgggagcaaaccgaggcggatcaggatatgatcctatccccctttgccacaagggccacgcagtccaaagggcgcaggcggccggaagcgccgtgccccatccgcacctgctttgccagggatcgggaccgcattctgcactccaattccttccgccgcctaaagcataagacacaggtttttattgcgcccagcggcgaccatttccgccag

SEQ ID NO: 3382 - DNA, 4715 bp, Unknown
  16S sequences of unknown bacteria
agatgacgctgtgctgttcgcgcggggagcgcaacagaaaattaatgggttcaatctccagaatcttgatgtagcggtcatctgtagtgtgcaggatgccgttctcgattttctcgattgggagcaaatcatagagcgtctgccgctttaccagctttccgtgacggtccgttttgcgatgcaagacctgtgcgttgtggggcacggcatccgaatcgtcatagtagataacacgataccgcttgctgataaagcgcaagtgccgatgccggttggcttcgagattgccctgcggtgtgggcgtgacgatgcggcggcgctttataaagcggaaccaatgcgccacaaactgcgtcaagctgtctccgccgataccgaccacaccaaaaacacctaacggcaccgacacagcaatgacgatcatcaggcggatgttgaacgccagcggcagataaaacagcggcactgcgctgcccacggcaagcacagccgcctccaccgcattgcgcagcttgactgtgccgccgagaatcgttccggtgtccacaaaattctgcgggatcaggtaaacatcccgttcttcgcgtgagatttcgaccacctccaaacaaaaagagcgccctcgaaaaaaggcgctcttgtgtttctgttcaattttgacgatactattatagcagagtcatattgcagcagaaaagacttttgctgtgcggatgttgtgctaatttactgcatttcggcagataaattttcaaatgcacatttgtggcatcaatgtagctacatggattgacaaccgaatgccgtgaacgtataatagagataagaaaactacggtacgaagggagtttatttatggaaaacattgtttcggcggccaaaacggatgtgtttcgcgttcgcatcaacccggaaatcaagcaggagcttgaatctgtgtacgctaagaacggtcttaccctgaccgatgctatcaacgtgtttttccagcagtcgctgaatgcaggcggctttccctttgctgtgaccgaggataatgcggagatcatcaaggcaaaggcgctttcccggctgacaaagcagttgcaggaagcgcaggatgacccggtttcttactccgaggatgaagtgtataagatgttcggagttgagaaatgagggtaagctataagagagccgccgtcaaggacatggaggcgacccgcgactacatcgccggacagctgaaaaatcccaaagccgccaaaaagctggtgacggcgctactgaaagcaatatccctgctggcggataacccttatatgggcgcggcactggcagaaaagcttgaaatcgccacagatgtgcgctattttgtggtgtcaaagcagctgattttctaccatgtggatgaagaaagcggcacgatagagattcttcgagtattggacggcaggacagattatttgtctgtattgttcggataaataaaaaataggagggctgctcctgcgtgttggcagaaacagccctctttgttttagtgcagatacccttttgggttgacgtagaccccatcgataataacacaaatatgcagatgatttccagtcacatcaccggtagcgccgacattggcaatagtgtcgtatttgttcactgtatcgccaatctgcgccaaaagctggctgcaatgggcataaagggtacagtatccgccgccgtggttgatgaccagataattgccgtaactaacgtggtaccccgctttaatgactgtgccggcctccaccgccagaattggtgtgccgtagggataggcgatatccaaaccattgtggttggtggtatccttgccgggaatgccgacatcttcgcgtttgccaaagaaagaagtaatgtgctgttcccagtttgggtcattgaatggattgccaaatccgccgccgggggcaggggaggtatcatcaataagagcatcgttgatttgtcccagaatcgagataccttcgcgttcttcaatttcgtggaggtagacggtcaggttatgcgcataggcatcggcatagcttttctgcttatcatcaagctgccagactgtgtcggcaaagtagtcatcgcccacataggaaagcgtgaaaacggtgtaggtgtgatcttcttggacggttatggtctgccctcgcacctctttctgcaccggttcggtgtggacttcctcggaagtggtgtaggtataatattctgactggtgcgcttgtacctgtgcggaaaggtcggccaggctgattttggtatagtcatcctctccttgataggcacaatacatggaaataagttgaaaagcattgtaggcgacatgaccgcccacggaatcgaccacatcgctgtaggtgaggcttgcacgctcggattctatttcggcaagagtatcctcgtaggctgcctgcaaaatatccgatactgcattgcgaagctgtatcacattggcagcaacttctaaatcatcattgaccgcagtgctgggctgtgtcagcgtaccgaaaattgcaccgggcagcataagcagaaccagaaccggcagcaacaagaatgcaatgacaacgaccagtacttccttgcgatactgcaccgcagcttcggcagcagccccagcggggccgccctgcactcccgcttgcgcgattttggcaagtttgggcgcattgtgaagtgccgttgaggctgcctgctgggaattttgagtatcattttcaatcatttagtgtctccgtgccggagcctttggcatggcggccaccttgcgctcatcatactgcatacgcccgcgttcatcctgaacggtgggcgttttttctacgcgagtcgtggcgtagaccttgtaccacttttctccatcgcgggaagtctgctcggtaaaatagccctccggcttttcgtactggcgggcattgtacatggcaaactgaatctgcccacgaccgggaataatctcgcgcccctgaatcttgccgccgccgatttctacatcggtgacactgttgcccatctgccccagcaacacgcgattcatggcggcctgttggatagaggacgaagtaggaatggtggtctgctctgtaacagccgaaccgccgccggcgcgcatggcaatttcactatcccttgtcggagaaacatcaaccgtgctatcgccctccaacgccagcggtgtggcagggataggggagtccgttacggcatcgctttcagctgttgccattgcagtgggaatattttcaccggtggcaggaatctgcatagcgtccatgtcgctggtacctgcaaaataaccattgagcgcttccacggcgctgtcacctgtaatgcagccgccggtttgcccggtggcgatggagccgatgaccttgctggcgaagccgccatctttgccaaggctattgtggtacatggcactacccaaggatgccccgataccgcctgactgcccactgatggaacttgcggtactttgctgcacatgacggctcaccatgccagaaagtccgcctgcaaaggtattgctgggcgtagcttttgcggtggcagttgaagcagtggcttttgcagcgcccagtcccataaaggctttgccgatttcaaagccgcggaaagccagcaatgcctcggatagcatcgatccgggcgagcgcgaaacgccgatgcccagcgagtgcaggatgccgtccagcttggtgctgaccttcagaaaggcaatggcgcacagtagccacagaaacagattgccggagacagcatccttcccctgtgcgtccacagccgcagcagcctcatcctcagtcaaagcaagagcggcgggacaatataggagtgcaaggctgacagtggtgaataaagaaaaaagagtttttttcacgtaaaaaatctcctataaggacagaggattagcgagaaattccccgaccatattgacgaacagcttcaagcaccatgcgttcataatcagcagcagaagctgcccgccgaacatccggcaccagcttttgaaaatgttgtttgtgccgcgcgccgcacccatggcaaaggcaagcggcgcagtaaagaccagaattcccagcacaacatatcgctcggcagcttccaaaagcagctttaagtaattccatgcaagaatcacaacaaggatcagagcaatcagcgctaatgagccgttggcaatcacgccaatgatgacgagcagtacggaattgaagtctccaaactgcacgccgggcaggctgctgtccagaatccagttgtagggcgtgccgccaatctgcaaggcgaggttgacgatgtcatcgcagtaccaaatcagcagcaggaaaatgacggaacgtactaccaaattgatggggttctcggtatcaatatcaaaccctgcaccatagcagcggtagagctgccacacaaggttcagcagcaccagaccgatagccgtccagatgaaaatctcgtacatggatgaagcggcagggaagtaccgcttgaacgtatccatgttgcagccaagtgctccgagtactgatgtggatgctaaatccagtaagttcatcacctgcgttgccagccaatcaacaatgccgtctaaaatgcccaaaggcaatcacctcctcgtattataaagtagtagttattaaattccctctccaaggacaaaatgctacaatagacaaggtgctgtggattggtttaaa

SEQ ID NO: 3383 - DNA, 32759 bp, Unknown
  16S sequences of unknown bacteria
cccttaaaggcctggaagaacagatgcagggaataatgaacggcgacggcgaggacggcgaaaacggatttgccaatatgttcggcggtcttatgggcaataacgcagaagatgacgaggacggcgactttgaacaggggggttcttctacaattccttttgccaaggacggcgaccaagaccaaagaaaagacaggaaaaaacgcaacaagcgcaaatttttggatcagtattgcgaaaatctcacacaaaaagcaagagacggcaagattgataatatcataggccgtgacagcgaaatttacagaactatacagattttaagccgcagacagaaaaacaacccatgtcttataggtgaggccggcgtaggtaaaactgccattgccgagggtatagctttgcgtataagcaagggagaagttccacggcgccttaaaaataaagaaatttatcttttgaatatgacaaaccttgttgcaggcacacagttcagaggtcagtttgaacggagagtaaaaagccttataagcgaggttaaggaaaacggcaatattattttgtttattgacgaaattcacactataaccggcgccggagattccgaaggtgcaatgaatgccggcaacatcttaaagccggctctttcaagaggtgaaattcaggttataggtgccacaacatttaacgaatacagaaagttcattgaaaaagacgccgcattggagcgccgtttccagccggtaaaggttgacgagccgtcaatcagcgacaccattgacgttataaacggcgtaaaacagtactacgaggcatatcaccatgttaaagtgccacggcaaatggtggatttaactgtccgtatgagcgaaaagtacatcactgacagatttttgccggataaggctatcgaccttttggatgaatcctgcgcctgctgctcactgcgccatacggagataaacaaatggcttgaaattaaggtaaaacaggaggagcttaacgccaaattagaggcattgcaaagcgaaaccgaagcacttgactacgaggccattgcacaggttaaacagcagttgtttgccgccgatgaggaggaaaaacagcttggggaacaggtggacaaaatcaatgtggaaattgatgatgttgcaaaggttattcagctttggacaggtatttctgcggtaaaggtaaaggaaagcgaatttaacaaggtggcaaaccttgaaaataacttaaaggcaaaaatcaaaggccaggacgaggcggttagccttgtggctaaggctattaagcgcaaccgtgccggaatttccggccgcaaccgcccggcaagctttttgtttgtgggtcctaccggcgtgggaaaaaccgagcttgtaaaacagcttgcaaacgaattgtttgacaccgccgaccctcttatcagatttgatatgtcggaatttatggagaaacacgcagtgtcacgccttatcggttcacctccgggatatgtaggctacgacgaggccggtcagcttacggaaaaagttcgccgcaagccatattccgttgttttgtttgatgagatagaaaaagcacaccctgatgttatgaatatccttttgcagattttggatgagggcagaattaacgattcacagggcagaaccgtaaactttgaaaacacggttatctgtatgacatcaaacgcaggctctaacgacaaggttaacgaaactggttttaacaagagccggggagatgtttcaaaggcaaagacaatgcgtgccttgaacaatttcctccgcccggaatttctggcaagaattgacgaggtggtaatctttaatccgctaagcgaggatactctcaacgatatagccgaccttatgctgacagaatatgttaagcctatggagcaaaagggcataacatttacatgggataagcgggttttgcctgttatcaccggcaaggctcaggggggcaagttcggcgcccgtgacattcgcagggttatacgcaaagaagttgaggataagatagccgaaattattgttgataaccgtgatgttaaatctgtttacgcctatgaggaaaacggagatataaaggttaaatttgaataaatctattgacaaaatcatagtatagatgtataatgatattcgtcgattgagttaatcggcgaatatatgcaggtgtagtttagtggtagaactccagccttccaagctggtcgtgtgggttcgattcccatcacctgctccaaagccaatccaaaagggttggctttttattttgcaataaatcggcaggtttgacaatacaccctcttgaatgatatatttaaaacaaaggtaacggaggaaaatataatgtcggtatatgtatctgtgtataaaagccattttggcaatcttacaatggcatccaggggagataagataatcggcctttggatggacgggcaaaaatattttttgggcaagttaaaagaagagactgttataaaagacgatttagaggtatttgccctgtgtcgccgttggcttgatgattatttttcagggaaaaacccgcctgttgataaggatattcttcggccggagggcagcgaatttcggcaaagtgtgtggaatatacttttagaaataccttatggcgcaaccacaacatacggggaaatcgcaaaaaaattggcaagagaaaaaaatgtaaaatccatgtctcggcaagcggtaggcggacgggtagggcataaccctatttcgattattattccctgtcaccgtgtggtggggcggaacggttctctcacaggctatgccggaggaatcgacaaaaaaataagccttttacagcacgaaaatgcagatatgagcaaattgtatcgcccggcaaaaagcaccgcaccataagaattttaaagataaaaaacacaagatccggttagcagaaaagggtcttgtgtttttattatcggaatgagccggtttacaaacgaaaagatataagcaaaatatttataaatctttcggtgggttactgcccacagatctttttaaaagaaaaacggcggaaattccgccgttttaattttactgttgagttttaaacaatttaccgattaaaggtgtaaaactctctctttaatttcctgggttctgccttcgttccagaagttttcgcctaaatagccgcaggttcttcttacaacattcatcttgtccctgtctctgttaccgcagttagggcaataccattgaagattgtcatcgcagaggatttcaccttcaaagccgcaaacctggcaatagtccagtttaaggtttacctcggcatactgtacgttgtcatacatatactgaataatttttacaagagcctcaacattgtgggacatatttggcaattcaatatagcttattgcaccgccggaggaaatccgatggaactgtgattcaaatttcaactttgtaaatgcgtcgataggctctgtaacatttacatggtaagagtttgtaaggtaatttctgtcggtaataccttcaatttcaccccaacgctgtcttgtaaggcgggcaaatctgtctgtaaggctttcacttggtgtgccgtaaagggcaaaaccaaggcctgtttcggctttccagttcagaacatgctgtttcaaattcttcataatcttaacagccagtttttcgccctcaggggttgtgtggctcttgccgataagcgccttaacacattcgtacaaaccgatatagcccagtgtgattgttgcatagccgtcctgcaaaaggggcttgataggctcgtgcttgccaagtcttgcaatagcgccgtactgccagtgaataggggaaacatcgcttgtaacgtctttgagtttgtcgtatcttaaaagcaaggcttccttgcaaagctgaagtctgtcctccaatattgtccagaagtggtcaaggttgccctgtgcggaaagtcccgcatctgcaaggtttatggatgtaacacccatattgaacctgccgtagagcttgtattgaccctcaacattatttataccgcccttataaggtgaaaggaaagctctgcatcccataggaggcaccacattgccctcgtagttttctttgagaatttttgcagacaaaaagtcaggcatcattctcttggaaacacacttagctgcaagttgtgtaagccagaagtatttgctatcctcgtgaatgttgttttcgtctgtaacatacaacaatttcggaaaagcaggtgttatccatgcacctacttcgtttttcataccctgaatacgctgtgtaagcatttcctttataagcataacggtttcttcttcatattccgggtattcgctgatatacataaataccgacaggaacggagcctgaccgttagatgtttgcaatgtgtttatctgatactggaatgtttgaatacctgcggtaacttcttcctgcaatttgcgccgaaccgcattttcaagctgttcgtcggtgtaagtaaagccgttggcatcccattccgcctttgtatcccttatgaatttatttttagaaattcttacaaatggtgcaagatgacccaatgtaatggtctgaccgccgaactgaccggaggcaacctgtgcgatgatctgtgtggcaatggtgcaggctgttctgaaagagtgtggcttttctaccaatttgccgttgataacggtgccgttctccaacatatccgcaagatttacaagttcgcagttaaaggacgggttgagatagtgtcccaggtcgtgaatgtaaatcaagccctcgttgtgtgcctgtgcaatgtgtgggggcaacatcatacgcagggaaatatcctttgaaacttcctcggcaaccaagtcacgcatggtggaaaccaaagcggagtctttgtttgagttgtcctttatgtctttgcctgtgccgtttacaatgcccaaaaccttgttgtcgatagtgttgtgctggcgctgatatgctcttaccgcacggtaatcctcgtaccgctttgcagtcatggcgtggccgtattttacaagtgaatcgtaaacatatttttctaccgttttaatgtcaacaatagggctgtcgctgcgaaattcaatgcttatcttatgtgccaaatcctggtcaactatgccgctgccgtatttcatggctttcataattgcccgttcgattttataggcatcccaagaagcttttgaaccgtctctttttataatagtaataggtgtcattttatctcctgccttatctgtgttcttatcccgtgactgccaaattgccattgcaatattgacaagtcaaccgctataactaatatatcttttgacagaaataattttaccactatatcttgtgttttacaaggaggaaaagtgcgatatattgttttaacccttatttctactttttgtacaaaaaaatatttttttcttgtttaaaaatagaattgattttaattttaattgtgatacaagaataaattaacatatccgtaacacaaaatatccgtaaatagggtatattatatataaatggtaggtaagatatatgagaaagaatattttgttaatttacaacccctcagcggggaaaaacggcgcaggcaagcttttgccgaaagccatacaaagtttgcggaactgcggttgcagggtgactgtttttcccgtaagcaaaaattacggcgccgaggatataataaaagatgaggcgttaaaggcggatatagtggtttgctgcggcggagacggcacaatgaaccacaccataaacggccttatggcccttgaaaagcgcccatatttgggatatataccggcaggcagtacaaatgactttgccgtttctgccgggatagaaaaagatgtgggtaaaaattgccgcaatattgcaggtaatcggccttttttctacgatataggtaagtttaataacctctattttaattatatagccgcatttggggcttttacacgggtttcttactccacccctcaaagcgaaaagaacgccctggggcatatggcgtatataatcgagggggttcgcaacctgccaatagggcagtatatagagcttgaatatacccatggcggaaaagagtattcgggcgaatatatttacggggcagtgtccaacaccaaaagcgtaggcggtatgaatttcagggtgttggaggacagcgatatggatgacggtctgtttgaggttattcttattaagcgccccaaaaatattttagatgtgcagaatattatttctgcccttattttggaaaactacaaaagcccatactttgaatatttcaaaaccaatgagattgagttccgctttaagcaagcaacctcctggaccctggacggagaatttggcggggaaacggacagagtgaatataaaagttaagaacaaagcgatagggcttttgaagtgatgtgtccaccacggaaatacaatttcacaaatagattgtagctcatagacacacaacagtacacaacagaaaaaccgcaactttggtaaaacggtgcaaaaccgccctttaaacagggcggtttttgctgtattgcacaaatgaattttgacaaaagcaaaattccacaaaattgcactgtacactttgcacaaaaagtaacggaacaagttgtgcatttttgccgctaaagaaattcacttgtgacagattgacgaaaaaaatgttgatttttttaaatttcaagctataatataaagcataaacccgatatgagtttacaaaacctattttatgaaaggagattcacagatgtttgcagacagagatttgtttttggacgttgttttaacagttaataacaacaatgaacagggcaataataatgccctgaactttgcgttgaataatactgaggaagaacgccagcctgaacaggctgaacaaaagcaaattgaatatgctgcggcgtagtgaattttatttaaaggcttgccgtaggcaggtactttaaggcataaatcgtgttgatatccaccatggtgctttaaggcgctgtggtggatttttgtttgtgtaaaaggccttatcacggacaaaaaggcgattgaaattccaccggtcgggaacaaattttactattgagaggatacacttatggatactaaaaaggataaacaaaagggcgtttacaggtttatcggcggcatcgaaaaagccgtaaacaaattgccaagtccgtttatgatgtttgtgggactgttttttatagttgcgattttatcgttctttatgagaaatgttgcggttatcaacccgtccacaaacgaacttgtacagataaacaacttcttttcaaaagaaggtttaacatggattttgacaacaatgacctcaaacttttccggctttgcctcactgggtcttgttttgacaatgacattgggcatcagcctttgtgagcaggtaggccttgttgacagtttgttgaaaaagtcaatgaggggtgttccggcttcggtaatgccgtatcttatcgccttgataggcacatgcggtaaccttgcttccgacacttgctcggttttagtaccgccccttgcggcaatcgcatttttgggcgtaggcagaagcccgatagcaggtatgctctgcggctggatttccgccaatgcaggcttttccgcaaaccttatgatcgccggtaccgactcccttttggcaggtatcacaaacacatcaattcaggttttgttgggtgcggacacaacatttaccgttgactccgcatgtaactggtactttatggcggcatctacaattttggttgcccttgtaataggttggtgtacaaaccacattatggaaccacatcttggaaaatacaccggagatgctgttgtttctaaggaacctcttacgaaaattcagagcaaggctcttaaaaacacaggtattgcggcacttgtttatatggcaatcatacttttgggtatattcacaagggttctctcaaacccggacggcagtatcgtaggttcactgttcttaaaaggccttattcctattattcttatgctctttatcgtgtgcggtgttgcatacggtattaccacaggctttattaagagtgagagagatgtttcaaaagcctttacaaaggctatgtcaaatatgggtgcatttgttgccttctgttttgcaggcggtcagtttacggcgttgttctcatggacaaaaatcggcacggtagttgccattgaaggcgcagagcttttgcagtcgataggtcttacaggcgttccgttcttcgtatgctttatcatactcacaatgcttatcaacttcctcatcggttcaggttccgcaaagtggactattctcggcccggtatttgtacctatgatgatgctcttgggctaccacccggcatttatacagcttctttacagagtaggcgattcacctacaaacgccatagcacctttgggcgcatatctttacatggctcttgccgttgtaaacgaaaagtacgacaaggatatgaagctgggaacatttattgcaaactgtattcctacaaccatgattttgcaggttatttggatattgttcaccattgcttggtacttaatcggcttgccgataggccctggcgtaacaagcgcattgccggcaggcattatctaaaatttacatatccgccccttttacagggcggatattttaaaaaagactttaaaaaccattgtaatatggtataataattataataacatttaatttatccgtaacggttcggaggctattatgaacaaggattatttaaaaattattgacgaaaaatcggataaactctttaaacttgcagacgacatctggcatgtgccggaaacctgctttacagagtttaaatccgcaaagtatctctgcgacgctttgagaagcgagggctttgatgtaaaggaaaatgtggctgacattaaaaccgcatttaccgcaacatacggtagcggaaaaccggtaatcggcattttgggagagtttgacgctttaagcggacttagccaaaaggcaggcagccggacaaaatgcccggtagaggaaggcggcaacggccacggctgcggacacaaccttttgggcaccgccggcgtaggcgcagttatcgcaatcaaaaattatcttgaaaaagagaaaaaatccggcactgtaatttacttcggctgccctgcggaagaaggcggttccggcaaggcctttatggcaagggacggcgtgtttgacggcttggatgtagctctcacatggcaccccggtgatgtaaacgaggttgcaacaggttcatctcttgcaaatgttcagctctattacaggtttaagggggttgcggctcatgcggcggcagttcctcatcttggcagaagcgccctcgacgcagttgaacttttgaatgtaggggtaaactttttgagagagcatgttatcccggagcggagaatgcactatgcaatcacaaacccggggggctattctcctaacgttgttcaggcaaatgcagaggttttgtatcttctccgtgcgccaaagaactcacaggttcaggaaattttaaagagggtaaacaaaattgcccagggcgctgcccttatgaccgaaacagaggttgaaatcgactttgtaaaggcttgctcaaacactgtgccgaactttgctttggaagatgttgtttacgaaaaaatgcaggaaatcggcgcacctaaatttacggcagaggaagaaaaatttgcaaaagaaattcaggcaaatattgaaaacctttcatataccgttgacgatattgccgctaaacttcccgcaagtcaaagggcggaaattttggcacacagagacgatcggttcttggacttcattatcccacatattcaggacgaggttgcaacaccgggttctaccgatgtaggggatgtaagctggtgctgcccgacggcacaggtacataccgcttgctgggcggcaaacacaccgggccactcatggcagcttgtaagccaggattctttaagccctgctcataaaggtatggcatacgcaagtaaggttatggccgccaccgcaatggagcttattgaaaagccggagcttattgaaaaggcaacggcagagtggaaagagagagtaggggacggatatgtttgccctataccaaaaggcgttgtgccaagatcaatcacacctaaaaaataaggcagttaccgcaagggcgaaaccggttggttttgcccctgcggctttgccatgaaagggactgttttaaatgaaaatttacaactacggaaatccggaaaaaaactcgctttttctcttgcccggttcctgtgctcacccggaaaattacttcggaggcataagggagtatcttgaaaaattttacaatgtttttcgggtgggatacaccggtttcaacaagacggaaaacgcggattttgtatccgttaccaatgaggcggaaaaaatagaaaactatgtaaaagacaatctggacggaaaaatccacggcattttagcctgcggagagggcgcaaaaattgccgccttgcttttggacaggggcaatataaaaatagaaaaatgtgtcctggacggccgggaaatggaatatgcagacggatttttcggcaaagtggcaatgaaaaaccaaataaaaagcacatataaacttttgcatgagggccagttgccgaaaaatttaaaaaactaccttttggacgataaaagcggatattataaaaaatacaccggccttatggggtacgaaagccataagaatatgagttttgttacggaaaaatccgttgaaaactttatcacctctgcaatgacggagaaaccgaaagaaaaaataatatccgaccgggacataagcataatctattacacaaaaatgggggaggttttaaaacagcgctacgagaaatttttccctacggcaaatgtaatggcctttgaatatgacgacgaggagcttttgtgtatgtatccgaagcctatgtctattgttttaaggcgctgcaccggggatttgtaattattatattgatatatatgtattataagcacattgctctctgacaaaagagcaatgtgtttttaaaatttagtttgccaatttgaccgacaagtggtataatcacttctgcactatattcggcatgaccgaaacagtagcaggaggaaatttaataatgaaaaaaactgacactaagcgtcttgtaatgaccgctttccttgttgtaatcgtagttgtattacagtacatgggaagttttattcacctgggtacattctcagtatctttggttcttgtacctatcgtaatcggtgccgccctttacggccccggctgcggcgcccttttgggctttgtattcggtgttgttgtgcttatatccggcgacgccgctcggttcttggttgtaaatgccataggcacagttataaccgtactggcaaaaggcactctttccggctttgccgcaggtttggtatttaaggcattgcagggaaaaaacgaaacagctgccgttgcacttgccgccatcacggcaccggttgtgaacacaggcatttttcttatcggttgcgttttgttcttccttgaaacaattaccatgtgggcagggggaacaaatgttggcgtttacatgataacaggctttgtaggccttaactttgtggttgaagttgccataaatatgattctcagcccggttattttaagattgcttaaactcagcaaacaattttaatatattggagtagtaaaatgttgcttgcaatagatgtttcaaattccgatatgacattcggcttttgcgaagatgccccgaaatttgacagcgtgtataaatttgcgatttatcccaatcaaacggaatatgactatgctttgaagataaaaagtatagttgacttaaaaaacatacaacccggcgaaataggcggggttgtaatatcctgtgttgtgccggagcaaatacgcccagtgagcaaggcggtggaaattgtaatcggcgttaaaccctatgttgtgggcgcaggcatcaaaaccggaatacatcttgatgtaggtgacccgggcactgttgccgcagacctggtggcctctgccgtgggggctaaaaatctttatccattgccctgtataatcgtggatatgggtaccgcaaccgccgttaccgttgtaaacggccggggcagatacataggcggaagcattatgccgggggttaagctggcattggacgctctttcaaaaaatgcggcgcttttgcctcatatagaattggcggctccgcaaaaggttatttccggcaataccgttgacagtatgaaatcaggcattatatacggctctgccggtcgggttgacggaataatagacaaatttaccgaggaattgggcagaaaggcaacaatagttgccacaggtgatgcggcacctgccgtaataccttattgcaagaataaaatcctgattgacgaaaccctgcacttaaaagggttgtactacatctataaaaggaataccgattaaaattagagagcaggccgaaagcctgctcttgtgttttatcccaaaatcttttttaagtcctcttccggggtgcttataggggttaaattgtaattttccgataagaattttaaaatatcaggagagataaatgccggtaaagacggacccaagaatatatttttaacgcccaaatacaaaagggtaagcagaatacaaaccgccttttgttcgtaccaacttaaaaccatggtaaggggcaattcgtttaccccgcagccgaaggcgtcggccagagccagagcaactgttatggcactgtatgcgtcattacactgccccatatccataatcctgggcaatccctcaatttcgcctaagtcaatatcgttaaaacggtattttccgcaggcaagggttaaaataatactgtctttcggggcgttttttacaaattccgtgtaatagtttctgcccggccgtgctccgtcgcagccgcccacaaggaagaagtgttttattttaccctgttttaccaagttcacaatttcatcgctgtgttccgatacaaagttccttgcaaagccggtgtaaaccgtatccccgccgttaatgccggtaaggcgcttatcctctttatagccgccaagctccaaagatttttctatgaccggggtgaaatccaaatccttgcctatatgcaccatgcccgggtaggacaccacctcggtggaataaattctgtcggcgtagttttcacgcaacggcataaggcagtttgttgtaaataccacaggtgcgggaatgtcaataaattctctttgctgggtgtaccaggcagtgccgaagttgccttttaaatggctgtattttttaagctccggatagccgtgggcaggcagcatttcgctgtgggtgtaaatatttatgcccttgccctgggtttgctttaaaatttgttcaagggcgtataaatcgtggccggaaaccacaataaacggccctttttcaatagtcatagtcacttttgtcggcacgggattaccgtaggtgcttgtattggctctgtctaaaagttccatacatttaaaattcacttggcctgtttttaaggccagcgacagcagtgtatcccgatgggtttcttcttttatggcttgcagtccctcaaaaaagaagtcatctacttctttgtcgttgtaacctaaaactgccgcatggtaggcataggcggccattccgcgcagacccaaaagaattaaactttttaaagagcggatgttatcctgcgcctgccaaagccgattaagattatagcaatcatcgctgcaaacatcggccttttctccggcaggttctatgcggtatctctcccgatttattttttggcacatttcttcaacggtttcggtattaaagtttacatttgtaacggtggcaaaaagcccctcttttacaagtcggtaagtttgccgggtaacatttgcctggttactttttgccgcccgggaaagttcaatcaaagcggcggtaagcttatcctgccgatttgcggtctgtgcgcttttgccgcacactccggcgttgcctgtacaggctctgccgcctgcggtttgttcacattgaaaacaaaacatctggttcatactaagtcctccctattcggatatattattgtccgagttttgcaaaatattaagtcgagtgtatcttttatgcggttattttgatataatattcttataaattaaaattcaggtagcatatatgacatttaaagaatttttaaaggaatacaatttaaagcttgacagccggcagcaaaaggcggcggagcaaacagagggcgccgttcttgttttggctgtgcccggcagcggcaaaaccacggttttggtaacccgtttagggtatatgataaaatgcaagggcataaacccggaaaatatcctaaccgttacatatacaaaggccgccacaggggatatgggcgaaaggttctattcatttttcgccggcagtattcccatgcctgttttcagaaccataaacagtctatgtgtttcggttataaagctttacgagcgtttaaaaggcacaacggcatttgatcttgtaaccgacgataaaatcacagggcttataatccgtgagggatacaaaaaatatatgaaagattttcccaccgaaggtgatataaaggacatacgcaccgcaatatcatatgttaaaaatatgatgttgaaagaggatgattttaccgacgatgatataggcgtaaagggttttaaaaaaatttacaagtattacaatgacaaactccgtgaaaaaagacttatggattatgacgaccaaatggtttacgcccacacaatacttgtaaagtatccctggatattaaaatttttcagcgataaatttaagtatatatgcgttgacgaggcacaggatacatcaaaaattcaacaccggataattaaacttttaaccgccaaaaacggaaatatttttatggttggggatgaggatcaaagtatttacggtttcagagccgcatacccggaagctcttgtgaactttgaaaaagagtataaaaatgccaaggttttgttgatggaaaaaaactatcgctcgtcacaggaaatagtaaaggttgccgacggggtaatacagaaaaataaagacagacaccctaaaaatatgcaggcggtaagcaaaaataagggaaaagtaaattttataaaaaccgccggaagtgcggcccaatatatggaacttttaaaaacagccaaaaaccacaaaggagaaactgcggtgcttttccgcaataacgaaagcgcaataccccttgtaaatcttttggaaaaggagaaaattcctttttcatacaggcagacagacggcgcatttttctcaaacagagttgtcacggatattttgaatataatcaaatttgcacaaaatccctccgatactgaactttttatgcagatttactataaaataaacagcattttaaaactgtccagagcagcggcggagggggcttgtgacgaggcgtccgccacgggaagaaccatacctcgggtgctttgcgcaaatccgttataccgcagaggcaaggacacggcaatttttgcaaatgttataaaaaatgtaaacacccgaaaaccggggcagtttatcgccgaagtttacaacacattgggctacggcgaatatatggaaaatatgcactacccggcgcaaaagataaacattcttatctcggtggcaacgcaggaaaagacaatgagagatttcctcttgcgaatgatagctttggaggatattgtccgcaatcggcagtacaacggtacggattttatactttccactgttcattcatctaagggcttggaatacgaaaccgtttaccttatggatattcaagacggaatattaccgtcggtaaatatgtttgatgaccccaaactgtatgaggaagaacgcaggttattttatgttgcaatgacaagagctaaaaaagaacttaatatatttgatttaaaccaaagcggcagagcaagttttacattggaggccgccggggttttaagcggcaaaggggaaacggttataaaaaatataccaaaggtgtatgacaggataaatcaccggcagtttggcgcaggtacggtaattgccgccgacggagattttatcaccgtgagttttgacggcggacggacaagaaaattcagctttaaagttctgcggggaaaagggcttttgctgatgaacaagtccgcaaaaaacggacaatagaaaacagcccagcaacaatgtaaaaattaagtaaaaaatattgacaatcgaaagttgccatgataaaattcaagcagatataggggagtaattccgcagatatgcgctttgcatatttgtgcgttaaatcaacaacgtgccgtattacggctggtttaactgtaaagaatgagacttgtacatagtgtaatgctgtgtataagtctcatttttattatatcaatttttgggaagaataaaggagcttttatgaaagaatatcttcaaagcaaagaatcggtaatgtcccggcagggggtgacctcttgtggtttgacttctgcccaggcggcctcacgacttgaaaaaaacggcaggaacaagcttgccgagggtaaaaaggacagcttaatcaagcgctttcttttacagcttgcagacccgatgattataattcttattgcggcggcatttatcagtgcttttaccgcagctttcggcggtgagagcgagggctatatggatgtaattatcattatgttcgttgtggttataaatgccgttttaggggtgtaccaggagagcaaggcggaaaaagccattgaggccttgcaggaaatagctgcatcaacttccaaagttataagagacggaagaactataaccgttaaaagcgaggaaatagtaaccggtgatatagtgattcttgaagccggggacaatgttccggcagattgcagaattacagagagcgcctcccttaaaatagaggaatccgctcttaccggggaatctgtgcctgtaaccaaaacagacgaggttttaaacttgcgggattccgatgatattcccctcggggacagaaaaaatatgtgctacatgggctcctctgtggcttacggcagaggaaaggcggttgttgtggcaaccggcatgaataccgaaatgggtaagattgccgacgcccttacaaaggccaaggaggagcaaactcctctgcaaataaagttaaatcagctgtcgaaaattctgtcgtttattgttctcggcatttgcgtatttatctttgtatttgacattgtccgtgcgttgattgcaggggacggcttgacattttcctcaacacttcaattctttatggttgcggtgtcccttgccgttgcggctattccggagggtcttgcggcggttgtaaccattgttctgtctatcggcgttaccaaaatgtcaaagcgcaatgcggttatccgcaaattgacggcagtggaaaccctcggctgtacgcagataatttgctcggataaaaccggcactttaacccagaacaaaatgacggttgtggagcacagaggcacagacgaaagacttttggcatctgccatggctctttgctgtgatgcggagcttttgccagacggcacagttaaaggcgagcctaccgaggctgctcttgtggcttatgcaaactccttgggaattaaaaaatacgaccttgaaaaggaatttccccgtgttggcgaggtgccgtttgactcgggaagaaagatgatgtcaacggttcacaaaacccccgatggatttgtggggtacacaaagggtgcgccggatgttgtgctctccctttgcacaatggcatatatggacggcaaaacagtgcctatgacagacgaaatccgcaatgagattatcgcatcaaacaaagaaatggcagacaaagctctccgtgttctgtgtgcggctatgaacaactacgaaaaacagcccgagaacgatgccgcagttcttgaaaataacctttgttatatcggccttacgggtatgattgacccggtgcgcccggaagttgtagacgccataaaggagtgcaagggtgcgggaatacgccctatcatgatcaccggcgaccacaaggataccgctgttgccattgccaagcagctgggtattatcgacgaaaaacacaaggccataacaggtgccgaactgaacaaaataagtgatgaggaacttgaccgcagtatagaggactattcggtttacgcccgtgttcagccggagcacaaggttagaattgttcaggcatggaagaaaaaaggcaagattaccgcaatgacgggagacggcgtaaacgacgctccgtcaattaaaaatgcggacatcggcgtgggtatgggaattaccggcaccgatgtaacaaagaatgttgccgatatggttttggcagacgataattttgccacaatagtttccgccgttgaagagggcagaaagatttacgataatatccgcaatgcaattcagcttcttctttcttcaaacctgtcggaggttctgtcaatattctttgccaccatgctgggctttaccttgtttgaacctgtgcatcttttgtggattaaccttataaccgactgtttccccgcacttgcacttgggcttgaaaagggagatccggagattatgaagcgcaagccccgtgattccaaggagggaatattcgcaggcggaatggcagttgactgcgcttaccagggtgttatggttaccgtgcttacccttgtggcatacgctttgggtattatgatggcaaatggttcggcgatgccgttaagggaggtatttgccataaatgacatgactgcgcctctgttgcacaaaaacggtatgacaatggcatttttaaccctttccatggcggaaatattccactctttcaatatgcgttcacgcagacagtccattgcaaaaatgggaagtataaattggtatttactgggggctatggctctttcactggtgctttccacagctgtaatttatattcctttcctggcaaaggcctttgattttgcgcctattgacgcaagggaatactttacggctttggctcttgccttccttgtaattcctattgtagaaatcgtgaaatatattcagcgcaaaacagacaaataaaatacgcccggctttacagaggataatctgtggccgggcattttttatatttacatataaagagagccgacgggtagccgccggctctcgattttttgacaggataacaatccaatgtcaaaaattattttaatttaatcagcatttggcaactgtgaatgtaacttcttcgccgtttacatcccactgttttgtatagccttcgccggcggtgttttcaacagaaaccgcaagggtgttctttttgatttcatcccggttatttgccgcaatttcagccactttatcgttgcctgtgatgtaaaccttgatgttatccgtaacattaaagtctgcttcttttctcattgtctgcaacttggagatgatttcacggacaaagccctcctccaaaagctcaggtgtgatgtgagtgtcaagtgcaactataatgttgttgtcgcttacgctttcaaaaccttcggtctgctttgtttctataagcaaatcttcggctgcaagctgaatatcccctgttgaaacggtgattgtaacataaccgtctgtgtcaagttctttcttggcctttgcgccgtcaaggtttgcaagggcgtttcttatctcgccgataagcttgccgtatttcggacccaaagttttaagctgcggcttgaatgtgtagctgatgtagccggaggcatcgtcgatttcgtcaacttctttaacattcaactcgtctgcaagaatagccttgtagtaatcgttgagaggtctttcggccttgatgtagagctttgaaagaggctgacggtttttgatgttggcggcatttcttgcgcttcttgccaatgtggaggcttcaagaacaagctgcatatcgctttcaaggtccttgtcaatcatcttatcgtcccgaacagggaagtcgcaaaggtgaatgctctccggagctgtcgggtcatttgttctcacaaggttctgatagatttcctctgtcataaacggaatcataggtgcgcaaatcttacagaatgtaacaagaacagtgtgcaaggtcatataggcgtttatcttgtcctgttccatgcctttctgccagaatctttcacggctgcggcgaacataccagttggacaaatcgtcaacaaattcttgcaatgtcttgctggcttcggtgatttcgtaatttgaaagctgtttgtcaacaactttgattgtagtgttaagtctggacaaaatccatttgtccataacgctgagtttatcgtattcaagggtgtactttgtgtggtcaaagccgtcgatgtccgcatagagaacaaagaaagcgtaaacattccaaagtgtgccgaggaattttctctgatattcaacaaccgctttatcgtggaaacggttaggaagccacggtgcgctgttggcgtagaagtaccagcgaatggcgtcggccccaagtttattgagagcgtcaaatgggtcaacggcgttgccctttgatttactcattttttggccgtccgcatcctgtacatgacccaaaacgataacattttcaaaaggtgctttgttgaacaacagtgttgatatggcaagaagtgaatagaaccaacctcttgtctggtcaacggcctcgctgatgaattttgcagggaactgtctttcaaaaacatccttgttttcaaatgggtagtggtgctgtgcgaaaggcattgaaccggagtcaaaccagcagtcgataacttccggcacacggtgcatctgcttgccgcagtgaggacaggtgattgtaacattgtcgatatacgggcggtgaagttcgatgtcgtccgggcagttagggctcatctttttgagttcttcgatgctgcctacggagtatttttcaccgcattcgcattcccaaatgttaagaggagtaccccaatatctgtttctggaaatgccccaatcctgtacatttgcaatccaagagccgaaacggcctgtgcctatcgtaggaggaatccagttgattgtattattgttttttacaaggtcgtcacgaaccgccgtcatcttgataaaccaagattctcttgcatagtagataaggggtgtgtcacagcgccagcagtgcgggtagctgtgctcaaatttaggggcggcaaaaagtgcgccggattctttcaagtctttcaaaacctcagggtcggcgtctttaacaaacataccttcccatttggtttcttttgtcatttgacccttgctgtctacaagttgaataagaggcaggttgtactgtctgcctacattggcgtcgtcctcgccgaatgccggtgcaatgtgaacgatacctgtgccgtcttctgcggttacatagtttgcgcatgttacaaaccagcacttttctcttggggttacaaagttccaaagaggcacatactctctcatttcaagagccttgcctttcatttcttccaaaacttcgtatttgccctcacctaaaagcttgtctgccaaagcctttgcaaggtagtatgtgtaaccgtcctctgcctttgctttgatgtagtcaagctccggatttacgcaaagtgcggtatttgacggcaatgtccaaggggtagtagtccatgcaagatagtaggcgtcttcgtcctttgccttaaatcttacaatggcagagcgctcttttattgtcttatagccctgggcaacttcgtggctggaaagaggtgtgccgcatcttgggcagtaaggcacaaccttaaagcctttgtagagcaagccttttttccaaatttcttttaaagcccaccattcgctttcgatatatgagttttcataagttacataggggtgttccatatccgcccagaaacctacggtgccggagaaatcctcccacatgcccttgtattcccatacgctctgtttgcagagctttatgaacggctcaacgccgtaagcctcgatttgatctttgccgttgatgcctatcttcttttcaacttcaagttcaacaggcaagccgtgggtatcccaaccggcttttctcggaacatattcccctttcattgtgtggtagcggggaatcatatccttgataacacgggtcaaaacatggcctatgtggggtttgccgtttgccgtaggcgggccgtcgtagaatgtgtaagtaggaccttcttttgtgcgttccatggatttttcaaagatgttgttttctttccagaaattttcaacctctttttctctggctacaaaattaaggtcagtcggtacttttttgtacattttatatcctcctttttgttgtataggaaacaaaaaagcccctatcctgccataaacaggacaagggcgtaaatttagcctttgttcaaccacctattacaacatacttatatatgtctttcttttaacggggaaattccggagaagcttaatagttgccgttgggctttcggctcaaaagtgatattcaccgtagggatacttttatgcggcttccaccttgcccgcactctctttaaatttttcacaaacggttactgtctttgtcacagcctttaatgattttaaattgatttattcaattccgtaattagaatataacatttagccggaattgtcaagggataaaagggcttttctgttgcaatatttccgccgagattgtaaaatgattgtaagaaataaatggaggattttattatggcaaaaagacctaaaataaagataaccttgattgaccgccgtgggccggtaggctgccacagaggccaccgtgtaggtgacagtttcgattttgacaccgaaaggggaaagatctgccccatggccatgcatgttgcctttttgtatgtggatattttgcgatacggcggacagatacccggtaatgagccgggaactgcggtttttgcctgcccggacgcagatacccttaatatttggaaagcggagattgtcaccgagtagacttggggtaaaaagaatttaaacctgaaataaatttgtatttcatcaaatcggtattattctattttgtcgtattccggggttttgtcggcggtgagaaatttttttaccttttgccgaatttcggcggttttcagctttacacggtattttttgttttgagttattgtgttttcgctgtcgttgttgtactctaccgtgccgtcggtgtggatttgggggtatatcagcgtccaccagtttttgccctcgccctcacccaaatataccacaagggcggtgtatctgccggcaggcagggcaaggctttctttttccgaaagaggaaaatcgaattcttctattttacacctggcggcatagccggccttttgggcttttaagctgtcatttgcggcttttgttatttttggcaggtttgccgttacagccttaacagcatcggctttatcggttgcgttttggcaaatttcggctgttatgccggatacggcgtaatacacatcggttttaatttccttgtcagaccggctgccgctgttggctataacatgcaggcgcagtgtgtcgttttgcactgcttttgcggtttttaccgcatcggcggaaagtgttaaaataaggcacagggtaagcccgcctaaaaggcaaatatcgttctttttcatttttttggtgtcctctcaaattatactgccttgattgttggcaaatttttcaaaaaaatacaagcgaaagaaaaatgccatataaaccgaaaaatttttttaaaatacggtttttatgcgaaaaatttgcctgccggtattgacattgccgccggtaagtggtataattcacaaagcaatgaagtggcgcacagctcaccttgctctgcaataaggcggacgggtcaatattcaaacggtactttttcctgtaccgggtttgttggcgcgggctgtatgttcgtgcttttattttgcttaaaaaacggaggtgctttatcattagtacaaaaaaagaacttgaaatcaatgaggaaatcagagacaaagaagtcagagtaatcggtgcaaacggcgaacagttgggcgttatgagcccggataaagccttggcacttgccgaacaggctaatttggaccttattaaaattgccccaaatgcacagccgccggtatgtcgcatcttggactacggcaaataccgctttgaacagcggaagaaagaaaaagagaacagaaaaaaccaaaaggttgttgaaaccaaagaggttagactttcccttaacatcgacaccaatgactttaatactaaggttaatcaggcaaacaagttcattaaaaacggtgataaagtcaaggcaagtatccgcttccgtggccgtgaaatggctcacacaaagcggggtatggatgttatgacacgcttcggtgaagcgattgaaggcggagttattgaaaaagcggcaaagctggaaggcagaagcatgcaaatggttatcgccccggcacccaaaaaataaaacaggaggattatatccatgaaaaagtacaagattaaaactaactcaggtgcaaagaagagattcagagttacaaagaacggaaaaatcaaaagaggcaaggcattcagaagccatatcttgacaaagatgtcaactaagagaaagagaaacctcagaaaaggcggctacactgataagactaacacagcaacaatcaagaagttgttgccttacaaataatttttctggaattagattgatattaaaggagattaaatagaatggctcgtattaaaggcgcgatgatgactcgcaaaagaagaaataaaatgttgaaaatggctaagggctactacggtgctaagagcaagcactttaagatggctaagcagcaggttatgaaaagcggtaattacgctttcgccggcagaaaacttaaaaagagagattacagaagactttggatttcaagaatctctgctgctgttaaacctttcggcatgaactattcaacatttatgaacggtttgaagaaggctaacatcacactcaacagaaagatgatttccgaaatggctatcaacgacgcagcagcatttgcagcattggttgaagcagcaaagaaagctctttaatttaaaaatgtttatgcgccttagcacttttcggtgttagggcgcaagtttttaaaagggtatttgacaacaaagagtttgtggtataatatgtatttgtagtaatataataaatttgaaattccgtaaaataaacacattgaggtgttaccatacaaccatctctttgaattttacacacattactgctttgggcaaaattttttacggatgtaaaagattttgccgggcgcagaaaggctcggttatggtaaattatattgaaagtaaagacaatcccaaaatcaaaaatgctcttaaaatagcgacagacgcttctttcagaaaaaagaacggcatgttttttgcctcctcctcaaaggcggtgggagatattgcccgggcgggttttgaacctgttgcgctgtttttgacaggggaagaatatgaaaggcaaggggaaaagttcgccgcttatccggtttatgttatctcctcttcggtttgtgaaaaactcagagagggcaagacggaggacggcgtttttggcgtgtttaaaatgaagcccggggacacggataaaattttgtccggtgataaattgcttgttttgcaagatgtgcaagaccccggcaatatgggggccataatgcgcactgccttggcttttgggtttaaaaatgccgttgttacaaccggttgtgccgatgtgtactcccgcaaggtaatacgctcttctatgaccgcttgcgttaaaatgaacatatacaaaaccgacgacttactgcggtttacaaaaaagcttaacgaaaaaggtttttgtactgtggcatcctgccttgaaggagcacaggagctgggaaatgcaaaaataaaaagaccggttgcgctgtatataggcaacgagggcaacggattgccgaaagagataatcaatcggtgcgccgtaagggtaaaaatacccatgagcgaagagattgaatctttaaatgcggctgtcagtgccgccgttcttatgtgggagctgggaagatgttagacttgtacgatgtttggtttaccttggcaataggcaccggctgttcaaatcgggaagtaattgcacacagtaaaatgtccccaaaagatatttacgaaaaccgcaaaaatttgagcagtgaattttttaccaaaaagcagattgaaaaggcagccaaaaccgatatggacattgcctacgaaccctataacatatatttaaaaaacagcgtaaacagcataaactacaccgatgaattatttccgagaagatttgaggaaattgagaacaggcctttggttttatattacaagggcgaccgggggcttttaaatccggcgcataccctgggcattgtgggttcaaggagatgcagcggagacggagagcaaagctgtattgaaatttccggcaatttggcggaaaacggggtagtaattgtaagcggtttggcacagggaatagattatcttgcacacaaagccgccacagacaacgggaaaaagacggttgcctttataggaacggatttgacttcttattttcccaagcaacaccgggaatatcaggattatttgtgtcaaacaaatttagtaatcaccgagtatgtacccggctcaagatattacgatacaaattttataaacagaaacaggcttatagccggtatgtccgacgccttgtgcgttatccaggccacaaatcgcagcggaagcctttcaacggtaaacagggcccttaaatacggcagacctgtttttgcggtgccgggtggggtttattcggagtcttatgcaggttcaaacggtcttttatatgacggcaaggcctttgccactaaggacggggcgaatattttgcctcacttgggaatagtgcctggagagaaaaagagcaaagcaaaggcagatatagacgaaaatcggcttttcggcgatgctttggcggtgtacaaagccattgacggggctgtgttccccaaccggataataaggcaaaccgggttgcctgcggcggcggtaaaccgggttttaaccgaacttgaaatagatgactatattaaaaaaacaaccaccggcgaatatataaaaaacaaataattttcatatatataaccttacaaggagaaagaaatgtcaaaattagttattgtggaatcccctgcaaaggcgaaaacaataaaaaaatatttgggcgacggctatcaggttatagcctctatgggccatgtccgtgacctgccgaaatcccaaataggtattgatatagacaatgattttaagcccagatatataaacataccgggcaaatcaaagttgataagagaacttaaagaccttagccggaacagcgaaacagtttatctggcaaccgacccggaccgtgagggagaggctatatcatggcatttggcgcatattttaaaacttgacaccacggaacaaaacagggttacattcggcgaaatcacaaaaaaaggcattaccgaaggtatggccaacaagcgcaccattgatatggatttgataaacgcccagcagacaaggcgagttcttgacagaatagtcggctacaaattgtctccttttttgtggaaaaccgttaaaagcggtctttccgccggcagggtgcaatctgttgcggtaaaacttatagttgaccgccacagagaaatagagagatttgtgccccgggagtactggaatattgacgccaatctctcaccggcagggtcaaataaaaaattcaaagccagataccatggcacagacggcaagaagaacaccgttacaaacgaggccgacgctttgagaataaaagaggaaagcgaggcacggccttttgaaatcgcaaaggtgacaaaaggcgagagaaagcgtgtgccggcaccgccttttatcacatcttccttgcaacaggaggccagccgccgtttgggctttacggcacagcgcaccatgcgtgccgcccagacattgtatgagggcgttgaaatacagggttacggcacattgggtcttataacctacatgagaaccgattcattgagaataagtgacgaggcatattttgccgccaaggattttatagctgaaaaatacggcgaaaaatacgtgcccccatacagaagaaactttaagacaaagcggaacgcacaggacgcccacgaggccataagacctaccaatataaatatcacacctcggattgcctacggttcaatccagggggatattgctaagctttacaagttgatttgggagagatttaccgcttcacaaatggcggactgtatacaggaaacagtaagtgcggatataaaatccggcagacatctgtataaggccagcggctttactgtgctttttgacggttttacggctctttacgaggagcagaccgatgaaaagaaggaaaaggaaaccgctttaccgcctatggacaacaacaccaagttgaaattgcgtgaaattgagacggagcaaaagtttacactgccgccgtcggagtacaccgaggcaactcttattaaagccttggaggaaaacggcgtgggcaggccgtcaacttatgcgccgatcatctcaacgattatcgacagagcctatgtggagagagacggcaaaaaattagtccccacaccgctgggtataacgataaacgatattttggaagataaattttccgatattgtaaatgttaaattctctgccgaaatggaaaatgacttggataaaatcgaggccggccagcgggattggctgcgggttttgcatcaattttacgacacattccgggctgatttgaaaaaagccgaagaagaaaccgaaggacaaaaaataaaagttcccgaagaatttaccggggaaaattgccccgaatgcggcaagcccttggtttataaaacaggtaagtttggtaaatttattgcttgcagcggttttccggattgcaaatacacacggaaaattatagtgtatgccccgggcaaatgcccaaagtgcggcggcagaattttaaagttgaacagcaagagaggcagaacattctacgcttgtgaaaacggaccgaaatgtgattttatgagctgggaagtacctaccgagcaggtttgtcctgtatgcggcagcactatgtttaagaaaaatggcaaaaatgcacagccacactgtataaaagagggttgccccaactgtacggctgtgccggtgagaacaaagaaatccgataaagaacggcggaacggccgggaggaaaaacggtgacaaaagaagttaaaattataggggcagggcttgccggttgcgaggccgcttggtttttggctaacagaggggtaaaggtacacctttacgagcaaaagccggttaaattttcccctgcacataaaagtgaaaattttgcggaacttgtgtgctccaacagtttaaaaagcttgcgcccggattcaagccagggaatgttaaaggcggaaatggaacacttcggctcacttgtttacgaaagcgctcttaaatgcagtgttcctgcagggggtgctttggcagttgaccgtgatattttcagcgacattattacacaaaaagttaaaaatcatctaaatattacaataagttatgaagaagtgacggaaattgacaccgatgagctgactgttatagccagtggaccccttacttccggctctttgtatgaaaacattaaaagaatttgcggcgagggaatgtcattttacgacgccgcagcacctattgtaatggcggacagcatcgacatgaacaaggtttttgccgcatcaagatatgacaagggtgacgatgattatttaaactgcccattcaacaaagaggaatacgaggctttttaccaggctttggtgagggcggaaagggcggaacttcactcttttgaccgggacataaatgtttatgagggctgtatgcctattgagattatggcaagacgcggggcggatacagtgcgcttcggccctatgaaaccggtgggattaagagacccccgcacaggtcatcgcccgtgggcaaatgtacagcttaggtgcgaaaatgccgaaaagacaatgtataacattgtgggatttcaaacaaatttgaaattcggcgagcagaaaagggttttcggtatgattcccggccttgaaaatgcggtttttgcaagatacggcgttatgcaccgcaacagttttataaattcacctaaggtattaaataatacattaaatcttaaacagtacccgaatatctactttgcagggcaaataaccggcatggagggatatatggaaagcagtatgtgcggcctgttggcaggttactttgtctggtgcaaattgcaggataaaacccctcaaataccggataaaaccactctttgcggggcacttttggactatattacaacggagaacaaggactttcagcctatgggggcgaatatgggtatcctgacacctattgagccgcacattagggacaagagagaaagataccgggctttggcggaaagaggcaaggctcacatagataccatagaggtataaggaggcgtaaatatgaaaattattcttgacgcattcggcggcgacaatgccccggcagaggctttaaaaggccggagcatggcggtaaaagaacttggcgttacggttttggcggtaggcgacatcgaaaaaatgcaggaatgttgtaaagccgaaaacattgacacagacggaatagaatttaaacaggcagacggtgtgtttgatatgcaccgagagcctatggatatagtaaaaaaggcaaaggatacatctttgtatgtggcttttaaagctctttccgacggagagggtgacgcccttgtttctgccggcagtacaggcgcaattttaatgggtgccacatttataacaaagagaataagaggctgtaaaagaccggctttgggctttgttttgccgggagagagcaaaagcggttttttgcttatggactgcggtgcaaacagtgaagttaaaccggagatgttaaatcaatttgccacaatcggttctatctatatgtcaaaggtggccggggtggcaaacccaagagttgcccttttaaacaacggcgcagaggacacaaaaggcacacccgtacatgttgaagcctataaattgcttaaagaaaacaaggacattaactttgtgggcaatatcgagggcagatatatgatgaataacatagctgatgttgttgtggccgacggtttttccggcaatgttgcccttaaaaccaccgagggaaccgcaagttttatgaacaaacagcttaaagctatgtttaaggcgaatattttgacgaaatttgccgccttgcttatgatgaagcagataaacggactgcgtgcaaaaatggattacaccgaatacggcggcgcacctgttttgggtgttacaaaaggcgttataaaggcacacggttcaagcgatgcaaaggcatttaaaaatgctatcagacaggctaaaatatatacggataacaatgtttcggcgattattgccgaaaacctgaccaccggcgtggaagcggaggattgaaatggtagagtttgaaaaaaatatacattatacatttaatgataaagagcttttaagaacagcccttacgcactcctcttacgcaaatgagaaaaagggcaaaattcggtttaacgaaagacttgaatttttgggcgatgcagttttgcagcttataacaagcgaaaagctgtttaaggaaaacccaaatatgccggagggcaaaatgagcaaacagcgtgccgcccttgtatgtgaggacgccttggcaggttatgcccacgagataaatttgggggattatttgaaccttggcaaaggtgaggagacaacgggaggcagaaagcgcctgtctatactctccgacgcattcgaggccgtaataggcgccatcttccttgacggcggcatggaaccggcaaagaaatttgttcttcattttgtcgatgcggcgcacctttctttgcaggattacaaaactcttttgcaggaaatcattcagcaaaatcccggtgaaaaattaagctatgtggttacggaggaaagcggaccggatcacgacaagcaatttacaatggaagtgcaccttaacagcaatgttataggcaaaggcacaggcaaaagcaaaaagcacgccgagcaggcagccgcaaaagaggctcttgctcttatgggctataaagacaatatatgaaattaaattttattgccgttaccggtaaaagtgagtatctgcctgttttgcaaaaacagatggaggaaaattttcccaagagcgagagcatgccggttaaatttatggctaaaagtaaa

SEQ ID NO: 3384 - DNA, 11188 bp, Unknown
  16S sequences of unknown bacteria
gtgatatccttatttataggctggtatataatcttgttgagaatgctataaaatataatcatttgggcggacaggttacagtgactgcatatcagaaggaaaaacaggtttacctgtcagtagcggatactggaagcggaattcctgaggaactaagagagcgtgtgtttgaaccattcttccgtgtggacaagtccagaagccgggagcttggcggtgtaggacttggacttgccctggttcgtgaaatcgtgcgagtacatgatggcagtattacagttaagtccaatccgtccggagggacgatttttgaggtgctattcactcagtgagcctgtaagcagcgaaacagattgcgaatatctgcccgacccgaatcaggcaagacctctgcaggcagacaacaattgagagaatgaaataagacaatcagaaaaacgggtcatataataagtaaattgtaccatagactaccttaaaatttgtcaagacgcagggcaaaaatcagagatagaattttacacatggaaatgaagtgcgttttgtaggcatttcacaaatccgaaatacccccttcctttttacaggtaagtgtagtatcatagctcttgcggacactgaatatagtgttttgcaaatgaataacaactatatattgtatatatattaagacaaattcagacaatgaggacagtaaagggagaggaagacgtcatggagaacacaatcaaaacccgcgtaatcaaacgaaatggtgaggaggtaagctttgacctgactaaaattgtgaatgcgattcgcaaggcaaatcaggaggtggatcagcttcatcggatgaatgaatatcagattattgcgattgctgagaagattgctcagcaggcggagagcgcgatgcatgccgttaacgtcgaggatattcaggacatggtcgagactggcattatggagatgcgcggctatgaggttgcgcagaagtatgtgcgttaccgctacaaacgtgagctgaccagaaagtcaaatacgactgacaatgggattttggctctgattgaccatctgaacgaggaagtaaaacaggagaattccaataaaaatccggtgatcaattctacgcagcgtgactatatggcaggcgaggtcagcaaggatcttgcacgccgtgtgctgctgccggaagagatcatccgcgcccatgaggagggaatcattcacttccatgacatggactattatgcccaaaaagagcataattgcgacctgattgacctggaagatatgcttcagaacgggacagtcatcagcgagacgatgattgagaagccgcacagctttttcactgcctgtaatgtgacgacacagattgttgcacaggtggcctccaatcagtacggcgggcagtcttttacactttctcatctggcaccgtttgtggatgtgagccggaaaaagctgcgcaacagtgtcattgaagaaagaaaggaagccggcgaaccgttggacgatgcggtgatcgacaagatcacagagcatcggttaaaagaggaaattaagaacggaatccagacaatccagtatcagctgattaccctaatgacctgtaacggacaggcaccgtttgtgaccgtgtttatgtatctggacgaggttccgaagggacggacgcaggatgatctggcgatgatcattcaggaggtgcttcgccagagaatgcagggtgttaaaaatgaaaaaggcgtgtggatcaccccggcttttccgaagctgatctatgtgctggacgaggataatatcactgaggattccaaatactggtatttgacggagctggcggcgaagtgtacagcgaagagaatggtcccggattatatttcggccaagatcatgcgagagctgaaaaagggcgaggtctatccgtgcatgggttgccgttcgttcctgactgtagaagactctcagatgaagccggacggatctcacaaattttatgggcggttcaatcagggagtagtcacgatcaatctggtcgatgtggcctgttccgctgagggtgatatggagaaattctggaaaattctggatgagcgtctggaactctgtcatcgcggtctgcgctgccggcatgagcggctgctcggcacgatttcggatgtggcaccgatcctctggcagaatggtgcgctggcacgtctgaagaagggagagaagattgataagctgctgtacaatggctattccaccatctctcttggatatgccggactttatgaaatgtgtgtgcggatgaccgggaagtcccatacagatccggaggcgaggccgtttgcccttgcagttatgcagcatttaaatgataaatgtgcagagtggagggctgcggagaatattagttattccgtctatggcactccgatggagtctacgacctatcggtttgcaaaatgcctgcagcgccgctttggtatcattaagggcgtaacggataagaactacattacaaatagctatcacgtacatgtgacagaagagattgatgcgttcagcaagctgaagtttgagtcggacttccagaagctgtctccgggtggggcagtaagctatgtagaggtgccgaatatgcagaataatattccggcggtactctcagtcatgaaatttatctatgaaaatatcatgtatgcggagctgaatacaaagagtgattactgcgaggcctgcggctacgacggtgagattaagattgtcgaagatgagagcggaaagctcgtatgggaatgcccaaactgtggcaaccgtgaccagaaccgtctctctgttgcgcggcggacctgtggttacatcggtacacagttctggaatcagggccgaacacaggaaatccgtgatcgggtgctgcatgtttccagccataccttttctcagaattgaggtatgtctcgttttaccgcagaacaggcatccccggcttcaagtgcgtagatcactaagcggtgggtcaggaggatgcatatcaattatcaatgcataaggactggtcgttgcagaccatgccttatgtgtgataagaatgaatttgggaggatatcatgcacgtaggagaagtgatgactgcagatgtcgcaaacggcgagggaatgagagtcagcgtgtttgtctccggatgccgcaatcactgtaagggatgttttcagccgcagacatgggattttaactatggcagggaatatacgccggagatagagcagttcattattgatgagctgtcgaagtcctattacgacggaatcacaatcctgggcggtgatccgatggagccggaaaatcaggaaccggtattgcggctgcttcgcagaatcaagaaggagcttccggataaaaacgtctgggtttataccggatacgtatacgaccgggatcttgtgccgggcgggaaacgctttgtcgatggtgtgacaagagaactgctggaatccatcgatattctcattgatggccggttcgtggaggagttgaaaaatctgatgctgaacttcagaggatccggcaatcagagaatcatcaaaatgaaagaaacactcgagaccggaaaggtcgtcttgtcagaactgaataactgaaatttgataaaaaaagagacccggatctacgggtctcttctgtttatgaaatactatggacctgatgagattcgaactcacgacccctacaatgcgaatgtagtgcgctcccaactgcgctacaagcccatgctttacagcgaaaccagtttagcacaaaatagcagaaaatggaagggaaaattaaaaaaaagagaaaaaactttcgccatatcggttttagtgttaaactgaaagcattcagcagtgaagcggattgtgaacagctcctggtatgtgggaaatgctgtggttcatagtatcaaaagcgacgatgaaggaggaagaatggatgaaggcggtaacatttggagaaattatgctgcggctgaagacgccggaatatttgcggattgtgcagtcaaacagttttgaggcgagctacgggggagcggaggcaaatgtagctgtctcgcttgcaatgctgggcgatcaggtatcgtttgtgacgaaggttccgaccggtccggtcggacaggcagcgatcaatgaagtgcgtcggtttggtgtagatacgaaagaggtcgtgcggggcggtgagcgtcttggcatttacttttttgaaaaagggacaaatatccggccgacgaatgtcgtatacgatcggaaatacagcgcaatgtcgcagtgtgatccgtctgattttgactgggagaagattcttggagatgcggatattttttatttttccggtgtgacggcggcaatcagtgatgcaacagcggaaacgctgaagcaggcacttggctattgcagagcgcatggaattgaggtaatctgtgatctgaattacagaggaaagctgtggagcacggaaaaggcgcagaaggtgatgggggaactgatgcagtacgtgactttctgcattgcgaacgacgaggattttgaagcgacgctcgggattccggcctatgacggtgacatggagcacggtatcgatcagatcaattcctataaggctggcatgaaggagattgtggatcgatatccggcctgtaaagcagtagccagtgtgctgcgcaatctgcactcggcagaggatggagaatggatgggcatttatctgaaagacggcatctattatgaaagcccaattcataccgtgcacagcctggaagcggtaggtgcaggggatgcgtttgccggaggactgctgcatgcgtatatgaatggatatgagccgcaggagctgatcgatttttcaattgcggcgagtgtgctgaagctgatgattcagcgggattttaatatggtgacagaagcggatgttcgcggtgtgatgaaggcagccgggacgaatctgcagcgataggagaagcagatggagatgacacaaaagcggatgaccgttggtattctggcgcatgtagatgcgggaaagacaacgctggcagaaggaattttatatctcacaggagagatccgtgcccttggaagggtagaccataaggatgcgtttctggacaattttgcaatggaacgggatcgtgggattacgattttttccaaacaggcggagatgtgctgtgaaggtgtgcagcttacgcttgtggatacgccggggcatgcggatttttcagcggagatggagcggaccttgcagattcttgattatgcagtattggtgatcagcggtgcagatggggtacagagtcatgttgagatactctggcgtctgctgaaaaaatatcaggtgccaacatttctgtttatcaataaaatggatcaggccgggacagatgaagagacattgcttgcagagctgcagaaaaagctggatgagcactgcgttcaattctgggcttccagggcgaaaaaagaggagggggaagagactgatgagatctttgccggacttgatccggaacggaagctgccgtggcgggtggaacagcttttaaaggatccggagctgacagagacactggctttatgtgacgaggcgttgttggagagatacctgtctgacggaacggtgcagctgcagcaggtgagagaactgatcaggagccgaaagctctttccatgttactttggatctgcattaaagctgtgcggcatagcggcgcttctggaagggatttgtatgcttggtatggagcaggcttatccggaagcatttgcagcaagggtctataagatctcgcgggatgcacagggaaatcgactgacacacgtaaagatcaccggcggaaagctaaaggttcgcgatctgctgacaaaccagacgaagggcaagggagcagaagcatgctgggaggaaaaagtcagccagatccgcatttattccggagcatcgttccgaagcgtcaatgaggtacaggcagggcagatctgtgcgcttaccgggcttaaccatacgcattccggagaaggactcggagccgagagagattcggagcttccggtgcttgagccggtgctctcttatcagatatgccttccggatgactgtgatgttcaccagacctatcggaagcttcttcagcttgaagaggaggagccggagcttcacattgcatggaatgagaagaagaatgagatttatgcacagctgatgggtgaggtgcagatcgaagtgctgaagaatatgatccgggagcgttttgggatcgcggtagaatttggtacaggaagcattgtttataaggaaacgatcgcggaaccggtaatcgggatcgggcattttgaaccgcttcgccattatgcggaggtgcatcttttacttgagccgggagagacaggaagcgggctggaatttgcctcggcctgcagtgaggatgtgctggatcgaaactggcaacggctgattttaacgcatctggaggaaaagcagcatataggtgtgctgaccgggtcagagattacagatatgaagattacgctgattgcaggtcgtgcacatcaaaagcatacagagggcggtgatttccgacaggcgacttaccgggctgtgcggcaggggctgcgaagcggcaaaaatgtgcttttggaaccggtatatgaatttgtgattgaagtaccgcaggagctggcgggacgtgtgatgacggatgtccagaaaatgtatggaagtgtggagccgcccgaacttgctgacgggacagcagttttgcatggaacggctccggtagttacaatgcggggatatcagacggagctgctggcctatacaaaaggaagaggacggatcagctgcacattgaacggctatttaccttgccataatgcagacgaagtgattacggcgacggattatgatccggaggcagatctggacaatccgacaggctcggtattttgtgcgcatggagcaggttttgtggtggactgggcacttgtcccggagtatgcgcatctggatacagccggacttctggggcagaagccggagatgggcgagatgcaggagcgagggcaaatcggggtaccgcaagggcacggcagctatgaagagatgagtatttctcaggaggagatcgatgagatttttgcccgcacgtatggcagtgcggggaagcgggaacgtccgaattatcgccgaagccgtcggacagactttgatgcatcacctgcgacgccaaggaaggtggcgacggaggagtatctgcttgtcgatggctacaatatcatttttgcgtgggaagagctgaacgaactggcaaaaacgaatgtggaagcggcccgaacaaagctaatggatattttatgtaattatcagggttataaaaaagtaaatctgatccttgtgtttgacgcttaccgggtcgaaggcggacagggaagcgtgcagaaatatcacaatatttatgtggtatatacaaaagaagcggagactgccgatcagtatatcgaaaagacagtacatgctatcgggagaaaatatcaggtgacggtcgcgacctcagatggcctggagcaggtgattatcctcggtcagggcggacatcggatgtcagcgcgagatctgaaggaagaagttttccaaatggaacaggaaattcgggaaaactatcttggcaggacgaatagcccacgtaattatctgtttaatcagctggatgagaaaatgagtgccctgctggaggatgtgcggctcggaaagaaagaactaaaataataaaaaataataaagacaataaaaataatatgagtcttaagagattaaaaagttgacatttatatagcgccatgatatagtgaaggaaaagaaagcggataaatgagcggagaaatcagcggtgaacatgcgctataccgtgctgccgaagggagagggcaggaagagacatgggtgattcaggtcaggtatcgtcgagttcttatctgattgcatgtgatgaaacggagcgggagcgccagaaggagttgctctacaaggtgatgggaccggtatttttcggtcagaaggcggcggagaatgattcagaactggcagagctgtttcgcagccgatatgggattgacgtgcagagagatttttatgagggcgacgaacactatgaggaatatctggaagcgcagcaggccattgcggagggcatgagtatttacggaggtgagatcgcatttgatgacagcgtgctggcggagctggcagatcgtgtctgggatattatggaggaaaaggaccggaagggctttcggcggatcaatacgatgctggaagagtgaaccggaagagagcgggttgtgggatcctggaaagctgagatccggcagcctgcttttaactttacaggaaatttaggatacacggattgcttcgcatttcgtgctctcgcaatcctaaaacacctcaaatccgcgctacttttcggtgtttcttttgacccttgtgtcataaaataataagaacggaaggtatgtgataacaggcaggtggcagatggaagatcagaaattggaaaatctcttaaatctggcattggatgcgacggaagaggagcgggagaagtctgtcagtctggatgtgggatatgatgcagaaaatcgaacctggcaggtgattgtgcgtcattctggagcattgcggcagctcatagcgcagcggtatccggatgtcagctggcagataacggaactttcaggagggtatgcgatcgttgatctcccacggaaagatatggataagcttgtgcggatgttgcaggtattttatgttgaaaagccgaagcagctgttcttttcagcagaggcggggcgacgtgcttcctgtctttcctctttacagacaggagcgggagcactgtcgggagccggtgtgctcgtggcggtgatcgattccggggttgactattttcatccggattttcggacagaggatggcaggacgcggatcgtggcattatgggatcagtcttcgagcagcggtcatgcaccggatggctttttacagggctgtgagtatacgcaggaacagattgatgcggcgcttgcgacgggcagcagagagcagggatatgcacttgtgccggagcaggatttaagcggacacggaacggcggtgcttggcattgccgcggggaatggaagggcctccggtggcagataccgaggcgtggcgccggagagccttttattagtcgtgaagcttgcgacaccgcagaggggaggctttccgcggacgacggaattgatgcaggctgtggaatatataatacaaaaagcagaacagatggggatgccggttgcagtcaatctcagcttcgggagcgtttatggttctcatcgtggaaacacgcttctggaaacgtatctggatcagatggcaaatcgctggaagagcacatttgtgatcgggacggggaatgaggcggattccgatggccatgcggcgggacggcttccggagtcagaacagacagaggtgcagttcacggtcggggaggcacagcctgctttgagtatacagatatggaaaaactacgcggacagctggcagattgtactgcttcatccggatggcagccagattgcatttggagatgaacagatggggacggcgcgctacctggtcggtggcacggagcttcttgtctattatggaatgcctgcaccgtatctgcttcagcaggaaatttttattgaattgatcccgaacgggagtaatgtatttgtagatagcggactttggagtatccgtttgtatcctgttcggattgtggttggaaggttttcgatgtggatgagtgatgcgcggacgagaaatatgcagacgcgctttcttcgcccgacaccggatgcgacattgacgattccatctgccgcttccaggacgatcgcagtcggcgcgtatgatgcacgcacgaattcttacgcatcattttcaggccgggggtggccggatgagccatatccggtgcacccggatctcgtagcacctggcgtagatgtgacagcgccggcggtacgcggtggataccttgcagttaccggtacttcctttgcgacgccctttgtcgccggctctgcagcgcttttgatgcagtggggtatcgtcaatggaaatgatccatatctgtacggcgaaaaattaagagccagcctccatcgcggtgcccgtccgcttcctggattcagaaaatatccgaacgaagtggtggggtatggggcattatgtacagcaaaaagtcttcctcaaaaatgaaaaattttacaactactgttagagacgggatggtataataagcatgtctgcctaatgagatgtacgggaaacagataatgagaatggatggtgtaaagtaatgataagaaaatgtttgaaggtaattggaactgtggcagcgattctggtgggagttgtggctgtatatgtcatttatttatttactacctatcacaggatcgcagataaccttccgttgacggtggagcagccggcaaaaaaggggacggatgtggatgcgcttgcgattggaacggagtataccgcactgacatataatattggctttggcgcatatacaccggattttagtttttttatggatggcggggagtcctcctgggcgaagagcaaagagagtgtactggatactgtgcagggagcaggcgatctggtggcgtcgctccggccggattttgccctgattgaggagattgacctggattctacgagaagctatcatacggatgaatatgcacttttaaaagagtgccttccggaagactatacggtctttgcacagaattacgattctgcatttttattttatccgctgaatcagccgcacggcagcagcaaatcggggcttggccttttttccggatatccggttacggaagcactgcgccggagctttccgatttctacgtcatggaagaaatttctggatctggaccgctgctacagcatctccagagtgccggtggagaatggaacggaactggtcattttcacgctccatatgtcggcttacggaaacagcgatgagattcgcaaggcgcagatttccatgctgtgtgaagatatggaaaaggagtatgcggcgggcaattatgttctgtgcggcggggattttaatcat

SEQ ID NO: 3385 - DNA, 2208 bp, Unknown
  16S sequences of unknown bacteria
gattcgccggacaacatcgcttcatctgcctgcaaaagaattgcttcgacaagccgagcatccgctgggactcgatccccagctgacaataccaataaatctcccggaaccacatcaactgcgggaatttccatttcatttccgtcacgaatcacttttgccgtgggagccgccatattttttaaagcttctaaagtcttttctgttttatattcctgcaaaaatcccagcaaagcattcaccaaaacgatgacgacaatcgtgagcgcttctaccgcttctcccatcaatacggaaatcactgtggctcccaataaaatcatcaccataaagtccttaaactgtcctgcgaaaattctcgcaggatggatggcttttttatgtgataggatgttttctccatgctttgctaaccttttttccgcttctgcggaagatagaccggagaaaacagaattttcccgactcattcttgccatttttcatcctcccaatcttttcctgcgtttgacagttcgtccattgatatctattcaaagcaagtcccatttattcctttacgtcattcgccaaaacgtgtaaaataaagttattagaaaaaggagagcttttatgaaatggattcatacttccgatctgcatatcgggaaacaaatcaatgagttttctcttttggaggatcagcgcttttttttgcggcaactgtctgaactggccctaaaagaacggccggatgtacttttgatttccggtgatttatacgatcgttctgtaccatcagctgaagcagtaagcgtattggatgcgtttttaagccatgtaacgctggaattgaaaatccctgtccttgccattgccggcaatcatgacagtccacagcgcctggatttttgcagccgccttttgcgcacttcaggcttgtacctttccggccggtataaaagacattgggataaaattacgctccaagacgaatttggaccggtccatttttatctgtgtccttatttggaaccagcgctggttcgtacagattttcctaacgaggaaatccactcttttgatgatgcgttcagcgccgttttacaggaaaacctgtttcaaatcgatttctcacagcggaatgtcatcttggctcacggttttttttcttatctgaaaaatcccgattcagtggcccggagtgaatccgaagtctctttgggaggaagcgacctgatcgatgccaagcggctggaggactttgattatgcggctttaggccacatccatcgtccgcagattaccgggaaagaccatttatgttacagtggctcccccttaaaatattcccagtcagaaattccgtatcacaaatccgtcgtggttgcacaactcggccaaaaaggacatttgatgatccgtcggcaatctcttcccgttctgcgggatatgcgaatgatcgaagggaactttgatcaaattttaaaaagtaatccaaacgaaaaagaatcccgggacttggttttcttttctctgctggatcgtgtattggttcccaatgccatgaaccggctgcgcacaatctatcccaatgcgcttgggattttcatgggacgccgaaacgaaaacggagatctctctgttccctcgcaaaaggccgctaaaccagtggatgtgctgtttgaggaattctaccaatctatcaccggcgaaaagccgcaggaacaacagaacaccattattcggaatatttgcgacagattacggacagggggtgacgccaatgaaaccgatccgactggaatttaatgcatttggcccatttgcccaaaaggaggtcgttgactttgaatcaatggccgaatccgggatttttttgatctgtgggccgacaggagcgggataaacaacaatttttgacggtatttgctttgccttatatggagaggccagcggcgcgttacggcaaaatgaggattttaaaagcgatttttccgacccttctgatctttgttttgttcgctattctttttgggtgcgggaaaaaaaatttgaggtataccgctccccaaagcaaaaaaagcaaaagaaaaatggcgatatcactaccgtatccgcaaaagcagaacttgttctgcctgatggcactgttttaaccggcccggcagcggtaagcgccagaatacaggaaatattaggtctaactgccaagcagttcaatcagat

SEQ ID NO: 3386 - DNA, 22187 bp, Unknown
  16S sequences of unknown bacteria
agacctccacgccgccatccagggtaaaccggttgaaggcggggcctttgaggaatcccacgcagctggggcagcatgtggcggtcaggacaccatccagccccaggaaccggagccgctcatcccggccatccagcaccagtatatccaccatgcgtccgccacagtgggggcatgtgtcctcccgtgcccggccaatgcggacgggagatttctcgtcggtggttcttttgaccataggatagcaggtatcgaagcccagctggattctctggccctccttgtcaaaggtccagcctccgatctgcgcatagctggatgggtccacatagaggcccctgcgccagggccggggatttcgctccagctccagcagcgtctccattgccctgtcatctccctgcatagcaaggcaactcatcaggttggatgcctcgctggaatattccgcagacaacagcgcatgaatcagaccatcccgcacatcggcgggggcatgataatagatttcacagggccagaacacctctgcggccagtgccgcccgctgaatctccggggtgatggcatcatggtaccccagcagctgccagaagtcggtgaactccgggtcctccatatcagccagccgctggatgttctgaatcaggtttctttgcttttctgtgatttgttccggtgtccaggcaagagcagccttccgctcctgttcagatttgcatttccagcacaagccttcgtagcccagaggtgttccacagctgggacaggtatatttgagtgccatcgcatccatctcctttcagaatacaaaaaacaccttgcatcagcctgtcaccgagacagaccgacacaaggtgtgaaagaccgcaagagaggaactgtatccggtttcagatacagaaaacttctcagactctattcttttttctatctgaacggtggtctgccacctatagatactacacatcggaacctctcattgctgctgtcaactaataagtccagaatatgcacagctgcaggcactgcacaatctcatatcttcccttttcaaatacatctgtttttaaggtaagtatatcatatcaatttgccgattgctatagaaacattcttaaaaataggcataaatgaatttttttaagcgtatacgcatttcaacttttgggaaaggaatagtattcttaaaggaaagaggtgatggaatggcagccgaagatatcaacattgcatttgggaaacatctgagaggtatccgaattcagcttggaatgaatcaggatgatgttgctgctgcctgtgggattgatcctacatccatcagtcgactggaacgcggcgaaacaaatgctacactcaccactctgcagcgtctttccaaaggattatgtattcctctgcaggatctgatggatcttagagaggtatatcaggtcacagttgtgggcgaggaacttctgggtgaaatacagtcgctcctgggaaagctcagtccggaagagcagcagtttattctgaattttatcagaagctttgtatcactaaggaatgattccaacgactaatatggaataacccctttcccttttgaatcctctttaattgtaagcagcttgattttactgaaacgcaagaggcacctatctgctggtatcccaaaccagcggacaggtgcctcttttttgctgctatgaatttttgtgtatataaaaacagcccctttttgattttgcatttcaaaaagggcgctgggattttttctgaaaacaaaaggttcgaatcatgccagtgcctaaaatcggccataggcgatcttttgtttcagagctgaaatttgggacacaaaaaccccggaaaagggcgatcggatgcgggtttatccgcatccaatctaaagtgttcccacttgatggttgggctggatggactcgaaccatcggaatgccacagtcaaagtgtggtgccttaccacttggctacagcccaatataaagaaaaaagactttttgtggaagtcttttttcttagtggggtgggtagtgggattcgaacccacgatcttcagtgccacaaactgacgcgttaaccaactacgctatacccaccatattaacttggtgcgccagaagggactcgaacccctggcctactgcttagaaggcagttgctctatccagctgagctactggcgcaaaatcgaatcatggagcgggtgatgggaatcgaacccacgtaaccagcttggaaggctggaattctaccattgaactacacccgcatcatcatcgctaagcgacgatatttattctatcaaacaagggttattttgtcaatagaaaaatgcaaaaagattcagattttttccaatgaatttactgtgcgctttcggaggtgtccaaatgcaccaccggaaggtcaatatgcttataaacactccacatccggatgccgaataccacagccaatgagatataagtcgccaccatcttatccataatgggatagatgaaccacaacaccaccgcgcccgccagcgccgcagacgcatagacttccttgcgcaggacaatcggtacccgctgcagcaaaatatcacggattacaccgccgcccactgctgtaatcaccgatgcaaagacaagctggggcagattgtatccattgtccagccctcggactcccgtatcaatagcaaagactgccaggcctatggcgtccgcagtgagcatgagcttgctccacttctcactcttggtggcaatcgccagcaaagacgccacaatcacgatcataatggtggtgtagctgctgaagaaacgcggaactcccacattcattaccacatcacgggtaataccgccgccgcaggcagtggagaatgcacacacaaaaattccgaaaatatcaagctcatagcggatggcaagatatgcaccggacagtgcaaatgcaaaagtaccgatataatccatgatactgatcgtctgcatactcatcggttcatatcctcctcttccttcaaaatcacaagcgccggtttctgtgccatgctgtgttctcctccagattcgcagcccttctctgactgtattttcgcactatatttaagtatacaagtacaattctcccctgtcaattagccggatgttctgaaattcttccttcattctgagcattcctcacaatggattttccatgcaaatacagctgtccgcccatgctttccccgggcattaaaaatacggctgccattcctgacagccgtataaaatccattgcttattccttggaagccagttcgatcaggcgggtgaacaggcccttgaagaccggataatccgcatacagatcctccggatgccactgaacggcataaaccagaccgtcctcgctctccagagcctcgggaatgccatcgttggtgctgcctacgatccgcaggccctcgcctaccttcttgattccctgatgatggaacgagttggtatagatctccttgcccaggatcttgcccagcacgctgttttcgtccattgtcaccttatgggtggggacattgcgcagatcctgcgactgggaatgacaaatggaacccggtacctgggacggaatatcctggtacagactgccgccaaaggctacattcagcacctggaagccacggcagattccaaagatcggcttcttctgctcccgggccagccggatcagctcgaagtcatagcggtccttgtcacggttgatgtagttgacctgcggcaccggatcttctccataatactccggcgcaatatcttcaccaccgggaaccagcagtccgtcgatcatatccatatattctgcgcagcgggacggatcttcggtcaccgggatcagcaccggaatgccgcctgcatcaatgattccctttacatatcccttctggatcatgtagttgcgaacactgatgctctgaaatacaaaacaaatgagtccgattcttggctttttcatacagtcacctgctttcgctgtattgataccgggaatttcccggtactgtgtctgcttacctttttattatatcggatcagaaaacagttgtaaatattccaaagacattttctgcccggtacagcggactgttttaccgtgccaccggtacacccagctgttccagggcatccagtgtatccttggcaggagaggtattgaacgaatatgtgctgccgtccttggcatggatggtcacccgcatgccgccatcataatcgacactttcgatctcgttcttctccagagcgaactcgtacttctcaccaaactcccgggtgtagacaacccgctggtctgtgatgtccagcacgccgcgggggatcttgttcttgttcatgtacatactcttgcggaaccatacaatctcagttgccaggatcggggtttctccctcccgcagtgtgattttcgaatcccgcttggtgctgaaaccgccgttctttgcggcccatatgatgaataccacaactgccaccaggaacagtacaataaaaatcggaataaaaaggataacgggcattggttttaacctctcttctctcacaggaattttatgtttttcctctaaattttaccactcacaccccatttttacaatctctggataaaaattgattacaaaaaaatatatgtggacagcaaaaacccctcccggacacaggatatgcatccggaaggggtttcagacaataattttcttattgagccgccgagacagtttccccgtcctgggcatactcttccagcgagcgctcgagccaaccgcgtccgttgacgatccgggcagcgatcatgcccagcgcagtatcgccggtgacattcaccagggtggcaaagggatcgcccagggtgacgatcagagccataatgggaatggtccagttgggcaggccgaagatcgaagcaataaccaactgacccacatagccgccgcccgggatcgcacccatgatagtggagcccacaatagccgccacaatgagcagtacgatatttttcggagtgaacacatcaatgccgcacagagcgcagacaaaggtggcctggagcacctgcaggatgctggcgccgtccttgtggaggtttgcgcccatcagcacacagaggtcggacatatccttgggcaggcccatcttcttgccggcgatcatgttatagggcagggtcgccgctgtggaacaggtgcccagagcagtcaggctgggggtgacattattcttccagtagagccctacggccttgcgtccgccgcccagataagccatgatcgaatgtccggcgaagtagtagatcagaatggcgaccacataggtcaggaaggaacgggaaaggggtcccacaatatcccggccattggtgccgatgagaatggcaaaatagaagcccagtcccagcggagccagcttcatcacaatgcccaccagcttgaccatgacctcattgagtccttccagcagagcgatgaccggcttggccttctcccctgccatcaccaccgcaataccggtgagaatggcatagaccaccagagccatcagattggtacgggaccagagcagcgagaagtcgctgactgtaaacattgccagaatatccagactggtgccggagagatccacgctctcctgggcaaactgggtcatatcggtgttctttgccgggtcaaacagagcggtgaagcccaccatgtaagcactgcataccacgccggtgatcaggaacagcaccagcagcacagccagtaccttgcccagcttgcgcatattgtccatgctggcaatggcatagaccagtgagataaagatcatcggtacaacacagcagtacagcaggttcaggaaaatgttggcccagggtgccaggacactggctcccggtccccagaacgcaccgacgattccgcccaggatcatgcaccccaataggataaacgaggagcggtacgaatcccagatttttttcatatataacccttcttcctcaattggaccggaacgctccgcaagaccattccagccggtaaaatcagaagcggcattccatatttctggaaaaccgcctttgaatacccctactctaccactttattttgataaagtcaatgaattatcacaagatttttgttttttctataaaaacgcttgattttctacgaagaacaaatctcctgtttattccagggaaacagctttcagaaaagtgtttttatctggaggatttttccggatcagcagaaaaagtgcttgattttcccggcacagaggtctattcttaatgaaaacagaacggctgtcacgccattcggaggctctgccctgaatggacccggcagcggcaaggagagattgctatgaaagagatcctgtgctttggcgattccaatacccatggctatatgcccggactgggaacccgttatcccatcgatcagcgctggagcggtctgctgggcaaactgctgggcgatggctatcatgttgtggaggagggtatggacggccgtaccacagcatttgaggacgacctgcagccctggcgcagtgctctgggctatatcggaccctgtgtaaagacccatgccccgctggacctgatcatcatcatgctgggcaccaatgactccaagacccgctatggcgtttccgctgaggagatcggcttcggcatgcaggaactgatccagcggattgaaaccttcttccgctacaatgccggacgggccggcgcctgtccgaagatcctcatcatcagcccggttcccatgccccagaccggcggcgacccggaattcaacgccggatcgctgcagaaacaggccggactggctgcggtttacaaggctgtggcagagcagtatggctgtgccttcgcagcggcagaggactggatcaccccggaacagctgggtgtggacttctgtcacttcactccggaagcacaccgcatctttgcggaaaagactgcggagctggtgcatcagctgctggactgatccctctatcagaatatgaaaaaggcaggcaagattgcctgccgttttttattcctccatctgacgccccaggaacatggctgcggcggcgatgagtttccggtcggcttcagagggctgacggcggtcctccccggcggagaggatcacagcgccgcagacatctccggctgccagaatgggatagacagccgctgccggacggtcatagccctccacggcatataccggtgaggactggggattttcgaggatataggactgacgggactccatgatctcctccagagccggagccgcccgccgttccagcacttcctttttgggaagcccggcagcggcgatcacatggtcccggtcacagatcagcaccggggtagtgagcaccttgcccagcacctccgcatagaccccggcgaattcccccagctctcccaggggagaatacttcttgaagatgacctctccgtcgttgttggtgaagatctccagcggatctccctcccggatgcgcatggttctgcggatctccttggggatcaccactctgcccagatcatcgatcctccgtacgattcctgtcgctttcatactgtttcctcctgatgtgattctattttcactgttatttcagtcttgactggttacgctgttagtatttactgccctttgcaaaatattccgtcaaaaccaattctcattcaggaggtcagactgtattccgcacctgtctttccgggtcatacaagataaaattccatgcaaaaaatccccctggagccaatagcttcagagggatttttatcaggctgtgcgatcagacagtctgtgcgtccttgcggttggagcgcaggaacatacccaccgccgagccgcagacgatcagataccccagcagactgtacagatccgggatctgctggaacaggaagaacccgaggatcgccgagaacaccacctgggagtagtcaaagaccgagatctcccgggccggcgcaaaggcataggcattggtgacgctgaactgtcccagtgccgccgaaacacctgccagcagcagcatggcgatctgctgcatggtcatggggtgatactcgaagatcaggaacggcgccgccgtcagcagcgagaagagcgagaatacaaagacgatcagcgactttttcacgccgtacttgcccagtaaccgcagcatggtggaagcgccgccggcactgatgccgcccagcagagccaccagcatgggaaacaattccccgcctgcgccggtgggcttgataatcagcaggcagccgcagaatgtagccacaagcgccgcaatctgatagggagcaatggtctccttgagcaggaagtagctgaacaggatcgcaaagaacgggccgactttattgagcatggtggcatctgccagtaccagatgatccaccgcatagaagttgcagattacaccgatggtgccgagcagggcacggaaaaagaggctcaccttggcggggccggaaagggaaaccggctgatgatccttagccagcatgaccaccgcaatcacaatagccaccagattccggaaaaacaccttctgcatggaaggaacatcgccgctgagccggacaaacacgctcatcagcgcaaagaaaaatgcagaggacagaatacacagaattcccttgtttcgtgaggacataggcagttttcttcctttctcttgtaccgggatggaacagctctcaaaatatacttttctgtatgctgttccacagatcattcacttttcctggaacagggggctcccttcctttccgcgcggaattcaggcttgccttgtgatccgaaccatctcctccctgtttggaagcaccccggtcttctctgtaattataccaaccatttcccataaatgcaaagaattggtatatagaaaataacagctgaagtttgttaaaaatcattgcgatttttgccgtatatttccagctcatttccatccggacgcaaaaaatcccctccggcataaggccgaagggggtttccatgaattaccgttcctcgcggaagtagttgaggccgcagctcttgggctgggcatgctcccggctggaacgcatactggtcacaaccagcaccaggatggtcgccgcatagggcagcatatcatagatctgcgccggcagaccgggaatgctcacatacatgcgcatgatggtgagtccgccgaagatcagcgctacgatcatgccccggaacgggcgccaggtggcgaagataaccagtgccactgccaaccagccatagccgctgacacagccatgcacccacacgccggaagtggtgaccatgctcatatacatgccgccgatgccgcagataccgccgccgatgacggtggctgcgtacttatagagggtgacattgatgcccaccgcgtctgcggtagccgggtcctcacccactgcccggaggttgagtcccacccgggaccgtgcaaagaaccaggacatgagcacagccagcagaactgccagatagaccagccagttataactgaacagcagcgaaccgagcaccggaagatccgagagcaccgggattctgaggccggagaaggcagccttggtcaccgaggacacagccacatagccgccggccttctgaccgatgtactcgccgaagaagttgccgaaaccggtaccgaagatggtcagggtcagaccggttacattctggttggcccggagggaaatggtgaggaagctgtaaatcagcgcccccagcataccagccagcatggatgtgatcagggcgatcaccgcggagatcacgccgctgggagtcccgccggaggagagcactgcctgctcatagaaataggagccagccagtccggagatggcgcccatgaacatcatgccctcaacgccgaggttgaggttaccggcccgttcggtgaggatctcacccagagcgcccagcagaagcggagtaccagccaatacagccgcagggaacagacttcccagaatctcaagcatggtgttcctcctttctccgggggatcagtttataggtgatgaagaactcacagcccagcatgaagaacaggataatgccgatgatcagatcggatgccgaggccgggatcttgaagttggtctggatggtgttggaaccccgttccagcatggcgataaagacagaaaccaccagcatgccaaagggattcatcttggaaagccaggccacggtgatggcagtaaagcccacaccgccggctgtgccctcggtgagggtgtagtccgctccggcgaactggagcatacccaccaggccgcagagcgcaccggacaggaacatggtgcggcacatgacgcggcccacccggatgccggcataccgcgcggtattggcgctctcgcccaccacagcgatctcatagccctgcttggtacgggtgatatagacataggagaccaccaccagcaccagggccagaatccagccccagtgtacgcccaataccttggtgagacgggcgcccggagccagcatggcaatcttgggatagctgctgcccggagccttccaggggccgttcatcaggtacttgacaaaggccagggcgatatagttgagcatcagggtgaacagggtctcattggtgccccactttgccttgcagatagccggaagcaggccatacaggccgcccaggatcatggaggaggccatcatcagcagcaccagcgggatcttcgggaagatggtggcggtaaacaggccgaaccatccggcggcaatggcgcccaccaggatctgtccctcggcaccgatgttccagaacttcatgcggaacgccagcgaaatgccaatggaggtgatgagcagcggaactgcgatcttcactgtctcccgtgccactgtgggggaaccccaggcaccggagatcattgcgctgtacacggtgagcgggttatgccccaacaggagcaggagcagtccgccggtgatcagtgccagcaggaaagctgccgcccggatgccccaggctgcccggggtgaaatggaatcccgcttggccatgcgcagcagcggttctttgggttgagttgtcatgcctgcacctcctcatccagatgctccacatggatcatcagcagtccgatctcgtccttggtgaccttgcgggggtccacaatgccgctgaccttgccgccgcacatgaccagaatccggtcgctgagctgcatcagcacatccagatcctcgccgataaagatgacggctacgccctttttcttctgttcattgagaaaatcatatatgcggtaggaggagttgatgtccagtccccgcaccggataggctacgatcagcaccgacggattgcaggcgatctcacggcccagcagcaccttctgcacattgccgcccgaaagccgtcccaccggggtatccacgcccggtgtggcgatttccagctcgtcgatcatccgctccgccagttcccggggcgatttgcggtccacaaagatgcccttgccgctcttatagctgcgcagcatcacattgtcggtcatatccatgctggcaaccagacccatacccagacggtcctcgggtacaaaggccatggatacgcccttctgcacgatgacatcagggctcatgcccagcaggttttcccgcaccggcacaccgttcttttcgccggaatagagcacggcgccgccaatggcgggatagagtccggcgatgacctcgcacagctccttctgaccgcttccggcaataccggcaatgcccaggatctcgccgccgtaggcgtcaaaggacacattgtccagggcggtgactccctcgccgttctggcaggtgagatccaccacctggagccgcttttcgccccgctccacctccggacgctcgatctccagcacgatgggacggcccaccatcatttcggtgagttcgtcctggttggtggtgccggtgtccacagcgccgatgtactcgcccttgcgcaggatcgccacacggtcggagatggacagcacctcatagagcttatgggtgatgatgataatggacttgccgtcctttttcatattgcgcagcgccgcaaagagcttttcggtctcctggggggtgagcaccgcggtgggctcatcgagaatgagaatatccgcgccccggtacagcaccttgaggatctccactgtctgcttttccgaaacagacatattgtagatcttcttggcgggatcgatctcaaagccatactttcctgccagttctgccaccttgcgctccagctccttacgattgagcacagcgccgcccggcagacccaggacaatattctccgccgcggtgagcacatccaccagcttgaagtgctgatggatcatgccgatgcccagatcaaaggcctcacggggcgaccggatggacgcgggcttgccatggatcaggatctcgccatggtcgggatagtaaatgcccgagagcatattcatcagggttgtcttgccgctgccgttctcccccagcagagccaggatctcgccttcccgcagatccaggctgacatcgtggtttgccaccactttgccgaaggttttggtgatatgccgcatcgatacagcatattctgtggttttctccaaggctctcctccttttttctgcctgactgaaaacaaagccgtcctttcttacaaagaacggctttgttctgtgtgtatgggatttactcgacagcggtgcagccttctacaatgtactgccaggacggagcggactgctcttcctgctcgtggtagtagtcaccctcggggatctcgatggtctggccatccgggcttacgccggtcagcgggcctgcaaagacatgcagttcgccagccttgagctgctcgatggcggcatcaatagcctcctgagtaccctctgcggcaatgttggtgttcaggggcgacaggtaaactgcgccgtccgcataacccttgcaccagtcggtggggatctcagtaccgtcgatcacatgctgaacagcctcagttacatagatgccccagtcgatccgggcagagatcagggaagcctcgggagctgcctcgatcatatcgttgttgtaacctacctgccatacgccattttcctcagcggtggtggcgggagcagtggagtcagaatgctgggaaatcacatcgcagccccggtcgatcagagccttggcgacctgggattccacagtgggatcgttccaggagttggtgtacatgatctccatggtcacatccgggttgacgctcttggcacccagatagaaagcagtgtagccgctgattacctcggcgaacgggtaagccgccacatagccaagcttgttggtctcggtcttgaggccggcggcaataccggccaggtaacgggcttcatagatggaagcgaagtagttgtggaagttggagagacccgacgaagctgcctgataaccggttgcatggcagaactggatgttgggatactcagctgctacttccttgacatagtcctcatagccgaagctggttgcgaagatgatgttgcagcccgattcagccagctcccgcagagcggtatcgcactcagcaccctcgggaacattgtacttgctgatgatctgatcgtcacgcaggcccagggcttcctgcatctccttggtgcccagctcgtggttgtaggtgtaacccatatcgctggagtcggagatgtaaacaaagcctaccttgatctcatccttggaaacgggagcgagctctgcctggctggtaccctcgctgctggaattatcgccggcagccggagcagaacagcctgtcatcaggcctgcgaccatggccagagccatgagcgcactcaggattcttcttttcatctgtgattgcctcctgtcttttgtttgacctgccgcccatagtccggagcggcccggatgaaaataaaaacgctacccgaaataagaaaccctgttctttcccactctggatagcttttacacctttattctacactgcccgatgcgcctcgtcaaggcgaaggtgaaaaaactgtaaattctatgactattttgaaaacacccgcagattttacacaggcttcttgtacagttttcccacccgtaactctccgggccgggccggtttccgattccgatgccggtccggaaaccggttttcaccccgccggaacgcatggcacgctttcgcacggggaaatttacttatattaaacataaaattcacctgccgatttcccggcgtcccggagcattccggaagatcctgcacaaaacagcagtttttgtcagcaaaacccacaaaggcagccccccacacggcagattttattgcattttggaaaaatgttcggtttattaaacttttagtttaccgactattgattttccggcaaaatattgtataatattctcggtttagtaaaaataactttgcggtttaatattactgcacacagaaagcgaggcgtcaatttggatatcggccataaaatcaagcagctccgcatccagaaggggctgaccctggaagagctggccagccgaagcgagctgaccaagggctttctctcccagacggaacgcaacctcacttccccgtccattgccaccctcaacgatattgtagaggcgctgggcaccagcctgtccgaattcttcaaggaggacaaggaggagcgcatcgtcttccgcaaacgggatttctttgtggatgaacgggatcactgcacggtgaactggatcgtgcccaatacccagaaaaatgagatggaacccattctgctggaactgccccagggcggggaatcctttgccatggacccccacagcggtgaggagttcggctatatcatcgaaggttcggtggtgctgatctccggggaaaagagctataccctgcacaagggcgagaccttctatctctcgggaaagaaccgccactaccttaaaaatgaaaagaaaaccactgccaaagtgctgtggatctccaccccgcctctgttctgagcggactgttatcctgactgcggaaaaagaaaggagcctctttctgtatggaaaagaagctgatcgaattcaagaacatcgtcaaggaatttgacggaaagctggtactcaagggtgtcagcctggatatttatgaaaatgagtttgtcaccctgctgggtcccagcggctgcggcaaaaccacccttctgcgtattctcggcggcttcctggaacccaccgaaggccatgtgctcttcgatggacaggatatcagcaaagtaccgccctacaagcgggagatcaacaccgtattccagaaatacgccctgttcccccacatgaatgtatacaacaacattgccttcggcctgaagatcaagaaggaacccaaggacatcatcgagcagaaggtaatgcgtatgctcaagctggtgaacctggaggactatgccgaccgcaatgtcaccgagatgagcggcggtcagcagcagcgtgtcgccattgcccgtgcgctggtcaatgagccgagcgtcctgctgctggacgaacctctgggcgccctggaccacaagctgcgtcaggagatgcagcatgagctcaagcgcatccagcaggaagtgggcatcaccttcatctttgtaacccacgaccaggaagaggccctgaccatgtcggacaagatcgtcgttatgaaggagggcgagatccagcagatcggctcccccaccgacatctacaacgaacccgtcaacgagtatgtagccaacttcatcggcgagagcaacatcattgacggcgtgatgctcgaggactacaaggtcatgtttgaggacaaggtctttgactgcgtggacttcggatttgacaagaatgaggcagtggatgtggtaatccgtcccgaggacctggacatcgttccccgcgccgagggcaagctccggggcattgtcaagagcgtactgttcaagggcgttcactacgaaaccgtggtggagaccaagctgggtaccgccatcaccgtcaagatggtggtaaaggacggcaagccggtcttcaatgccgaggccaatgagaagatgtccgccaacgacttctatctggacaccgccgatgtggacgagctggatgccgccaccatcattgcccgtgccgacgcccaggcctggaaccccgacaccgatgagttcgtatccatcaaggatgtggtctaccagatcaagaaggaaaacggtacctatccggttaccttctccaccgcagccggcacctcggtcaccgtcaacatgatcgtcaaggacgaaaaccgtgttgccaacaaggaatacgaagaggagattttcgcggtgaacttcttcaagaacgccgatgagatcaccgaatccatcgctctggacaccgacctcaagacctgggccaatgcctcggcctggagcctggaggacggcaaggctgtggagatcaccaatgtccactatgacttcgatcccgagaccatcactcccggcgtctatgatgtgaccttctccaccgagggttatgaatacaaggtggacaccaccgacaagtatgaggtgggagacatcgtgggactttccttccagccggaggatatccacatcatgtccaagaactaagggggcgtgaccgatgaaacaattccgcaatatggtctacccctatgtggcgtggatcgctgtgatgatcgtagcccccatgctgatgatcgtgctctatgccttcaccaccgccggcaacgatgtcactaccattcgctttaccctcgataacttcgcccggttcttcagtgaccaggtctttctggatgtgctgtggcgttcgctgttcattgcggtgatcaccaccatcatctgtgtgctggtgggctatcccatcgcctacgccattgcccagcgctcggaaaagagcaatatgttctgggtactggtgatcaccatgcccacctggatcaatatgatggtgcgcacctacgcctgggtgggtatcctccaggacggcggcctcatcaacagcctgctggggctgttcggcatcgggccgttcaagatgatgtacaccacctttgctgtggtgctgggtatggtctacaactttatcccgttcatgatcctgcagatccatacctccctcaccaagatggacaagagctatctggaggccgcagccgatctgggcgccaacaaggtacagagcttcctgcgggtcaccctcccgctgagcctgcccggtgttctcagcggcatcaccctggtgttcctgccggccgtatccagcttctttatccccaagctgctgggcggcggtcagtatgtgctcatcggcaatgtcatcgaaacccagttcctcaccagcggcgactggaatttcggcagtgccatctcgctgattatggcggtcatcatcatgatttccatgtatatcacccgcaaggtggataccgaccccgctgcccgcggaaaggaggactgagcatatgcagaaacaaaaacattccctggcttccaagctcctgctgggcctgacggtcctgttcttctatctgcccattatctatatcgttgtcttttccttcaacgattcccgctccctcacccacttcagcggcttctccctccagtggtatgagaagatgttctctgaccgtaccatgatggaagcggtgggctataccatttttgtggctgtggtggctaccatcgtctccaccatcgtgggcaccctggctgccatcggtctctcccgttcccgcaagctgctgcgcaatgtggtggaacaggtcaacaacctcccggtgatgaacccggagatcgtcaccgccatcggactgctgatgttcttcagctccctgggcgtcaacaagggcctgactaccatgctgctggcccatatcatgttctgtaccccctatgtgatcctgtcggtcaccccgaagctgcggtccctggaccccaacctcgccgatgccgccctggatctgggtgctactccgctgcaggctctgaccaaggtcattgtgccgcagatcatgccgggtatcgtttccggtgcgctgattgctttcaccatgagcttcgatgactttgtaatttcctactttgtcaccggcaatggtgtaaacaatatatccattctggtctacaccatgagcaagcgtgtgaatccgtccatcaatgccctgtccaccctggtcatcgcactgattacggttgtgctgatcattgtgaatgtagtaccgattatcaaagaaaaaaggagaacaaaagcatgaaaaaactgattgccatgatgctggctggtgccatgctgtttgccgctaccggctgcagcagcgacaacggcggcagcaccgaagatgccgtagccaagtacggttccgacaccctcaagctctataactggggcgagtatatgggcgagaatctgatctcggatttcgaaaaggaattcggtgtcaaggttatcgtggagtacttcgattccaacgagatgatgtacaccaagctccagggcggcgattcctatgatgtgctggttccctcggattatatgatcgagcgcctgatcagtgaaggtatgctccaggagctggatctctccaagatccccaatatcgcaaacctggctgaaggcgtcaagaacctcccctatgacccggacaacacttactcggttccctacttctggggcaatgtgggtatcgtctacaaccacaacaatgtagatcccgctgatgtagaggctgagggctggaatatcctcaaggataccaagtatgccggtcacatctacatgtacgactcggagcgtgatgccttcatgaccgcattcaaggctctgggctactcgatgaacaccgagaacgaggacgagatccaggctgcctatgagtggctgctggatatgaacaacaccatggagcctgtctatgtaaccgatgaggtcatcgacggcatggcaaacggcaacaaggacattgctgtgatgtactcgggcgatgctgcctatgtgctggacaccaatgaggacatgagctactggatgcccactgaaggcaccaacctgtggagcgatgccatggtaatccccgccaatgccgagaacccggctttggctcatgagttcatcaactatgtgctgagctatgatgcctcctatggcaactcggaatatgtaggctatgcttcctccaaccaggaagttctggacaccctgagcggtgagggcggctactacgagaacaacgaagcttacctgccccgctccggctatgagaaggacgaggtcttccacgacaaccagactctgaagaagattctctcggagctgtggatcaaggtcaaggcttccaaggcataacccctgaatcaaccggatttccccaggtcccccgacagtctgatactgtcgggggaccttttttctgtgccggaattcttgagcgggtgtccggttctgtgctatactttctttcagaagcctttattatccaccccaaaaggaggaacacaatctatgccgcagaatccgttcaggctctatcagaatcccgatggccctgtcctcgggaccgtttccgctccgatcctggaacaggacggcctgttcttcaaggatctggcccgcaccggacagctgctcccctatgaggactggcgtctgccggcccagacccgggcggaggatctcgctgcccgtctgagcatcgaagagattgccggactgatgatgtattcgccccatcagatgatccccactctgccgggtgatcccttccagggcagctacaacggcaagcccttccccgagagcggcctggagagatgggcgctcaccgaccagcagaaggccttcctggaacaggaccacatccgccatgtgctggtgatgaaactggagagcgccggcattgccgctcgatggagcaatgccatccagcaggcggcggaggaactgccctggggcattccggtgaatgtgtccagtgacccccggcacggcgcttccaaggcaaaggccgagttcaagagcggtgccaacgatgtatccaagtggcccgaagggctgggcattgccgccaccttctccccggaggtgtgccggcagttcggtgagaccatcgcgaaggaataccgggcactgggcatcaccaccgccctctccccgcagatcgaccttgccaccgaaccccgctggatgcgctttgaggacaccttcggcacccatcccgaccaggtgaccgatctggcccggctctactgcgacggcctgcagaccaccccgggcactgccgatggctggggacaggagagtgtctgcgccatggcaaagcactggcctggcggcggcccctgcgaggcaggacgggacgcccactatgccttcggcaagtatgcggtctatcccggcgacagcttccagagccatctgaagccctttaccgagggcgccttccggctggacggccccaccggcagtgtatcggcgatcatgccctattacaccgtatcctgggagcgggacatcaaaaacggaaagaatgtgggcaatgcgtacagtgagtacctcatcaaggacctgctccggggcacctatgaatatgacggcattgtctgcaccgactggggcgtgacccgggaccccgcccccgaaatggatgccctgtgcagccactgcttcggcgtggagtccctcaccgaggcggaacggcatctgctcgccatcgaaaacggcgtggatcagttcggcggcaacagcgacatccgcccgattctggaagcctaccgcctgggctgcgaaaagtatggcgaaccagccatgcgtgcccggatggaacgctctgctgtgcggctgctcaagaacatcttccggtgcggcctgtttgagaacccctacctcgaccccgctgaaagcgaagctgtggtgggctgcgaggcgtttgccaaggccggatatgaggcccagctccggtcggtggtgctggtgaagaaccgttcgattctgcccgccgcctgcggaaagaaggtctatatccccgaccgcaccatccagccccataagaacttcttccggggcatgagcccggagacgaccgtccatccggtggagcgctcgctggcagagcagtacttccagtgggccgataccccggaggaagccgatctggcgatcgtctttatcgaaagccccatcaccgacggcggctattccggtgaggaagccgcagccggcggaaacggctacctgcccatcaccctgcagtaccgtccctatcaggccaacaccgcccgccagcccagcattgccggcggcgacttccgggagggcttcaccgaccggagctatcggggcaagaccggcactgccgccaatgaagcggatctcgacctggtgctggacacccgggccgccatgggggataaaccggtgattgtctgcctgcggatgcacaatcccactgtgctctcggagctggaaccagctgctgacgccatcctcatcgacttcggcgtccagaagcaggtgctgctggatctcatctgcggcaaggccgaaccctcggcgctgcttccggtggaactgcccgccagcatggaaacagtggagacccactgtgaggacaagccctttgactacgaagtctatgtggacagcgaaggtcatgcctatggctatgcctacggactgaactggaagggtgtcatcaaggacgagcgcacccatctctaccccaagcactgacccatataaaaacaccagcccctgtgggactggtgttttttgccgcgctgatttgccggcagcctgatccggacggtccggtcatcaggggcagttattccacccgggcaggctggggttttcctccgcccgctgccggaacggtggaaaaccgcgtgaatccaaagtcatggagcctggcgtccggattctccccggctctgaccgacagatatacctccggtcagagctgcccgctaagccgatggcctgtattccgccgcatgagcactgtgcccggccccgggacaccgtttgatacacaggcgtcctgccgggagacgcaccctccacgggtgccccatccggcagc

SEQ ID NO: 3387 - DNA, 3212 bp, Unknown
  16S sequences of unknown bacteria
tccgcatttgccctaggctaatcgagtaggaacggggaaagaggcgccaagggggagcccccttggcacccccaggtattttgatttttaggaccattgtgggacaccacaatggccggtgaccggccccagtgcccgccagtatagagagcccttcaggggcgaggccggagttctttttaggaaagtcggcgggtacggaatcttttgaatcaacgccatacataaaggggctgccgccccgagggcttggaggctataaaatcatggtttgtggcctgccccatccttgaggacccaagggccccggggattgcactggttacaaatctaactgttcgtttgaatttagagtactgcagctctctccaatttgtcaacgccgcttcattttgcctcctcgccatcggacgctgcggccccggcaaagacctcgcgcattgtcggaaaaattcacataaattgttgaaaaaaggccgtaaacggctttgcgctcccgcggattctggtgtaaaatgtccgcatcagaggaaaggagccgtattatggaagcttacagacggttgatcggcgacaatatccggaaacagcgggagctcctacatctcacccaggaagaactcgcccaccagatcggtaaggacccctcatacataggccgggtggaacggggatctgtcaacgcgactatcgataacatcctgcggatcgcccggggcctgcaggtggagcccgcgctcctgttccagtccgaccagccggaccgtctgcgggactatatcccggatgtcgaactaagcacccttgacccgacccagcggcatatgtccctggttattctcaaggtactgaatatggtggtcaatcaggcagagccggacgacgcgtacgccgtcctgctgcgggaccgtatgctccgaacggtgcctttcaccacctatgccatgacctcctcccaccgcctgatggaccggcaccgggtgcaggtctacggcatccgggccacccagcatcggcttgacggcaccgtccgtcagcggcatatccccgagctctccaccaaccgcgtggtcgtggaaaacctgattaagcgcctcaacaacgctttcgtttcatttacacagttcgatgaaatcctggaggatttcatcggcggcgattacctgttttatcacgacgggccgccggtttgaacgaaatccgcccgtaaaccggccggatttgagattttgcctgtccaaaactgtcaaagcctctatcttccgcataccctgttcatgaggtgatgacagatgttttacgtatgctcccgcggtgtcaagatcgccgtctatgacccgaatccccatggccgggaacccgtcctgctcctccatgggtggcctatgacccatgacctgttcgaatatcagaccgatctgctgatccaatcgggataccgccctgtcctggtggacctgcgcggctttggaaaatctgacgtcccggcggtcggctacacctacaacgatatggcggaggatctgcacaatgtcatccagacactgcacctgtgcggcatcattctggtggggtacggcatgggcggcggcgtggcgctgcgatacatacggcggcatcccggaggcggggtcaaaaaactggtgctgctcgccgcgggcgcgccttgttggaccgaacgacccggatttccctacggcctgccgcgccagagcgcaaccgaacttatccgcctggccatggccgaccggccgcagtttgcggatctgttcacccgtctcctgttcgccaacgaacacagcgaggccgccctccactggttccgggacgtggtgctctccgcctcctcaacggctaccatccagagcggctacacctaccgggacgaggatggccgggaggacctcgcctttgtgcatgtgcccgccgcggtcttcgcgggaggacaggacgccctcgttcccgacgccctcaacgatttcctgcgccgcggcatcccgggcgcctgcctctatacccttccctccagcggccacggcctgatatacgacgagcgggcggcgttcaaccacagctttctggaattcctaaaacggtagggcagacatggtaaaatggatccggatatggtaaaataaataagttagagcttgaattttcagcaggccccggagagaggatatccatatgcccccatccatctcccgccgtcccattcctggcggacctgtccgccggtacagatcctgctgatcgtatcgggagccggtattccccttttttggccctgattctgcagggccgcgccctagtggccgaaggattgccgcccgctcaggatgaaaggaatgggggcatccggcagtgggataaaccgcgctgctgccgcacaggaaaggggctcacctgatgaaattcctaaccaaagcgctttttgccgccggcgccgccctgggagggggtgccgcggcactcaacgcctgcgtggttgcccggacggcccctgctgttcgaaggctctccgatctggatggccggtccgccgacgcgatcctggtattgggcgccggtgtggaaccggacggccggatgtccgatatgctggccgaccgcgtggaggtggcaatcgcgctttatcgccgcggtgccggccggaagctgctgctcagcggcgacggccggccgggatacgacgagccggcggccatgcgccgcgccgttctgcgggcgggcgttccggaagaggccctcctcttggatcgccggggggtatccaccgctgcttccgtccggagggcccggacggttttcggtaccggcaccctcgtgatcgtcacccaggagtatcacctctaccgtgccctttatctcgcagaaaacgcgggcatcgacgccgtaggggtatcagccagcctgcggccctaccgctcccggaaaaaacaggcggtgcgggaatttttagcccgaagcaaggatgcgggccgtattgtattacagggtagattgtgtctcggtggaaaacaagggaaacaatcctccgtacagagattttaaaggcatataaaattgtgccctctagactccccgggggccccgggccccctccttgtatagcgttggttcaagagtcaacatccccgccggttttcctgaaaagaaaaccggccgaccatccggggtgcttaggggggcaccccctaagcgtctctttg

SEQ ID NO: 3388 - DNA, 8416 bp, Unknown
  16S sequences of unknown bacteria
cgcggggcagatcttgggatagaggaccctgccgcagcgggggcagaccagtgcgcgctctttctcactgtggcgattttccgcgccgcaggcgccgcagaagcggttacccgtataccagcgcagcaggctgcctgccacggcgcaggcaaacgccagatgctggggctctgcctgccgcaggctgacctggggcgcaaaatagagcgcctccgtcggcgcgtccaccggcgccagggccaggaaatacgccgtgccgtccagccggaaggcaaagcgcggcggtgtactgaaggccggaaggtcctccaggcatggcagagccagcacgccgcttgccgtgcgccgcagcagcacctggctttcccggaagcagaggaccgggctgctttgcgccggcgccgccggggcgaaggtattgtcataccggtggggcgcgatatcctggatcatggtcttctcaccttgcgattctgccgccgggtgcggcatgggagcggggcagcgtgcgccccgcattgtggtaatcataccatacccgccccggcgggtcaactccaaagccacggaaattccggcacaaaaccgccgtcgtggcataagataaactagtttggcgtatggccgccggaagaccaggcggccaggacggagcgggaaggagactgccgcatgagaacctttaccattgagctggacgccgccacggcggcgttttatgcccgggtcgcccagagcgccgggctgacgccggagcaggtcctggcggatgcgctgttcaagctggccggggagctgtccctggaggcgctgcaagcacggcgctgattttggaaatctttgcaccaggtgattgtttttataatttgaatttggtataatacccatgtttttggaaagagaacgcaaccgtcagttgggaggtataccaatgaaatcgatccgagatatttataagatcggaaaaggcccgtcttcctcgcataccatgggccctgcgcgggcggcgcagctgtttaaagacgagaaccccacggcagatctctttgaggtccgcctatatggctccttgagcaaaactggcgtcggccacgggacggatcgcgttttgcgggaggtgctcagcccagtcaaaacgaagatcattttccgcgacaatctgccggcggatgcgcagcaccccaacacgctggattttaccgcgtggaagaataatgagcagatcggctttatccgcgtcgagtccatcggcggcggcgatatcgtcatcgagggccgccccagcttggagatggaaaatgtctatccggagaattcctttgccgagatcgcggagttctgtcgctggcgcaatgtcagcctgagcgaatacgtcgagctcaacgaggggccggagatctgggactttttgcatatggtctgggagacgatgtgcaagtctattgaagacggcctacaggccaccggcgtcctgcccggcccgctgcgcctggagcgcaaggcgaagatgctttacgagaacgtctcggccgacgagattccccagatgcaggagctgcggctcatctgttcctatgccttcgccatctccgagcagaatgccgacaatggcaccatcgtcaccgcgcccacctgtggcagctgcggtgtcctgccctcggcgctgcggtatatgcagggcaaatataactactcggacgacgagatcgtccgcgccctggcggtcgccgggctaatcggcaatctgatcaagcgcaacgcgtctatttccggcgcagagtgcggctgccaggcggagatcggctcggcctgttctatggcggcggcagcgctgtgtaccctcaaaggcctggaaatcgcccaggtggagtacgcggcggagaatgccctggagcatcacctcggcctgacgtgcgaccccatctgcggcctagtgcagatcccctgcatcgagcgcaacgccgtggcggccaagcgcgcgatgacggcattcaacctggcccagctgctgacgggtacacggaatatcagctttgatatggtcgtacgcacgatgtacgagaccggacggcacttgaaccatgaataccgggagacatccgagggcggcctggccaaattctaccgcaggaggcggcgctgagatgcgggttatggctattgattacggcgatgcccgtaccggcgttgccatctctgaccccagtgggcttctgaccggctttacgacggtcatccacagccggaaccgggagacggtgctggcgcagctggcggcactgtgcaaggagcggggtgcggaccggctggtcatgggctttccccggaatatggacggcacggagggcccccgggcagcgctttaccgggaatttgccgccagtttagaggaagcgacgggaatgcctgtccgcctttgggatgagcgccggacgacggtcgaggcgcatcagatcctctcaagccagaattaccacggcaaaaagcggaagaacaccgtcgatgccgtggccgccagcctaatcctggaggggtacctaggctatctccgcaatcacccggaggaagtttaaaatagtaaaaaccaacccgcggcaggtaagtccctgccgcggttttgtcatctttgcggtgcttggggctcagcccagtacgacttgaaagcggatctcgtagcgccgggcgaagggggcggagaagtttgtcagagtaagcgatgggatcacagcaaaggccggatcgcccgcttgggcggtgcagacggctttgccgggcagggccgagagcagacgttttgtcacgtcgtcgccgcagacaagggcctgcagtccggcgggcgtcaggtcctgcacggcgctgcggcagcctttgcaataggcaatgtccttgaccagggcaaaggtcaggctctggcagaatgccgccgtgcaggcgtcctggctctgtgcggtatggcgtagatagcacaggcgcgtcaggcccatggagagggcgatgcccacggcattgtcggtcgtgccccaactgctgtagcccatcagtgagcggaccggcagtgcttgcaggagcccggcggtcagccggttgccgccggagacgtcgatgacgatggtcgggatgttggcgcggtcattggcctgccaggcggcaagcagagcgtccgcgtcctgctggctgctgccctttgtcaggagcaagacctgggcgacggtggagccggacgaggcggcgcccagggcatccatatgctgctgcacggcctggcgcagtgtcgtggtgtcaaagtcgtcggcaggttcgttagcgcagggaccgaagtaggtcgccgccaggcgcggcgcgccgccctgggcggtgcaataggcctggcagatggccatcatgcccaattcatcggcgccgcagaacagcgcgccgtttttgcccaaatgctgctgcagcagggcaatctcatttgtctggatggaactgcccgggtgggagtcgtccacgccgatgaggacaccggcaaagggcgcgctccgctccaaaagccgcaggcccagccgcagcttccgcagccgcgcggcgtgataggcatccagcgcctggtccgtgaggcgggtggcgatgggcgcgccgctggcatcgaagcggtaaccggcggcgatggcttccggtgtcagcgcgttgccggtcaggctctggcggggctgcatcccgtaattgcggtaggcgacgtaatccgcgccggtcagcccctgatagccgacggtagacgccaggcgcatgacggtatcaaagacatagaccggcttctgtcgggccaggtctgatagatagtcgatcgcctcgtattcaaattgcaggtcgccgccctgcagtgcgcgactgctgaccagcccaccggagagcagctggtccaggctgatgaccagaatatcgcaggcgtcggcattccggtgcagccaatccagcagcgcctgacgcgcgccgtaggttgtgccgttggcggtcgggctttggttgtcgagtcgggtggcgtacagcgcttcgcgaggcatccggacacgcagcccggcgctctgggcctgcagcacaggccgcaggtcgttcaccggccgattatccagcgggatatagccgacggtaagccccggctgctgggcgctttggcagacggccaggtcaaaaaattcctgtaggatcacggccaactgcgcccgcagcgcattgcactccggcgcaagatacagcgcacccccctgcggaatgccgctgaggattccctggcagacggcccaggcaaaggcatcccgcgcccaatcggccacggcggcggtatcggcaaagccgcgcagactctctgcgcccacggtgctgcagccctgcaatgccgcatagcgatagaggaaggtcaccgcctgctggcgggtgaccgggtcgtccgggccaaagcgggccgcgctgtagccgtagacgatcccctgctctgccgcccaggcgacggcgtctgtgtaccaggtgcctgcggggacatcctggaatgctgcacgggtgcggggctgcggtgtcccggccagccggtggaggatcgtcacgagcatggcccgggtcgtcgtcagatggggggagaaggctgtggccgatgtgccctgcagcaggcccagccgataggtatagatggcggcggaataataccaatccgtcggcgcgagatcagaaaacggggcggtgctgccggacaggggcagcgtctccgggtcgccctggctgcggtagcagatggccagcagggtcgcgccctgccgggtgtacagcgcggcgttggccgatcgatttatgcaaaggcgtgtctcgtctgtcagcgcccagccgtcgtcagctttgagctccaggccgagataataggccccggtaccgaagacggacgcaccgtccggcagggggtcgtcctgctgcagcgcggtgatggagttataccagcgcccctgggtcagatgaagggcagccccggcgtcggaggccaattcgggtgtggcctgcggcaggcgccgcccggtctccagctgtgctggcgtgccggtgacggtcagatagcgcaccggcttcgtctgcgctgcctgcacccggcccggcaagagccctgccagcagcgccagcgcgcagagcaggggcaagatacgtttcttccacataaggtatcctcctttcggccaaggcggcggtgccgtctctggcacgcgtggggtcggcttggtatttccatcataccatttccggcagcaccctggcaagaggaagcgagatttttttgcctctttttaaaaagtagcgccttgccgcgggcgtttccatatgataggatagaagaaactggggcccgcggcgctgccggcttgccccacaggtccgcccagacgcacaacggaacgccacgaaggaggataacatgaaattacgaagactgggaaagacagagctgcaagtcagcgagatcggcttcggtggagagtggctggagcgccatccggaggcggacggtatcgaactgatccgctatgcgtcggcgcaggggatcaatatcctggattgctggatgccggacccgaagtccagagatatcatcggtgaggggatcaaagaaaaccgcagccagtggtacgtccaggggcatatcggctcgacatggaaggacgggcaatacttccgcacgagggacatggcctatgtccgccctgcctttgaagaccttttaaaacgcctgcagacagattatatcgacctggggatgatccattatgtggattctgagaaggagtggaagcagctgcagcactccgaatttctggactatgtaatggatttgaaaaaccgcggcgtgatccgccatattggcatcagctcgcataatccaaagatcgcggtcaaggcggcggaatccggttatgtggagatgatcctcttcagcatcaatccggcatttgatctgctgcccgccagcgaggatcttgacacgatgtttgtggaagagtttgacgcaggactgaaggggaccgacgccgaccgtgcgcggctctaccgcgtctgtgagcagaatgatattggcatcaccgtgatgaagggctttgccgggggcagattgttcgacgcgaagcgctctccgtttggggtgcgcctgactcctgtgcagtgcattcattatgccctgacccgcccggccgtcagcgcaatcatgtgtggctatgacaccaaggagcaggtggatcaggcagtggcctatgaacatgcgtccgaagcggaaaaggactatgcatcggtcctctccaatgcgccgttccaatcctaccgcggggaatgtacctactgcgggcactgtaagccctgtgtggcggagctcgacattgccataatcaataaattttatgatcttgcggccatgcagccggaggtaccggccacggtacgggcccactatgaatctttagcgcataccgcatccgaatgcatcggctgccaggcctgcgaatcccgctgtccctttggcgtgcccattgcggcgcgcatgaagaagacagcagagctttttggctgctgaagactgacggacgggttgtacggaggcccatatacagaaaagcagtgactgatgccagtcgctgctttttctgtgcagtttttgcgctttttaagcctcgcggagcaggtgcgcttggtagagtagacaggcggcttcccggcgggtcaggctgcggtcatagtcggcgcagtcgagctgcaggtctgccgctgccagcgtgctgacggccgacgcggcccaggtggggaggatggtctccggggcgaagaccgtcgccgtctccggctggggcagctgcaggatgttttgcagcatcaccgctgcctgggcgcaggtgacaggttcgttgggcgcaaacagcagtccgtccgacgcgggaataccggagacaacgccgcagcgcagggcagcgctgagatagggccgtatccacgcaggcgcgtcgccctcgtcggagaagccggagacggtctcgaccgcatccggcgcgagcccggccacctgcatggccatgacgaggaactcaccccgggagagggtggcgttcggctcaaagcaggcttggccgcctagctcccggccggagaacaggccgctggcccggagccacatggcctcaaactggtcatagtcgctttcaagatcggcgtaggctgctgcatcggcggcttttagaatgcggacggtgactgtcgcctcattggagacattgcccgccgcgtccgtcgccgtataggtgaagcgatcggtgccgaccttgttttccttcggtgtatagaggaaggtgccatcttccgagatggagacctcgccgcgctttggcgcccggacgagctggtaggtcatggcgccctctgcgccgccctcgacctggagcgtgccgttattggcaatgttccggtaggtctcgagcttgccgtccttcgcgaccggaggctccgtctttccgtcggagacggcgacggtcagctgcgtctggctgcccagcgtgccttctacaatggggcagtaggtcagggcgagctcaccgtcgcgctgggcggcggggcggagcgtaatggcatccaatgcgctggccgggagcacatcaccggcccgcagtgctcgactgccgtagcaaaagctgccgtctgccgccgtgggcacggaccggatcaggatcccgtcgacggtctgcccggcggtaaaatcctcgctgtgcagctggcatgtctcgtcccaggggacctcataggccgcggcccaggctgcttgggtcagcagcagggccgccccggcggcggccagcagccgggtcattcgttgcgtcaatttttgttgcatcagagactacctcctaatgaaagtcatcgctggtagtatctgccgccgcttgcggaatatgcgccggactggaaaaaatttacgctgctggggaaaattctgccgcgcggcaaaaatcccggaaatttttcgctgattttcgtgcaaatggggattgccgggggcatggaaatgtggtaaagtataagaaatcatacctttcgtatcgaaagagccggtacaagtactccagaaaggagttttccccatgaaagaatttgacatcaaaacaaaaatctattttggccaggattcgctggaccgcctgaaggcaatgccctatcagcgggtgatgatcattgccgacccctttgtcgtctcctccgggatggtgcagcacgcggtgcgccgcctgcaggctgccggaaagacgtattcgatctatagtgacgtcgtgcccgaccctccgatcgagaaggtcgtcgctgggatcggcgctgcgctgcagttccggccggaggtcattgtcgccatcggcggcggcagcgccattga

SEQ ID NO: 3389 - DNA, 8908 bp, Unknown
  16S sequences of unknown bacteria
cccaaaagcagaaacagcagctggctctgaccggcctgacggcgctggtgctggtggcagtggttttcgcctttgccctccatacacaatcggcccggcgcaccctgccggaacgggtgcaggctcatatgcccgcctgggtcactcaggaattgctgacgcccaatgaatattcccgtccccaaatcccggtcaaacaggtcaacgccatcgtcgttcattatgtcggcaaccccggcacctctgccgcggccaaccgcagctactttgagggtcttgccgtcagcggcgaaacctatgccagcgccaactttgtcgttgggctggacggcgaaatccttcagtgcgttcccgtcagcgaagtggcttactgttccagcgaccggaactacgacactgtttccattgaagtttgccaccccaatgcggaagggcgcttcaacgatgttactatggattccctggtgcgcctcaccgcctggctgtgcggggaattcggcctcgatccccagcgggacgttatccgtcactacgacgtcaccggtaaggaatgccccctctactacgtccgaaatccggacgcttggcagattttcaaagagcaggtgcaatctgccgtagaggaagagcggcaaagcaattcataacaagacaggccccggttcgatccggggcctgtttctgtttctgtaattttgatgtgggacggttgccgttcagtatgcaacaccctgcgccagcatggcgtcgcagaccttcaggaaacccgcaatgttggcgccagccatcaagtcgccctcctcgccatactccttggaggcatcgtagcaggcgtggaaaatgccttccataatttccttgagtttggcgtccacttcctcgaatgtccaggaataacgcatggagttctggcacatctccagagcagaagtggccacgccgccggcgttggccgccttggcaggtgcgtacaggacgccggctttctggtacaccgcgatggcttcaggcgtggagggcatgttggcgccctcggccacgcagaagcagccgtttttcaccaaaagttcagcagacgcaccgtcgatttcattctgggtggcactgggcagtgcaatgtcgcaggggatcgtccagataccgctgcagccttcgtgataagtggctgtgggtacggcgtccacatattgcttgatacggccgcggcgtacttccttaatctccttgattacgttgagcttgatgccttccggatcatgaatatagccattggaatcggacagggccactacctttccccccagttccgcagccttctccgcagcatagatggccacattaccgctgccggaaatcaccacagtcttacccgcaaaagaatcgtttttcatacacctgagcatttcagcagtcagataacacaggccgtagccggtggcttccgtgcgggccagggaaccgccccagctcaggccctttccagtaaggacacctgcaaactcgttgcgcagacgtttgtactggccatacatataaccgatttcccgcgcgccggtgccaatatcgccggcgggtacatcggtgtcggcgccgatgtggcgctgcagctcagtcataaaactctggcagaagcgcataatctcagtgtcggacttgccctttggatcgaagtcgctgccgcctttgccgccgccgatgggcagcgtagtcagagagtttttgaagatctgctcaaagcccaagaacttgataatggacagattcaccgaggggtgcaggcgcaggccgcccttataggggccgatagcgctgttgaactgcacacggtagccgcgatttacatgcacaccgccctgatcgtccatccaggtcacacggaactgaatcgcgcgttccggctcggtaatgcgctccagaattgcgtttttttcaatggcaggattcttctccaccacaggaaccagagactccagcacctcgcccacagcctgcaaaaattccggctcgcccggatttcgcgcggcaacactgtcatagacccgctgcacatattcgttcttgaatttcatagatggtttcccctttctattgcacatgcaactctgcatatacaaatctgcttctattatagcaaaacttcacgggagtacaatagttttttacatcactgtgttaaattttttgaatttttttatcgtcagtcctgcaaatgtcttccggtgaaaaactgatgccgtcaaagtgttttttgtcggtttcgccaaataaagtgcaacccctgccgcttataggaaagcggtgctttccgtatagaaagcaccgcttctttgcataccgtttgtgcgcaaaccattctgccgcggccgatcaagccgtcactgctgccgcagccgccgcactcttttccgcaaaatactgcacaatgtcctcccggggcacgacgcccacaaacatgtcccggtcatccacaataggaataaccgcgccgcacagcgctgcacgccgcagttcatcgtccgaagcagtaatcttcagggccggcggcgcgccgcggcgcagcagctcggcaattttgtgatcctttgccgcctcatagccgccccagtcgatgatatgccataggaaatcaccttcgctgactgtgccgagataccgcccgtcctgattgaccacgggaacctgcacacagccatggctgcgcataaagcgcagtgcctgctgcacggttttataatcgtaaaaaaacggacactccgtctttctctgcagggagcgaataatattcattcgatccgtcctcctttttcactttaaaggatgttatatttatagtatacgaaacaatcatgaaaaaactgtgaacagaaggcaaagaatgttatctaaaaatccgcggcagcttttggttatttctctataatcattctgtatattcccacaaccttttaacactttatgcaatgacgttccaaaacaatgaaaaaagaaggcccgaaggccttctttctcctccccaggaaccgcacagaaacgatcccgaattctgttctgaacacctgctcaaaatgccacaaccacgccgccgtcaccggcatataccgtactgatgccgccggtacggaccatctcaacctgggtaaagggcagctttttaaacaggaggttgcgcacatacaccgcccggtcggggcagttgcagtgcgaaatcaccagggtgcggccttcaatgccgtgctttttggccttttccgccgccgcatccgccagtctggccagagcctgctttacgctcagcgcctggctcacttttcggatggtaccggcaggagtgccttccatcaccagcttaatatgcagcgtaccggtaatcaacgcctgcacttcgcttaaacggccgtttttgcgcagattgtcaaggttttccagcacaaacaacgtggtcaggtgggcaatgaaatgatccatctcctcgatcacctgctcaaaaggcaatccggcacggcacagctcgaacagcttgatgagcagcgcgctctgcccagccgaggccgaatgggaattaaacacatggatctttttctccggatgctcttccaagtagatatctctggcctggactgcgctgttgtaagaaccgctcagttccgccgacaacgtaacgacatacacttcgtctgcaccttcaaaggcatccatataccactggggcgcggggcatgccgtaccggttccttccggcgaagcagccatgcgggccaccagatcctccgtggtcagcataccgttgtccacatattcctggttcccaatgcggataatcagcggcaccatggcatattccggcgcgtccttcagccccggtacgggatcagtgcagctgtcgccgataattttaaaactcataagccatctcccaaaacaggtcctctaatttgatattcaaaaccacattacataatacctttcatttacagtatatgcttttccggcccgcttgtcaatcgaaaagcgggccggaaacaaattatttacagacaaaaaacaacacggatcagtctttggttccccctgggagtgatgcgccgccgaagccttccgccagcaaagcgtgaagtccatatgcttgccatgcccccgcgtcgttggcacacaggatgcgcatctgcggcgcaaattcaaacagaaactgccggcatagcccacagggtgtgcatagttctttggaagacccggccaccgccaacaggcggaaatcccgccgtccttcgctgagcgctttggctgctgccacccgttcggcgcacaggccgcagggataggacgcattttccagattgcatccagtgtagaccgatccgtcgccgcacagcagcgccgcaccgacacggaaacccgaatagggcgcataggcacgctcccttatattcagcgccaaagctaccagttcatgttctgtcatgacgctctctccttccctgtgctcaggccagttcggcctggcccgtatacagctgataatagcggcccttttcagcaatcagatcatcgtggtcgccgcgctcgatgatcacgccctgctccagcaccataatggcatgggagttgcgcacagtgctcagccggtgagcaatgacaaacaccgtccggcctgccatcaggcgatccatccccttttcgatcagcttttccgtgcgggtgtcgatgctggaggtagcttcgtccaggatcagcaccggcggatccgccacggccgcgcgggcgatggccagcagctgccgctgtccctggctcaggttgctgccgtcggatgtgagcatcgtatcatatccatgaggcaagtgacggataaaggcgtcggcgttggccagtttggccgcggccaccacttcttcatctgtcgcatccaggttggaatagcggatattgtccgctatggttccggtgaacaaatgggtatcctgcagcacaatgcccagagaccggcgcaaagatgccttttgaatgtcccgcacatcaataccgtcataagtgatggtaccgctttgaatttcatagaaacgattgatcagattggtaatcgtagtcttgcccgcgccggtggaaccaacaaaggcgattttctggcccggctttgcaaacaagctgatgtcgtgcaggatcaccttctcgtcgttgtaaccgaacaccacatggtcaaaacgcacgtcccccatcagaggcaccagcgtgccgtcgggctttttccaagcccagtcctcggttctgcggtctgtttccacaatattgccgtcatggtcgccggtcacattaaccagcacaacttttcccgcatcgcattccggcgtttcctccatcacttcaaacacgcgctcagcaccggccacagcagccagcaccgtattcacctgctgcgcgatcatggatacaggctgggaaatctggcggacatactgcaaaaaggccaccagcgtgtcgatataaaacatgccgttgattgcgaacaggccgccgatgcagcaggtcagggcataattgatatgggaaatattgcccatggccggcatcattgcgccggcaaaggtctgggctgccgtagaagacttacggtaggtttcattgataccgtagaagccctccttcgctttttcctcgtggttaaacactttgatgactttctggccttcaatcatttcttcaatatagccgttgacggcgccgatatccttttgctgctcggcaaagaagtagcggctgcggctgccgatgccgcgcaccaccagcagcatcactaccaaaacggcaacggtaatcagcgtcaagcgccagctgaggaatagcatcatagccataatgccgacaaaagtcagtgcactggaaatcaggctgccaatgctgttgttgatcatttcgctgatggtgtcgatatcgttggtgtaccggctcatcaattcgccgtgggtatgccggtcaaaataccggataggcagggactgcattttttcaaacaagtccttgcggatcgtataaacggttttctgagaaatgtgcaccataatgcgcgaataggcaaaagagcacagcgccccggtaacatataccccggccatcagcatcaacacctgagccagaccggcaaaatcgccggccagaatccggccggtcgccggtttgagcagataggatccgcccaccgtacaggctgtattgaccagcaggaacacaatcaccagcaccatggacagcttatagcgtcccacatagtgcagcagctggaacaccgtttttttcgtgttttggggtttttcataggtttgccgttttcccggtcccattttagccatcgatgttccctccttcctgctgcgacaaatagacgtctcggtaaatttcgctgctttccatcaggtcttcgtgtttccccaccgcagaaatcttaccgtcatccataacgatgatctggtctgcatcgcagacggaagcaatgcgctgggcaatgataatttttgtggtttttttcagctctgtggcaaaggcgcggcggattttggcgtctgttgccatgtccactgcggaagtggaatcgtccaaaatcagcactttgggctttttcagcagagcgcgggcaatacacagccgctgcttctggccgccggatacattcacgccgccctggcccagatccgtatcatagccattggccagacggtcgataaattcatccacacaggcaatccggcaggcctgctcaatttcctcctgggtggcattttcattgccccacagcagattttcccgaaccgtgccggaaaacagcgtatttttctgcagcaccatggcacaactgtcgcgcaagtgctccatgctgtatcggcgcacatcccggccgcccacactgacgctgcctttcgtagcttcatacaggcgggggatcaattgcaccagggtcgattttgcactgcccgtgccgccgataataccaatcgtctgcccagcctcgatatccaaattgatatcctccaggttccactccgggctgttgggatcgtatttgaaatacacatggtcaaagcggatactgccgtctttcacacgcgcagtggtatcgcaatgatcgtcgttgatgtccggcgtttcgtccagcacttccacaatgcggcgcccgcaggccacactccgcgtcagcatcataaaaatcatggaaaccatcatcagagaaaccagaatctggcccacataggtgaaaaacgtggtcagcaggccgatttccagtgtgccgctgtcgaccatatgcccgccgaaccacataatggcaatgatactgccatagataacaagcatcataataggcatattgatcaccacgcggccaaaagctgtctccgaagcgcgcctcaaatcagtattgcgcgcgtcaaatttctgcttttcatagtcctcccgcacaaaagatttaaccacccggatagccgtcaggttctcctgcacggacaggttcaggctatcggttttttcctgcagtttgcggaacagggggccgactttcaacaaaatcaggaacaccacaatcgccagaattggaatggccaccagaaacacccgggacagctgcaccgaaatcaacagcgacagtaccaatgccgacaccagcatgactggcgcgcgcaccagcaggcgcatgcccatcatcatggtcagctgcatggcgttgatgtcgcttgtcaggcgagtgatcagcgaagcggtggaaaaccgttcaatattgctgaaggaatattcctgaatacggtcatactccgcagcgcgcagattggctccgaaaccctgacctgtttttgcagacaagtaagccgcgctgataccaaagcccagggacacaagggccatcgccaccatcagggcgcccatgcgcacagtataggacgcgtcgccgctttggatacccacatccacaatccgcgccatcaccagcgggatcagcagttcaaaaacggcttccgccgccgagcagataatacccaggataaaccattttttgtatggccgcagatacggccagagttttttgatcatgcttttgcttctcctcccttgagattctccatcacgcggaaaagcagccctttcagctgctcccgctcctgcggggcaaagccttcgatagcctgtgcttccacagcccgcatgccttcggtcacttcccgttccagcaggcggcctttttctgtcacagtaatgctgcggcagcgcccatcccgcttgcctggaagccgcaggatgaagcctttttcctccatccgccccacaatgccgttcaccgtgggcgctttcacgtccagcagtttttccagatcccgctggttggtttctgtaccctgtttgacatggatcagatacaacagcactctggactgcgcgttggtcagaccgtgccgttccacattttcatccacccgctgtttgaacagctgcgccgccgcgcccagcatgggacccacatactcccatttaccgctatgatagcccaccggctccccttcctttcgccaaatagttatcgcgctaatatttagtctaataaccattataggaatatagacaaatttgtcaagctggttttggtgatattcacaattttttcacatttcccccgacagaaaaaggagcagacgcagtaagcgcgtccgctccctttccttttataaaacgtcatacagggcattgaccaccaaccaattttgtgcaaagggccggtccagattccagtagcccacgccggccatgccatagcgcgctgccagcagcagtttgtcctgaatgctccgcgcatcctcgaaccagacaacatgctcccgtccttcctcatcccaatagcggaaccagggtgcgcgggccgtttcgtcaaagaaga

SEQ ID NO: 3390 - DNA, 3799 bp, Unknown
  16S sequences of unknown bacteria
cctcccccctgcaccccccttctttcaaaaagcttcaaataaggggaatacggacaccctcaaacgggcgggaatacaactccaagtgccagtccgggacgcgattcctgtcaaacgataacgatgaactgacaccccggcacgattcatccgtccccttcacgacagcgccgccgagcacaacagtcggtccgtccgcaccgccgataattccgatcgccgcatgactgtcagaaccgcccgcggcatccttcatcggtatgtcactccgattataatcgcaaagccggcagacctcccgcggcaaatccggctcaatcctgtacgcgacactcgtcatataccgcggaagccgcatcccgccggacaccacgtcaccgatatcgaccggtgtaacctcagataccctcagcgtatgcctctcgccttcaggaaactcaaactcagtctcaccactcacatcgaccggaacagacctcacaagcttcatatcagccgtcatgacaatctccgccgattttatctcgtccgccctgaacttccccgcgaaattcagccgccagatcacaaccgtatgcgcttcatcgagcgaataatgctccttcaccgcaagcgctgtatcctcggtttccccatgctccggcaccgggtcataaacgcaggatgtcccgccggaaccgacaagcatctttccgttcacgatgagcgccgcgttcgggtcgacattcagcgggttctcactctcgattctccgccgctcgccctccggaatgtcgtctccatactgaacgagaaaacagttcctgtcatagaattccgcgtacttcgcgttatcgacaatgtgcagtatatcgacgacaaatccccgcgggcagacatagattgacggtatcctccactcgtcgccgttcagcgtaacgcttctgccgacccggatctcttctccggcgcgcccgcgtgaagccggagcgtacagccccttgtcaaagtacaccttccatgctttaggttttctcgccggttcatcgacgggcatatcaaactccgagtaatcgaagtccgcctgaagcgaacggatatagtcatacgggtcagccatcggcagaacaccaagcttttcacgaagctcagccctagccgcttcattgccggaaccgctcatcgccgcgccgcgctcgccctcgaaggtctccctgtcatacctccacgccgattcaatgacgctcgtatctccgcaagacacaagcagagacagaaaatccgcgaagctccttgcgaccggacgaacatacctcggcgcgagatccatcgggcagacgcagaacaccatgtccccgtgcccgccggcaaagcagaaatgtatcccgtcgaccccgacacgcccgaagacctccgccctttccggcgtgcagaaatagcgctcgtcctcagtcatatcgcagagtttaagcccgagtgcgctcaggtcgatgccgctgtcgacaagtttccgaagttcctgatgtttcgttttcttcatagcaatctcacctccaaaaagagaccgcacacataagtacggtctccagtattatgttaccaaggcataacgctcgcggagatgtccgccacgctctttatgttgttctcgtccatgtatttcgcaatcccgtcggcaatctcgagcggcagatacgggttcgcgaacatagcggttccgacgccgaccgcgtcagcaccggcgataagcatctcgatcgcgtcctcggcgctcgaaattccgcccattccgagaatcggcagactgacggcgttcctgacctgccagaccatcctgaccgcgaccgggaacaccgcgggacccgaaagtcctccgcagttgttgtgaagaatcgggcgtttagtctttatgtcgatgcgcattccgagcagggtgtttatgaggctgagagcgttcgctccaccggcttccgccgccttcgcggtttcggtgatatcggtgacgttcggcgagagcttcactatcagcggctttgaggtgtggattctgacggcgtttgttatctcgctgacggtcttcgggtttgtgccgaaagcgacgccgccctccttcacgttcggacaggagatgttcatctcgacaaagtcgacgtcggtctcgtccagtctttccgccactttacaataatcggagatggtcgaaccggcgatattggcaatcacgacagcgccgtcctttttgagccttggaagctcattgtcgataaaagcgtcgacgccgggattttgcaagcctatcgaattgaggattccggacggcgtctcggcgatgcgcggcggcgggttgccgagccttggcgcgagcgtcattcccttgacggcgatagctccgagctgttccggtctgtagtacggagcgtactcctcaccgaagccgcaggttccggagacggtgacgaccgggtttttaagtgtcacgcccgcgaaattcacggacagatctgcatttctcacttccatataatctccttcgcgtcaaatacaggaccgtcgacacatacgcgcttgtacttttcggtcgcttcattgttctctacaaacatagtcttgcacacgcaggcaaggcaagcgccgacgccgcagcccatgcgctcctccatcgagacctcgcagtcaacaccgtattccgcggcgattccggctacaaccgccatcattcccctcggaccgcagacatagatgatgtccgtctgcttcttttcaagctcctcgcggacaagctcggtgacaaagccttttcgtccgttcgacccgtcgtcggtgatgacagagaccgggatatcgtggctctcaaaaagctcagtcgaattgatgagcgagacgttccggaacccgaacagggctttcgcgtcctttccgtacttctttccgattgagaggagcgggtatatgccgatgccgccgccgacgagcagtgcgcgctttccctcatgataagtgaacccgtgcccgagcggaccgagaaggcttatcctctctccggtctttctctcggacatccatttcgtgcccttgccgcggacctcatagcagagacggattttctcgctgtcaatcgcctcacagaccgagatcgggcgtctgagcgtggttccctcgccgcacgcgacgtggacaatctgtccaggcagaacttcccccgcgatatccgggcactcgagaacaagctcgtacagctccgccgagtccgagatttttctgctctcatagacgagagcattatctttcagtttgttcattgtccacctcagataccgacggcttcgtcgatggcgtcgcgcatctctatgacggcttcccttgtgtgcttcttcaggttgtcaccgttgtcgcccgcctttttgtacgcgcacatgagccctcttgacgagttgactatcgcgccggagccggtcttgtcgaacgcgccgacgatatccttggcggttccgccctgagcgccgtagcccggaatcaggaagaacgtgtgcggcatcagacgcctgagctcggcgagctgacggggatatgtagccccgacgaccgctccgagagccgagtagcccttatcggtgatggtttccgcgccccactcgtcgatcttcgcggcgacacgatggaacagcggcatgccgcccgcgtcgaggtcctgaaaatcaccggaggacttgttcgaggtcttgacgagtatgaacgccgccttgtctctttcggcgcagatcttcgcgaacggctcgacgccgtcgattccgaggtaagggttgaccgtcacgcagtcgac

SEQ ID NO: 3391 - DNA, 4564 bp, Unknown
  16S sequences of unknown bacteria
caaaagccttatcatgcaagcatgaacggctttttgaccttttgaccctagcatctttatcatatcataaaatgcgtggggagtgtagcaatttttacataaaaagagcctgatccggcatctgttttgcagagtttgtccggtcaggcaaaggctttatttcgcctcttcttttttgtttgcaagatactgctgaattgatgccagtacctcatccgcattcagtccatgtaccatgcaagcctcctccagagactctccgatagaagacggacatccgacacagtgcattccggactccatcaggacatatgcgattcccatatcatactcgagcatatcgcccatggttgtctgctttgtaattaacatagcgttctcctttcaggatctttttcggatcattttcctctcctattattcccttttcttcgggatttgtcaagcacatcccgatcctgccgggaagttttgcatttttacaaaacagtaaatgaagcatggaattcgcctgcttcgtttaaacgcattctaacaaatcttcacaaccgcctttacaatatccgctttattattgacgctctcatccattgcttcctggatatcatccaacgcaaactcattggtgacgattcccttgagattgacccttccggatgcgaccgcatcgatcgccatcggataaatgtggcggtagcggaatacagtcttgaaggtcagctctttgtcgagcgccagactgatcggcatcttgatctctccggtcttgctgtagccgaccagaacgatcgttgcacccttctttgtcatctgcactgcctgccttgtcgttatctccgtgcctgccgtctcaatgaccagatcacagcccataccaccggtcagctccatgaccttcttcaccgcatcttctctgcttccgttaatgacaccgtctgcgccaagctccagtgccttatcaaggcgtttatccatgacatcgacggaatataccttcgatacccccatcgccttcaatgccatcatactcacaaggccgatacagcccgcacctgtcacgaccgcaacctggcctgcctgtgcgccgccctgccgtgccgcatgaaatccgactgcaagcggctcgatgagtgcgccctccatcgtgctcacattatccggcagcttgaagcaaagtcctgcctcatgtgccacatactcctgaaagactccgtctaccggcggcgttgcaaagaatacgacatccggacagagattgtatcttccggttttgcagaattcgcagtgtccacaggtcttgcccggctcaagcgccacgcggtcgccgactttcagatgtgtgacattttttccaacctccactaccgtgccccccggctcatgtccgagtacaaacggcggctttacgacatagtctccgatcgcaccggactcataataatgcaggtcgcttccgcagatccccacatattccagctttacaagcacctcatcgtcctttggctgcgggatgtcacgctcctcaaatcccatcttgccgattccaagcattaccgctaccttcatctttcctttcatttttttcctccttaaatacttaattaaactattttattatgtatttatattatgcctgtttccaggtgatgtcaagaaaatctgacggacgtcaccacaattcagcatttttctcaaattttatcctttgtttttggtcaaagtgaatatttgctccacaggtggttatatcttctctaaaaatgtctcaataattccgagcgccgcccccatcgccgcggttcggtttccaccgctgcatgcacggatataaccgccatcttcggaaaaggtattccttccggctgctttttcccgtacctgctcaatgtgagcgccgatccggctgccgacgtagccgccaagcatcacatcacagtccagaatcatatgaatattattcactgccatcgccagatccgaggtatacacctcccagagcgccgtcatttttacatctcccgcatccagatactcgaagaactgctccagactgccgcctgccgcatcggacagaatgccggccgcacagtacgcatccagacatcccagcttcccacaatagcatttccttccgcccggatggatcgtcatatgaccggcttctccgcatcggaagctgcttccctgcacgagcgttccgtgatgaaataccgctcccccgaccgtattgctcaaggacagataaaagaagcgctccggcatctttgcatgcatcccggctgcgtatgcacccgcattcgcatcatttagcagctgacaggggtacggaaaataccgcgtcacctccgcaaacgggatcgcatgcagcccaagcacatgtgaataggtgatctcctgcatggtaaggtctacaattcccggaaaggagatgccaagtcccagaatccggctgcgcgacagctccgtttgccgactctggcaacggtcaaaaaatgcctccagctcctgccctgccctgcgatagtagtcttctgtatgtgcaaatggaaaatgaatgcgctcatacgccagacagcttccggtcagatcagcaagtgcgagtccgatgtggttcttcgtgatatcaagtcccagcgcaagtcccgtctctgccgctacccgcagcgccttcgcccgtctgccgccggtagacgccagctccccggtctcccgcacaagcccctgttcaataaattcgcgcgtattcgccgtcacggtcggaagactcatggaaagcgctgatgcaatctccggatttgacactgtctgtgtctgcgcacacagatagcgaaatatatgattgcgattattcttttttacttcaatatttgtccctcttgtctctctcatgtacggatcctttcgcatcttctttatacaaggctatcttaccatttaccttacattttcgcaattaaaaaagccttccgaagtccgaagacgccggaaggccaaaggtctgctgtcagacaggaattagtcctgtacgtacggcataagtgcaacgtgacgtgctctcttgatcgctacagtaagcgctctctgatgctttgcacagttgcctgtgattcttctcggaaggatcttacctctctcagagacgtatctcttgagcttgtttacatccttgtaatcgatctcattgttctctttaccacagaaaacgcaaactttttttcttctgcgcatgccgcctcttctcttcatcggagcatcgcctctatctttattgaatgccattactattcctccttttcggtaccagtcaactgcaaaccggtattctcttctacgcattatttccgaacacaccccaagtgggagatccggtcctagttgaacggaagctcttcgtcaattccgtccggaatattcataaatccatctgctgaggaagcctgtgccggtgacggcataggagaagcagccatcggcgacggtgcggactgccgcatcatgccgctctcagaagctgctgccttactctctgcaaattcctggtcctccactaccacatcggtcgtgtagaccttctggccatcccgattcgtgtagctgcccgtctgaatccggccagtcacaataatcttagtaccctgacggagatatttttctgcaaactccgcgctttttccgaaagcgacacagccgataaaatcggcattgttctcgccatcgcggcggaatctgcggtcaactgccagcgtatatctggcaactgccatggagttattccctgcggaataacgtacttcagggtctctggttaaacgtcccattaagatgactttattcattcgatctcctcttttctatttatgcatcctgtctaacgcataaatatctgatgacattctccatgatccggacacgtttctcaacctctgccgggcatgctgcatcagactcgaagcgaacgaaatagtaaaatccttcacgcattttctggatttcataagcgagctttctcttgccccactcgtctacttccgttacagtaccgccaaaacgggtaatgtactctttcaccttttcgattgtagcggctctgtcctcgtcttcgatctttgcgctgacaaccactgctaattcatacttgttcatgctttcgcacctccttatggtctctggcccctttccgataaaaggagcaaggaattaaaaaaatatatcacgaagaaatatactagcataaagcatccggaaaaacaagccctttttttcacttttcttctgtttttttccgcaatccacgcgtattcttctcgaccagggtacgcggtaccataatctgatgtccgcagccgacacatttcagccgaaaatccgcacctacgcgcagaatttcccactcgaaagcaccgcacggatgctttttcttgagctttacgatatcgcccacctcgtaatcaaatgccatcttttcccttctttctgacaaatatgatgatgttcctgcccaatattcacatatcgcaaagctacacatgcagcccgccaagcacctctccgatcggctcagaga

SEQ ID NO: 3392 - DNA, 2056 bp, Unknown
  16S sequences of unknown bacteria
gtttttaagcgagccccgtcccaccgcctcctacaatcatcatttttggggatttatttcgggctggttctatcgacagcttggcggaatcaaaattcccgagcgtgagatttccccctatttcgcaaaggaaaccgactttgtcaacgcgacggtggacggaatttcggtcaaatggagccgtcagcacggcaaaatcattctgaaaatcgtcaccgaccgtcagatgacccttaaaatcagggacaattataaggaaacattaaagcccggcgagcacagatatatgtttgagggctgagccgcccgctttgcttaacatcttaacttacgagcaaacgactcaaccggcggcgtgtgataaatcagaggcttattcgcaaatctacaatccctcagccggcttcgctgacagctccctttgcacaagggagccgaaaatatcgaaccgcagccgtttacatcagggagccgaggctttgcaaaaacatattttcgctttttctcaaagcaccgaaaccaaacaaaagattttatatttccccacattggaaataaaaagcaataggccttgtacatcaagcctcccttgtgtaaagggaggtggcacggcgcagccgtgacggagggattgtcatttttctccccgtctctttcaattgagcaacagatgttcgaacacaaaaaaccgtccttcgggaaagacccgaaggacggttttgttttttaagctttttcggaaaagttcactcttttcccatggcatagaccatgtcccaaaatcgcaaatcaaaaaggctgcatttttcgaaaatttcgcaaaggcgctcactttcggcttcacttacaaaggctccgagcgcgtctattcggtcgataagcgccgcatttgtctgccgatattccgaggaaacataccccgcaaaccacgaaccgtagcgctcgtcggaaagggcattcggaaagcgctctgccgttttttcggcaatgtaggcatagctccaggagcagttgagcagagccacaagccccgtcagcaggtctcccgtctgcgcctcacagagcatatagtggctgtaggcgctgttgtcgatgtgagggcgggcgtcccgtatctcctcctcggtgatgccgagacgtttcataaagggaatgtgggttcgcagcgtctcgccgacggtgtttgaaagctgctcgcttaaaaagcgaatctgctcaaaatcgtcggccttttgaattattgccgcaaagatttttacataatccttaagataaagataatcctgcagcatataatagcggaatttttcggccggcagcgttccctcggccatttgggtaacaaagggatggcaaagataacgcggccaaactttttctccccgctcaaaaagcttttgcgaaagcttcatgccgttattttccctcatttgtgcgcgataatggcgacatatccgccgctctgataacccgaaacaacctcttcaacatcctcgtttgtgtacatggggtttttgagaagggtctggtaaaaatcaaaatcactaaatccgagctgctttaaaacgtcgattttttcctcggtggaatgccacactccggcgcagcacagctcaaagggataagggagcttaggcataacgccgtcgaggaaggggtgatcaaacttacccaccgcctttgcaagaagatacataaagccgaaggcgctctctttgggaacgtcgagggaaataaattttccgccgggctttaaggcctttttgcaaacgtcaaaggcacgggtaagatcctccatatagcttgaactgccgttgagatagataacgtcataggcgttttcctcaagctccgcgtcctcaatggctccgaaagcgatgacatttataccgcgcttttgagcgattgcgcccatatcgcgggagggctcgataccctcgatgtttttgcagtctatcatgctctcgaaaaggccgctgccgcagcccaccgaaagcacccgcttgcccgaaacatcgcccagcgcctttttaaaaagggccagctcgctttggaa

SEQ ID NO: 3393 - DNA, 1969 bp, Unknown
  16S sequences of unknown bacteria
cagcctttgtggagtttttcggcgttcacacgccggtgaaaggaaaaaataaatggcagacatattcgatctgttcaaacagatatcaaaaccgcagaccccggcggggaacatctcgttcctgctcgtcgggctcgggaatcccggtccggagtacaccttcacaaggcataattccggttttctcgcgatagactatatttcgcagaagctcggcttcagagttgaccgctcccgcttcaaggcgctctgcggagaggtcgtgatcgcgggaagacgcgggctcgtcatgaagccgcagacctacatgaacgcgtccggcgaagctgtgcgcgaggcggcggatttctacaagatttcgtcggagaacatctacgtcatctgcgacgacataagcctcgcgcccggtcgggtgaggctccgtacaaagggcagcgacggcgggcagaaggggcttcgcagcatcatatatcagctcggctctaacgatttcccgcgcatccgcgtcggcgtcggagagaagccgagacctgactacgacctcgcggactgggtcctcggaaccttcccggagagcgacaagaccgcggttttcgaggcgctcggacggatatgcgacacgctcccgacacttatcggcggcgacaccgacaaggcgatgaatatactcaacaccgccgcgaaatgatttttcggagatttttaacggatggcacaaatgacagaaatcgacgacagaatacggctggtagccgactcgatactcctcgagaaggagttcgaggacatatcgaagcagataacctcgcgtcacggcgagacgcttcatcctatcgcggtgaacggtctctcggacggcgcgagggcggttttctacgccgcgatgataagaaagacctccggaaagcgtcccgcgctcatcatcgtcccggacgagaaggagggactgaagctatcgaacgccctcggcgagctctcggtgaagacgctgacatatccgctccgcgacttcatattccacaagataacctcgtcgcacgaatatgagcacgaacgtctcaggacgctctcagcgctcgcctgcgcctcggaagagtgcggggctgtaattaccacccccgacgccttaatgcagctcacgatgccctctgaggtcctgaaacgcgatacgatgatcatcgaccgcgacgagccgctcgacatgaccgatctcaccgctcgtctcgaggcgggcgggtatgtccggaccgaccttgtcgacggcacggggcagtactcggtgcgcggcggaatcatagatatttacccgccgtcctccgcggctccggtcagaatcgagcttttcggcgacgagatcgaccagatgggctacttcgacataatgacccagagaaagaccgggaacatcaccgcggtcgacataacccccgcccgcgagctctcgatcaccccggaggcgcgcgcggaaatctcgaaggcgatagagacgcagatgaaaaaagcgtcggacgagcgtgtcaaaggcgagctctcggcggagcttgaagcctgcgacaatagtctcgagctcgagttcgcggacaagtacatctcactcatctacgagaataaaacgaccctcgccgactactacctcgacgcggcgaaggcggacggcgtcatgccgcttatcatagttcaggagacgaacgcctgcgccgacagaatgaaggccttcgagttccacatcacaagcgagatcgagtcgatgctcgagcacggagaggtttcgccgagatacgcgatgtacgcgcggtattcggattattacgaggtcttcaccgacaagtgcggcgcgctgctctgcgacgcgttcatgcaggggaacggcggcaggctctcgggaatgtactcgttcagaacccgcgctacggcgtcgtatgccgacaacatcgaccttctcgccgaggacctgacgtcctacgccgga

SEQ ID NO: 3394 - DNA, 5107 bp, Unknown
  16S sequences of unknown bacteria
cccgccccttccaatgaggaagtgctcctgggcgaaatccgtgatctgctcaaggcccgcacggagcacgagtgagatgcgggaaattattcgccaaggcctgattgatctgggcctcgaaagctgtgtccgggcgggagcatcggagcatctcacccgctacggccagatgctcctggaaaaaaacaccgtgatgaatctgaccgccatcaccgaagccgacgacgtagcacgactgcacatgctggactgcgcggcgcttctgaactgcgcagatttcgcaggccgacgcctgctggacgtaggtaccggcgcaggctttcccggcgtggtgctgaaaatccttgtcccctctctggatgtgaccctgctggacagcttgaacaagcgcctggaatggctggaggaagtgtccaccgtgctggctctgcgggacatccgcaccgttcatgcccgggccgaggaacaggccgcccaaaccgacttccgggagagctttgacttcgtcacttcccgggcagtcgccgacctgcgcatgctgtgcgagctgtgcctgccctttgtcaaagtgggcgggcaaatgctggccatgaagagcgcacaaagcgcggaagaaaccaacgacgcggcacgggccgtatcgatcctgggcggacggctgctgccggcttacgactataccattcccggcacgtccatcacccaccgggtggtgcgggtggaaaaaaccgctcccacgccctcccggtatccccggcgctttgcccaaatcaaaaagaagccgctgtaaaggcgaaaaggagctgacacttttgggaactgcatatgtggtggcctccggcaaagggggcaccggaaaaacctccctggtggcgggcgtcggcgcggccctggccgccgccggacatcgaacgctgtgcatcgacgccgatatcggtctgcgcaaccttgatattgtattgggcatgaccgaccgggtactgatgaactttgccgatgtgatcgagggacgctgcacgctggaaaaggcggcagcgcagcaccctcagctccagcagctctatctgctcactgcgcccatgtccctctccccgggccaaatccaggccgagcagatgcgcaccctgctccaaaaagtgcgggaacagtttgccttctgccttctggacgcaccggcgggcatcggttccggcttccgtctttccgccagcagcgcagaccgagccattatcgtcaccaccaccgattcctcctccctgcgcgacgcacagcgggccgtgatggagctttcggaatatccgcagctgcgttcaaagcatctggtggtgaaccgggtggaaaagcggctgctgcgcaagctgcaccgcaacattgacgacgccatcgacaccgcgggcctccccctgatcggcgtggtgcccgaagatgaaaaggtgcgcctggccaccaaccgggaagtgcctgtaattttgaccgagagcggcggcgccgcccgagcctataccaacatcgccgcacggctgtgcggccgccgcgtgccgctgatgcggctgtgatttccgctctgcgcggaaaaaattaaaaaaagaaaggggacgattcccaatgaacatcgccctgatggcagaggacagcaaaaaagaactgatggttcagttctgcatcgcctactgcggcatccttgcccaccataccatttgtgccacggactctaccggccgcctggtggccgaagccacaggactgcctgtgcaccgctatctctcccacgcccacggcggtatccagcagatcggcgcccgactggatctgaatgagatcgatatggtcctgtttttcaaggaccccggcagcgacagcctgctcgacgatgtcaactacatttcctgcctgtgcgacgccaacaatatccccttcgccagcaacattgccaccgctgaagtgctcattcagggcctcaaatacggcgacctggactggcgcgacatcgtaaatcccaaaaccaagaaaatctgagcgtctgccgtgccggaacgaaccggcgcaccgcgctttttgaaaggaatcgcagcgatatggaaaaagtgagaccccacactctgtcgggcttcatggagttgctccccgccccccaggcgcagatggagcgcatcatggagatcctgcgcaaaacctattctctctacggcttcacacctttggacacccctgcgctggaagcggccgacgtgctgctggccaaaggcggcggcgaaaccgaaaagcagatctaccgctttcagaagggcgacagcgatctggcgctgcgctttgacctgacggtgcctctggccaaatatgtggccctgcactatggcgagctgtctttccccttcaagcgctatcagatcggcaaggtctaccgcggtgagcgcgctcagagagggcgtttccgcgaattctatcaggccgatattgatgtgatcggcgacggacagctctctatcctcaacgaggcagagatcccctccattatctaccgtaccttcaccgccctgggcctgcagcgcttccagatccgcgtgaacaaccgcaaaattctcaacggcttctacgccatgcagggcctttccgagcagtcctccgacgtgatgcgcaccgtggacaagctggacaagattggtgcagacaaagtgcgcgccatcctggtggacgattttggcgtcagttccaaagcggcggacgccgtgctctctttcattgctattgggggaagcagcgccgaagtgcttgccgccctggaaggctaccgcgggaaaaacgaactctttgaccagggcctggaggagcttggaaccgtggtaaaggccgtggcggacttcggcgtgccggaggatcatttcaccgtggatctgaccatcgcccggggcctcgactattacaccggcaccgtgtatgaaaccaccatgctggaccatcctgagatcggtagcatctgttccggcggccgctatgataacctggcggaatattataccgaaaaacaactccccggcgtgggaatttccattggtttaacccgcctgttctacgttctgggtgaacagggatatctggacccggcactgaacaccgcccccgccgacgtgctgatcctgcccatgagcaacgatctgagcgcggccatcgctctggccaccaaactgcgcggcgcaggcatccgtacccagttgtatgccgagcagaaaaagatgaaggctaaaatgaactatgccgccaaactgggaatccccttcaccgttttcctgggcgaagacgaaattgccgcgggcacagccaccgtcaaaaacatgaacatggccaacgatttcagcgaagaagagctgcagcgcctggccgcggaagggtgccacaagcaaatcactttgcccgcagacgaggccgtgacctatatcaaaaagcatttggacacagccgcacagcccacgccaatctgcgaccgcgccgccatcgcagcacggtacggcttggaaagtcccggaaaataaaatacaaaaccgaattctttttggttttttcacaaattgtattcacagaagcaatacaattccaaattttttaacaagatattacaaataggagttgatctttctatggagcaaagcacctcttaccgcagccacacttgcggagagctgcgcatggaacacgccggccagcgcgtgaagctggccgggtttctcgataacgtgcgcgaggtcagcgccagtctggcctttgccgtgctgcgcgatttttacggcgtcacccagctggtggtggaggacgaagccctgctgacccagctcaaggagctgaataaggagtccactctgtgcgtcaccggcacggtgcgcgagcgggccagcaagaatcccaagctgcccaccggagacatcgaggtggtgcccgagaccatcgaggtgctgggccgctgccgtcacaacgagctgcctttccccatcgcccgcagccgcgaagctgatgaaagcgcccgcctgaaataccgctatctcgacctgcgcaacgaagcggtaaaacacaatatcgttctgcgctgccaggtggtggccgccctgcgcgcggctatgatcgaaaaaggcttcctggagatcaccacccccatcctgaccgcctcctcccccgaaggcgcacgggattacctggtgcccagccgcaagcaccccggcaaattctacgccctgccccaggctccccaacagttcaagcagctgctgatggcttcgggcttcgacaagtatttccagatcgccccgtgcttccgcgacgaggatgcccgcggcgaccgcagccccggcgagttttatcagctggatatggaaatggccttcgccggccaggaagatgtgttccccgtgctggaggacgtgctgccccccatcttcgcccaatacggcaagtatggcaccgcctcctccgcccccttccgccgcattccttatttggaggccatggagacctacggctcggacaaacccgacctgcgcatcgacctgaccatttccgacgctacagaactgctctccggctgcggcttcggtcctttcgagggtcagagcgtaaaagccgtacccgtcacgggttgttccgccacccgtaagcagatcgacaagctctgcgccgacgtggaggtacagtccggtgaaaaggtatactggttccgcatggacgaaaaaggcgagatcgtgggcggtatcgccaaattcatccagcctatccgcgagcaggtgatttccgccctgcacctgacgcccaacactttcgtgggcctgacagcaggcaaattgctcaccgcccagaaaaccgccggcgtgctcatcaagctgctgcccgccctggcgccccagcacatggaccgggagcgctatgagttctgctggatcgtggatttccccatgtatgaaatcggcgaggagagcggcaagctggaattctgccataatcccttctccatgccctccggcgggctggaggcccttttgaaagccgaacagggcgagttggatcccctcaccctcaccgccgaccagtacgacctggtatgcaacggcgtggagctgtcctccgg

SEQ ID NO: 3395 - DNA, 3687 bp, Unknown
  16S sequences of unknown bacteria
ttctcctccacacggattaatttcttctataaagatttcatactcatgcatatacatttcctcctaaaattcactttttaaacattataaaaccttttccgttttatttcaaaagcgctttttactaaaaatgctactgctctgtttgaatgtttttacaatcggctttgaaacatgcacagtcatgctcgatcagtgaaagcttttccagaattacctctgtactgatcggttttgcaatatggccgttcatacctgccctgatcgccttttcacggtcttcctcaaaagcatttgcagtcattgcaacaatcggtatatttgcacatttcggatccttcaacgtacgtatttcccttgttgcagtatatccgtccatcttcggcatctgaatatccatgaagatcagatcatagcttctgccttctgcagatgacatgatattcacagcatccgtaccatcctctgcgatatccacatccagcccgatttcctgcatgatcgctgttgcgatttcacggttcagctcattgtcctctacaagaagaatcttcttccctttataactcctccggctttccgtccggttctcctgctttttattcttaatagcttccttctgctccggatttaattccgatatttcacatgcgagcatgactgtaaattccgttccttttccgacctcactctccacccggattgtaccgcccatcatatccacgatatttttggtaatcgccattccgagaccggttcctccgatcccattctctgtaacggtatgttcccgtgcaaacgagtcaaacacatgctcctgaaactccggtgacatcccgattccattatccttcacacggaagaccaccgtcgcatatccgtcttttttgcatggctgctctgaaacacaaacgcatatcataccgcccatcggtgtaaactttactgcattaccgatgatattcaaaagcacctgcatgagacgcagcttatcggtaatgatatcttcatgacatacattctgtatatcaatatgaagcttctgctttttggaatatacagacccagcaatgatcgttcttaaatcctgcagaatatccggcaagtgcaccgttgtatattcgatctggacggaaccgctctcgattctgctcatatccagaatatcattaatcagactgagcagatgctctccggatgtatggatctttttcagataatccaaaacaagctccttgttgtcaatatgtgttgttgcaagtgcggtgaatccaatcaccgcattcatcggcgtacggatatcatgagacatattattcagaaacgcggtcttcgcccgatttgcatgctccgcaacagcaagcgcatttctcagattcttgtcctgttctatctcgcgttccttttcttctgtcacatcacggtttgcaaccagtacggtacacagctttccatccttatcatatccctgcggcacaatgatcatcgtcagccattttccgtccgtcatctgaacggtaaagctcagcgcctcacgatcttccagacgctttgccaccgtactcctgtcggaaaattcccgatatgcctcctgaaatggctctgcaatcacctgctgtatcagttcttcccggcgtgctttggaaaggatatcccctttctgatccggcttcatattctctgaatcttttatgatttcgatttcctctgtttttaaattcacaagagatatcgaggtatatgcatgccccagtgcattgatcacgcaaagtctcttttgatcctgaagaatgcttcttttttctgttctgctcctgctcacacaggaaagtaagaaaagaagcagcgcaagcagcacatagattacacatacaatagttcgtgtaaggtacacctgagctgccgggaaaaagatatatgcatcgtagtcctttatcttttcccgacgcccacaccagtttccggtctttgaacgaaggcggacaactccattttcccctgccttaaactcattcttatacagagcctttgactcctctacggaatgtgagacaagctcctgtttattggtactgacaacctcatccgtatcgcagatcacaacacttccgttcatctcaaaaggaaaatccgcaaataacgatgccatcgtcagatctccgttcagctcacttacttcttctttctgtgcatatgcgatcaaaatacccggcgtatcctgtcttgccactgctgcaaaatcatagcgctttccttcgtttctcaggcgggtcgtataagtcttttccggatgctctgcaatatcacgtacataatcactttcgatcagcttctgccacaatggcctgacatctccgtcgttcgcagtctgttccagcacattcaggtgctgatccagcacaaggattcctgtcagacgctgttccctggcatattcgtccagcatctcagcactgagttttccctcctgtgctatgaccctgcttaattctgttgttttatccaaaaggcgtaccagacttttcacctgatcattcgtattatagatctcataccgttcaatccgggtttttacaaaatcgaacgtctcattcagcgtactgttcagtcttctgttatcgctcgctgtcagcagaagaaacgtcaggattcctgaaaaaatcaggataatcacaagtaaacacgcatttttgtcaaccctgctgctcttccttttccgtgtctgcgtcttcatctgtctgctcatttactttctcctcccagcagaatcccgtccgcatccaatccgtattttgtaactatttcttctgtaatgccctcatcctgcatctctttgagcgtttctgtaagatcggctgcaactgcttcgtgggttcctttttcaaaagctactccaagctccgattgataaacactttcctccagcatacgatatgcaccctcaccagactgcaccagactgccaagcattgcctcatgtccggcaatcgcatccacgtaattctttctgagtgcagcataaagctcatttgtcgtagaaaagcagttcacctgctccatctgcggaagctctgaatcaatattgtggagaaaaagatcctccgcctttgtggtcgcctggaccgcgatcctcttctcgctcagatcctgaagcgtccggatttcactttcattttttacaaccaccatctgacgactgtacaaatagggtcccgcccactgatatttttcttctcgtccattcatagagtagctgctccacaggcagtctattgttccatcggccagcagttcatccttgtcttcccagacaatcttctcaaatcttggctgatagcccagcctctgaaatgcttccctggcaagctccacatcgataccttcatattcgccatcacttgcctgatagctgtaaggttcgaaataatccattccaataacaatctccggcagtccactgtccgcagcatcctctttctttccgccacatccgcccagcataagactgccggtcagaaaaaatgcggtaatacaaattctttttccccgggtacggaaattatttttttgttttcttctcatatcccgttccttttcctcgtttatttctgcaacccgccgcttagtgctttgcgcacttgaagcgggggaatgcttatctgcggtaaagcggacattcgcaatccg

SEQ ID NO: 3396 - DNA, 25415 bp, Unknown
  16S sequences of unknown bacteria
tttcatcatatttttttgagaaaagtgtaacctatcattgacgactgtacataaattaataaaatatagcgcggcgggtacttgaaaaagtgcccgccgtgttgtataataaagtgatattcctaaagtgggaggatatggcgtgcttttaaaatacgcaatttcttcgggcgagcagaccgcatacgccgagagggttaaaaaactggcatataagatatacggtaaaactccgcttgcctgcgttgtcaccttcggctgtcagcagaatgtgagtgactccgaaaggctgaagggtgagctttcggaaatgggctacggacttaccgacgatataaacgaggctcaatttataattttcaacacctgcgccgtgcgtgagcacgcggaggacagggtgtacggcaatataggcgttacaaaggcgcttaaaaagcagaatccgaatataattgtggcgatttgcggctgtatggcgcaaaggcagagcgtggcggataaaataaagcgcagttatccgtatgtggatatggtgctcggcacgcaggttcagcacaggctgcctgaatttatctacaaacggctttcgggctcgggcagaatattcgagcttgagcttttaaacgaggaaatacccgagggcgttcctataaaaagggacggtaccttcaagggctggctgcctataatgtacggctgcgataatttctgcacctactgcatagtgccgtatgtaagggggcgcgagcgctcgcggcagcccgaggcgataattgccgaggctgaagaaatgattgccgcagggtacagggaaataacccttttggggcaaaatgtaaattcctacggcaaggggcttgaaagcggcataagcttcgcagagcttttgcggcgcataaatgcgctgccgggggatttcagaatacgctttatgacctcgcaccctaaggactgcacccatgagcttattgatacgatacgcgactgcgaaaaggtaagccgtcatctgcatctgccgtttcaaagcgggagcgacagaatactaaagcgtatgaaccggcggtatgacagggaaaaataccttgagcttgtgaattacgcaaaggagcaaattcccggactttctttaacgagcgatataatcgtgggcttcccgggggaaacctatgaggatttctgcgataccgtgagtcttataagagaggtaaaattctcatcgcttttcacctttatttattccccgcgcgagggcacacccgccgctgttatggaggaccccgttacccgtgccgaaaagggcaaatggtttgccgagcttttggcggcgcaggaggaaatagcggctgaaaacgagcagaagcttataggcacttctcacaggctgctttgcgacgcaaagggcactgccgacggttatatgtcgggtcacagcgagggcactgcggtagtggagttccccggggatgagagcatgataggcaaatttataaatgtacgcattgaggaatgtgacggcgtttttaaaggaaaaataatataaaataaaccgaaaggaaatttgaaaatggacgtaattaaagaggcaagaaatttaggcaaggcaattcagagcgacccgcgctttttaaggtatgcaaaggcacgccttgcaaacgacgacaacagcgagctgcaggacgcgataggtaattttaatcttgtgagaatggagcttgacagggaagcaaattccgaaaccaagagcgatgacaaaatcaaggagcttaacgaaaagctgcgcggaatttacagtgagataatgtcctctccctcaatggtggagtacaacaccgcaaaggctgacttagataccatgatgaacgagataaacacaataatttccaaatgcgtagacggcgaagatcccgacacctgcgatgttcacagcggctgcaccggaagctgctcaagctgcggcggctgccattaagcgttttaaattttaaaagtcaaaatgaaagaggatgtaaaaatggcagagctttctcctatgatgaagcaatatctgagaatcaaatcgcaaaacgaagacagcattttatttttcagagtcggcgatttttacgaaatgttttttgacgacgcgaagaaggcgtctgacgagcttgatctgacgctgacgggtaaggactgcggaatgggagaacgcgcgccgatgtgcggagtgccgtatcacagctgcgaatcatatattgcgaggctggtgcaaaagggctataaggttgcgatatgcgaacagaccgaagacccgaaaacggcgaaaaagctggttgaccgcgatatcataagggttataacccccggaactgtgattgaggatatgatgctcgaggagggcaaaaacaattatcttgccgccattgcgctgacaggagacggagtggggctttgctttaccgatgcctccaccggcgagtgccatttaacaagcttcccggccggcaattacaattccgccgtatcggatgagcttctgcgctttgcgccgcgcgagatactggttgcggagagccttaaggcgaaatccgccgctttgtgggattttctgcaggggaatttcaaggcgggaatcaccgtaaggaaagaggaggcgtttgagccgcaaaaaacagaggagctttttgtgaagcatttcggtatatccgagcttgaagagcgcggaatagataaggcttcctcaaaggcggcggcgcttggcgcggttatagattatctttacgaaacgggcagaacgggcagtatttcggtaaataaaatcgatgtttataccgacagccagtttatgcggctcgacatgacggcgctgcgaaatctggagcttaccgaaaccatgcgcacaaagtccaaacgcggttcgcttttgtgggtgcttgaccgcaccaaaaccgcaatgggcaagcgccttataagaagctggatcgaaaagccgctgcttaatatcgccgaaatatccttaaggcagaacgccgttgaggagctttgcggaaatacgatactgcgcgcggagatatccgattatctctcatctgtcagggatattgaaagaataatgactaaggtggtttacaaaaccgcatcggcgcgcgacttactggcaatagccgccaccgcacaccgcttcccggcaattaaaaatctgctttcatccgcaaagtgccgaatgctcaaggaaattcacgacggcattgacacggttgaagaaacggtatcgcttattgacgaagccatagatcccgattcacccgtatctgtcagggagggcggcataataaagggcggctacaatgaagaggtagatattatccgcggcgatatgtcaagcggcaacaattttctgaccgatattgaaaaccgtgaaaaggagcgcacgggaatcaaaaatctcaaggtgcgcttcaataaggtcttcggctactacattgaggttacaaactcgttcctcgataaggttccgccggattacataagaaagcagacccttacaaactgcgagcgctttattaccgaggagcttaaggaaattgaacgcagggtattaagcgcgaaggacaggatagaacagcttgaattcgagctgtttgacggcatacgcgacagggtcgccgcggagcttaaaagatttcaggcaacggcgtccgcgcttgcaacgcttgacactctttgctctttggcggaggtcgcagtcggcaaccgctactgccgaccgcttgtaaacaacggcggcagcattgcaataaaggcaggcaggcatcctgtggtcgagcaggtaatcaatactccgtttgttgcgaacgacacatttcttaatatgaaggataaccgctgcgccataataacagggcctaacatggcgggtaaatccacctatatgcggcagactgccataattgtgctgatggcgcaaatgggcagctttattccggctgaatcggcggaaataggcctttgcgacgctatttttacccgcgtcggcgcgtcggatgatttggcagcagggcagtcaacctttatggtggagatgagcgaggttgcggaaatacttaaaaacgccacaaagcacagtcttttaatacttgacgagataggcagaggaacctcgacctttgacggaatgtcaatagctcgggcagttctcgaatatgtcgccgataaaaagaccctcggtgcaaaggcgcttttctcgacccactaccatgagcttacctcaatggaaaatgagctgcagggcgttaaaaattataatgtcgcggttaaaaagcgcggcgacgatataacctttttgcgccgcataatccccggcgaagcggacggcagctacggtattgaggtcgcaaagctcagcgggatacccgaatcggtcatccgaagagctaagcagatactcaaaaagaccgaggaggagggcgtggtcacctaccgcaccgtggaaaatcccgatatgcagctgccgcttgaaatgcagggcgcgcaggatattctgcacgagctgcaaacggtcgatgtcaatacgctgactccgattgaggctatgcagacgctttttgaaatggtgacaaaggctaaatcaatataataaacagtatgtcgataaaccccaaagtctatttctgcggcgttcacgccgcatcaccgtttttccgccgacaggtgcggcggaaaaacaccttgtaagcgaaaaatagcttaaaaagctatttttcaagggcactggggtggtattggcggagcataacaaccgactgccgcctgtggcggattaaaggagggtgttatggcgccgcggtcaaagaaaattcgcgctccaagcgaatattttctttgggtaccgcaagagtagggagtgcagtcaaaaatctctgatttttgcgaacggcattcccgctcaaataaagtgaggtgtaaaaatgccggaaatcaaagtattgccgaaggaaatatccgagcttatagcggcaggcgaggttgtggaacgccccgcttcggtaattaaagagcttgttgaaaattcaattgacgcgggagcggataatataacggttgaaattcagcacggcggtattacatatatgcgcataacagataacggctgcggaatagaaaaaaacgatgttcccacggcgtttttgcgccatgccacgagcaaaatcaaaaacagcggcgacttaaacgcaataggtactttgggctttcgcggcgaagcgcttgcggcggtctcgtcggtcgcaagggtggaaatgttcacaaagccgagggacgcggctttcggcacgcactatgagattgagggcggggttgaaaagctttgcgaggaggcgggctgccccgacggcactaccatagttatccgcgatattttcttcaacacgcccgcacgcatgaaatttctcaaaaaggatgtttccgaggcgaatgccgcagcggcggttgttgagagaatagcgctttcccaccccgaaattgcctttaagctgataagggacggcaagcaggcgcttatgaccccaggagacggcaagataaacactgcggtttacagcgttttaggcagggaatttgccggaacgcttatggaggtagacggtggacttgacggaataggcgttaagggacttacctgcaagcctgtttcctgcagacctacaagaaactatcaatttgtgtttttaaacggcagacttgtccgctcaggcacagtgactgcggcggttgagcaggcttacaaaaacagcgcaatggtgggcaaattcccgggctttgtgctttatctgaccgtacctctcaacacggtggatgttaatgtgcaccccgcgaaaacagaggtgcgcttttccgacgagcgccgaattttcgacgcggtatattcatcggttaaaaacgcgcttgcaagaggggacacgcgccccgaggtcaagctgcacgagcctgttttcaatccgtttgaacggatgacgaccgccgaatacaaacagcagccgattatgaagccgaccgtcgccgaagaaatatacaagaacagaccgagtttacataatgcgtataagccgcaggaaaaaacggtactgcgggatgcgaattataatgtttctaaaacaaataataccgtttacatcccggagaaaataataaatccgccctctatggcagaggaatcaccgcagccgcaaagaacagtttcggttgacataatgcgagatgttgaggacgaaagaccgccgataaccttaataggcgaggcgtttttgacatatattatcgtccaaatgggagaaagcgtgtttatgatagacaagcacgcggcgcacgagcggatactattcaacaggcttaaaaaggagcagaagaccgaaacgcagacgcttcttaccgccgttattgttgcgctaacgggcgatgagtataacgccgcaatttcaaacaccgaggctcttgaaaaagcaggctttgaggttgaggatttcggcaattcgtcggtcagggtctccgccgttccggcaagccttacaagagaggatatcccctcggttataagcgagcttgccgggaagctttcaaagggtaaagcacccgactcagagaggcttgatgatatctaccacacggttgcctgcaaggcggcaatcaaggcgggaagcagaacaagcccgctcgaaatgcaaaaattagcagaaagggtgctttattccgacgatgttatgtactgtccgcacggtcgtccggttgcctttgaaataaagcggcgggagctggaaaagcagttcggacgaatacaatgagtaaaatcaaaactgtttttgtggcgggagccacggcgtccggaaaaacagagcttgcaattaagcttgccaaaagatttgacggcgaaattgtttccgcagattcaatgcagatttacaagggaattcacatagcctccgccgcgcccgatacggaggaaatgcagggaataccgcattatatgcttgaatttttaaagcccgatgacagattttcggtcgcagaatatgttgaaaaagcacgcgcgtatgtaaaggacatcgcgcgccgcggcaagctgccgatcgtggcgggcggaacggggctttacattaattctttggcggataatataagctatatcgaggaaaaaaatgacggtaagctgcggcgcgagctggaggaaagatttgaaaatataggcgcagagcaaatgcttaaggagcttaaagaaatcgatcccgagactgccgcgagacttcattcaaacgataaaaagcggataatccgcgcatttgaggtttacaggcttacgggaaagaccgtaaccgagcagaataagctttccaaacagggggatgcccttattgatccctgcataatagaaattacctaccgcgaccgcgaaaagctttatgacagaattaaccgcagggttgataaaatgctgcagtcggggctggcagaggaagcgagagcagcgctccgaaatactgcgggcggggcgtatcaggcgataggtcacaaggagttgtcaggctatatttcgggagatatgagcctggaagaggctgccgaaaagcttaaaatgcaaacaagaaggtacgccaagcgccagctcacctggttcaggcgggatgaaagaataaaccgaatatatgccgatgaaacggaggatgttttttcggcggcggagaaaattaccgaaaattttttaggaacggaggaagccgagtgagaagcgaaagggtgcttaaattttttgttgtgctgcttatagcggtttttttcgttcatcaggcggcagcggcggtatataagccgataagcaccgaaagtgcgtcttattacaccgcggctgacggtcttaacataaccgggcttattatcagaaacgaaacgcttgtaaaatcacagagcggcggcgttatgcactttatagcatccgacggcgaccgtgttgcgaaaaacggcatcatagccaatatttacgataatgagaccgcctcaatcaccttgagccggatggacagcgtgaatgccaaaatcgccgatattgaggaaatgatgagctataacgatttggaggcggcagaccttgatatgataaacacaagggtgcaaaagagcctggacagtatgataataagcgtttcgggcggtgatttcgataattattcggactgccgcgagactcttctgtcggcgcttaacaggcggcagatcgccatgggcgaaacggctgacttttcgtcacagcttgccgctttgaaatcggagcttgcgtcactttcctcctctctgcctgcggcaaaggggacaatcagggcggaaaaatcaggctattttgtttcaaaaaccgacggatatgagcagacgctcaccgccgacattttagatgcgctgactcccgaaaagcttgattcggtaaaatcggctcaaactccggcggatgtaatcggaaagattgtttccgattacgaatggtatattgcggcaagagtgagtattaacgaatctctgaaatacaaggagggcgacagccttacggtctatacctctgtgaaatcatatccgcagatgcccgtgacggtaaagaagataaatatatccgaaagctcatcctctgccgttttgatttttgaatgcagcgatatgaacagcgagttggcgtctatgcgcaccggccctatgacggtggtaaaaaaggaatacagcgggcttaaggtgccgaaaagcgctctgcgtgtggtggattcaaagcgcggcgtttatgtgcttacgggtatgcagataaagtttgtagaggtcaatgtgcttttctcgaacgacagctatatgatctgcgaaaagcagacggatgatgaaaatgtattaagactttacgatgaggtcgtcacaagggggaaaaatctttatgacggaaaaattgtcggttagcgagctgaccgaaaattacggcgctgtcagaaaacggttatccgaagctcttgaaagagcgggcaggcggggaaacgaggtcacgctgcttgcggcgacaaaaacggtcgaccccgaaaccataaaccgcgcaattgagctcggaatcacccatataggggaaaacagggtgcaggagctgctttcaaaaaacgggcttataaagcctgtgcacaatcactttatagggcatttgcagaccaataaggtgagggatataatcgacaaggtggaaatgatagagtcggttcattccgaaaagcttgcggcagagatttcaaagcaggcgtgcaaagcgggaataataatggatgttctgcttgaagtcaatataggatacgaggaaagcaaatcgggctttgcccccgaggagacagaggctgcggtaagaaaaatcgcggaaatgccgggaatttccgttaagggacttatggcaatacccccaatcgaccctttgtatgagaatacgagaaaatatttccgtaatatgtataaactgtttattgacattggagccaaaaacatagataatagtagtatgagcgttttgtcgatgggaatgtcgaacgacttcgatattgcggccgaagaaggcgcgaccatagtccgtgtgggaacggcgcttttcggcaagcgcatttataaataaatataaaaggagcggaaaaaatgggtttttttgatagcattaaaaacattatgagcatacccgaggaagacgattacgatgaggaaatagaggatgttgaggaggaaaagcctgcagagcgccgcaagcctgttcaacatgagcagcccgcagcgccacagcgccgtgagcccgcgccgagagtagtaggcggcggaaaggcgaagaccattaacttcagtcagtcgcagatgcaggtggtgctggtaaagcccgatcgctttgaggatgtcacctcgattgccgaccatcttaatgcaaaaaagacggtagtgctgaatttggaggctgccaaccgcgatgtttcccgcagaataatcgactttttaagcggtgttgcctatgccaacaacggaaatatccgtaaggttgcgaacagcacatttataattgtcccgaccgatgttgatgtgatgggcgagcttatgctcgacgattttgacgaaagcaagatgtacttttaatggacgcagagctgctcccggcaagaatcaacgatacagaaaagctttgtgagcaaacctgcacaccgaaatttttaggttttttaactcaggcggaagccgcccttgcacggaatattttaaaaaacgcaagggtcagagctgattttttcggcggctatgacggggcagagcgtgtaatgctaggctgctttcccgattgggcggaggattttccctaccccatatcgccgttgaccgttttcttcaggaaagcggacgtgctttcccaccgcgatattttgggcagtcttatggcgctcggcattaagcgcgagacggtcggggatattctgattgaagagggcagagccgttgtttttgtgtgcgatgacgttaaagagtatattttaaatcaggtcgaaaaaatcggcagagtgggcgttaatatgacggagggctgctcttttccgctgccggagggcgacagattagaggaatttaccgctacagccgcgtccgatagaatcgactgcattgcggcagctttatgcgggctttcgcggtcgaaaatatgcgcgcttatagccgcggggcttataacggtcaattccgtttccgtttcaaagcccacaaaaagtatagccgcgggggatgttatatccgtcaggggaaaaggaaggtacatagccgtctcgcttgacggcaggactaaaaaggacagaattataataaaatataaaaagtatattcaggaggtaaagaaatgttaagcgttgccgaaataaggaatgtaaaatttacaaaggctatgggcggctacaagcaggaggaggttgatgttctgcttgaccgtatagaggcggattatacccagtttgagcgcgcattcaaggaatacaaggcgaagatcgattcgatgaataaggaaatcgagacccttaaaagctcacagaacagcattcagaatgtactcttaagcgcacagaagcttgccgaccagatagttgacgaggcaaagcagaagagcgaggagataatagataacgcgcagtccaatatcgaggtgatgaccgcgcgcgaaaaggagcttgcaaccgcctttgaattaaaggcgcaggagcgtaaaaacactctccaaaaagagcttgacgatatggttaaaaccgcgcagataaaggccgacagcatgaaagctgccgcagaggacagcgttgcgcgccagcaattactttacgataagcttaaaatggaaatgtccgcttttaaggcggcgctctccgcgaaatataaggaacatctcgaaatgcttaagaccctgcccgatacagctcccatggatccgaaaagaatggcggagatcgtggctgcggcggttgataaagcgccatctcccgaaagctttataaaagctgaggcaaaagcggcggagcctgtaaatgcggaagaaaacacggcggaaaaggcagaaaagcctgcgggctttaaggttgccgagtctgacgaaaaggctgaaacagaggaataatttttcagggggataaccttttgatttcatacatactggctgttatctccgccgtgctgctgctcggtgcggatcagctcacaaaatattcggtttcaacagagtttgctctcggcgaacagcgcgagtttttaaagggatttatcgaccttacatatatccacaaccgcggcggcgcctggggcatgctttacggcaaaacctatattttaattcccgttaccgttattgtaatggcggtttgcataatcctttacaaaaagtacggcaagaaaaacaagctgcttttttgggctattatgcttgtgctgtcaggcggaataggcaatatgatcgaccgcgtattcagagacggcaacgttattgattttctgcattttgagtttttcccgtcattcccggttttcaatgtcgccgattgcgcaatagttgcaggcgcagggcttttgatactttacttcattctggattccgttaaggaatcaaagcagaaaaaggcggaagagaagcaagcagatgaataaaataaccgaaacggtcggcgagaataaagcgcccgaaagaatcgatgtttttacatccgaaatcgccgctgtgacgcgttcgcgcgccgcagcgcttatagcggacggatgtgtgacggtaaacggcaaaaaagcttcaaaaagcgataaggtaaagtcgggggataccgtcaccataacggtgcccgagcctgccgcttatgatattgctccggaaaatattccgcttgatatagtctatgaggacggcgacctgcttgttgtaaacaagcctaagggtatggtggtgcaccccgctgcagggaattacagcggcacgcttgtaaacgcgcttatgtttcactgcggcgattccctttcggggataaacggcgtcatgcggccgggaattgtgcataggatagataaaaacaccagcggccttttgatggttgccaaaaatgatttggcgcatacctcacttgcagagcaaataaaggcacattcctttacacgggaataccatgcggtggtttacggcggctttcatacggacggcggcacggtggacgcgcctataggcagacaccccgtaaagcgcaagcaaatggcggtggttgccggcggcagaaacgccgttacgcactacagcgttgcagaacggtttgagggctttacacacatatcactgcggcttgaaaccggcagaacgcaccagattcgcgtacatatggcatatatcggtcacccggtggcgggggacgatgtgtacggacctaaaaaggttataaccgagctttgcggtcagtgcctgcacgcgggcaaaataggctttattcacccgagaacaaacgagtatatggaatttacttcgccattgcctgagtattttacacgctttttaaataaattaaatccgctgtaaattgatttgattcggaattgtaaaatgaggagtataataaatgggtcttttttccgattgccttttcgggtgcgatattgacggaacgctgcttgcaaacggcgttataaatccgcataatatcgaaaaaatagaatactttataagcgagggcgggcatttttcgctttccaccggcagaacggtgggggcggtcagcccagtgcttgagaaaattaagaatatttcaccctcggttgtggcaaacggctgtatgatatatgattttcaaaacgaaaaggttttggacgagctgtttatcgcaaaagccgattaccgcgttgcaaaggcggtgcttgataccgggcttccggtaggaatcgaagcgcacagtggcgaggaaatattcacaataaacgagactgaggaaacgaggcttcaccaggaatatgaacgccttaaaagccgcaatgcttcttttgaagaggcggctgagtacaattggaataaggtggtttatcttttcagcgatcttgaggttttggaaagggttaaaaagcttatctctacgctcggagcggcctccgcattttccgatacttcggctgctatagcgggcaaaaagcgaaattattacgagcagttccccgctggcgtttcaaaggcaaaggctctcttaaagctggcaggtcttttgaacattaaaaagggcggaatttttgcaatgggggattattacaacgatctcgaaatgattaaatgtgccgatatttccgccgttcccaaggacacgcctgatgatataaaggcgtttgcggattacagggcatgcagctgcgaggacggagcggtcgccgattttatagattatttaacagaaattaagtccgatagggtttaatatattacagggaaaggaatgatttgatggacgctgccgaaaaaaaacaacttgaaataacggcgtgcaaggtcagaatgggtattattgagggggtgcacagtgctaaatcgggtcacccgggcggttcgctctcgtgtgcggatatactcacttatctttattttaagcatatgaatattgaccccgcagacccgaaaaaagccgacagagaccgctttgtattatcaaagggtcacgctgcacccgcgctttacgcaacccttgccaaccgcggctattttgatgtagcgctgcttaaaacactgcgtcagataggcagtattttgcagggtcatcccgatatgaagcatataccgggggttgatatgtccacgggctctctcggtcagggcatttccgccgctgtgggaatggcgctttcggctaagcacttcggcgacagctttaaggtatacgctgttttgggcgacggcgaaattgaggaaggtcaggtttgggaggcagctatgttcgcaggcaacaagggactttccaacctcaccgcatttgtggattacaacaatctgcagatagacggaactattgaagaggtaaactcggcagcccccatagataagaaatttgaggcgttcggctggcacgttatcactattgacggccataacttcgaagaaatcgaaaacgccttgaaagaggctgaaacggtggacaagccggttgcaataatcgctaagaccgtaaagggcaagggcgtctcctttatggaaaacgcagttggctggcacggctccgccccgaacgacgagcagtatgagcaggcaatgacagagcttaacgcggcgcttgccgctctgaattgaggaggggaataaaatggcagaaattaaaaaggttgcaacacgcgcaggcttcggcagcgctttggttgagctcggcgccgaaagagacgattttgtggttttggatgcggacttagccgccgccacacagacaggtatgttcaaaaaagcatatcccgaaagattttacgattgcggaatcgccgaggccgatatgataggcattgcggcaggtatagcggctacgggcaaaaaggttatctgcagctcgtttgcaatgtttgcggcgggaagagcttatgagcaggtaagaaactcggtaggctacccgcaccttaacgttattataggcgctacccacgcgggaatttccgtcggtgaggacggcgctacccaccagtgctgcgaggatatagcccttatgcgcacgattccgggtatgaccattataaatcctgcggatgaaaccgaggctaaaaaggcagtaagggccgcgctcgaaattgacggtcctgtttatatgcgcttcggcagacttgccgtcccggttatatttgacgacgattataaattcgaggtcggaaaaggcgtagaattgcgcgagggtaacgatgtcaccattgttgccacaggacttatggtaaacgaagcgcttgaggctcatgagctgctcaaaaacgagggtataaacgctcgcgttataaatatccatacaatcaagccgcttgataacgatattattttaaaggcagcaaaggaaacaggcgctgttgttaccgcagaagagcattcggttataggcggactcggcggagccgtgtcggagctgctttctgaaaattaccccgttccggtgctgaagctcggcgtttacgatgtgttcggtcattcaggccctgcgccgaagcttcttgatgagttcggcctgcgcgccgcaaatattgccgaaaaggcaaaaaaggcggtcgcacttaaaaagtaaaattttctttatgtgtaaatatatgtcgatatttgttatgtattaacaaatatcggcatatattttttatatttgtttcggagaattaacaaaaatgacttgataattgtctttattgatgctataatgattataataaatcacaaaaagaaacaaattctttcccgtgatattgtgtcaatttcgttaagaggtgcattatgaaggaatttttaaaagcattttcatcagcgggcgcttcggacgcttataaatatttaggctcgttttccgaaaagggaaaaaccgttttcagggtttgggcgccgaatgccacggctgtttcggttgtaggtgattttaacgaatgggacgtatccgccgacccaatgaacaaaaaggacgggggtatttgggaaaagaaaattcccgcgctcgataattatgcttcttataaatatgcgataaccgggacggatggcgttacggtcttaaaatccgatccgtatgcgcggcattttgagactgcccccgcgaatgcctcgaagctttatttttccgattataaatggagagatgatgagtggcggaaaaagcgccgtaaatcgaatatatatgaatctccggttaatatttatgagcttcatgcaggctcatggcggcgctttgaggacggcaacacctacgattatatcacattggcgcgcgagctttcaaaatatcttaaaaaaatgaattatacccatgttgagctgatgccgataacggaatatccgtatgaaggctcatggggataccaggtctcgggatatttcgctccgacctcgcgctacggcacacccgatgattttaaaaaattcgtcgatattatgcatgaaaacggaataggcgtaattcttgactgggttcccgcgcatttcccgcgtgacggcttcgggctttaccgctttgacggcacgccctgctatgaatacgcagacccccgcaagggtgagcataaggaatgggggacagtggttttcgattacggaaagcctgaggttcgcagctttttgatttcgagcgccgttttttggataaaagaataccatattgacgggctgcgggtagacgcggttgcatcaatgctctatcttgattacggcaggcagaacggcgaatgggtgcctaattcctacggcggcagagaaaatcttgaggctgtgcagtttttaaaggatgtcaacactgcggcattcggcgcagacccttcaatcatgatgatcgccgaggaatccacggcgtggccgctggtaacaaagccgccgcacacgggcggactgggctttaacttcaagtggaatatgggctggatgaacgatatgctccgctatatgtcgcttgatccgcttttcagaaaggacaatcatgattgtctcaccttctcgttcttctatgcgttttccgaaaactttattcttcccatctcgcacgatgaggtggtgcacggaaaatgctccatgatagaaaaaatgccgggcgaatacgatatgaaatttgcctcgctcaaggcgttttatacttatatgatggcccaccccggcaaaaagctgctgtttatgggacaggaatttgcgcagtttatagagtgggactacaaaaaaggtctcgactggctgctgctcgattatgaagcacataaaaatatgcagaattatgtggcgcagcttaataaattctaccttaaatcgccggagctttgggaaattgattattcgtgggacggtttcagctggatttcaaacgatgataaccgccagagcattatatccttcagaagaattgataaatcgggcaatgaaattataacggtttgtaattttgtacccgtggcgcgggaaaactaccgcataggcgtgccccgcgcgggcagttacaggcgtgttttctgctcggacgatgcaaaattcggcggaaaaacgcagaccgcaaggagctttagatccgaaaaaatacccatgcacggctatgaaaattcggttgcgcttgaaattcccgctatgtcggtaagctattaccgcgttccggcgagcagagataaaaagtaataagctttaaaaattcaattatatattatcggtgagggagtgttattctttgaacagcaaaaaatgtgtagcaatgcttttggcgggcggccagggcagtcgattgggcgtgcttaccgctaaaatagccaagcccgcagttccctatggcggaaagtaccgcataattgattttccgctttcaaactgtgcaaattccggaattgacacggttggaatacttacccagtacaagccgcttgagcttaatgattatattggctcgggcaagccgtgggatcttgaccgcacgaacggcggagtgcatattctgccgccgtatcagggtcagcagggcggcaactggtacaagggaaccgcaaatgccatttatcaaaatcttgaattcatagagcgctatgacccggaggtagtgcttgtgctttcaggcgaccatatttacaaaatggattactcgaaaatgataaacgagcatatcgaaaacaaagccgcctgtactatagccgtgcttgaggtatcgatcgaggaggcttcgcgtttcggaatcatgaatacacgcgaggacggcactatttacgaattcgaggaaaagccaaaaaatcctaaaagcaacttagcatctatgggtatttatgttttcagctgggataagctgaaaaaatatctgacagaggatgagcaaaagcccgattcatcaaacgatttcggtaaggatgtcattcccgcaatgcttaatgcaggcgaaaatatgcgcgtatacaggtttgacgattactggaaggatgtaggcacggtaaattcactgtgggaagcaaatcttgatttgttaaatcctaagatcgaccttaatttagccgaccagaactggcgcatttattcaagaaccaccggtatgccgccgcagtatatttccgattcggctatggtggagaattcacttataactgacggctgcgaggtctacggaacgctcgactattcaattctttttgaaaatgttacggtagaagagggcgcaacggttgaatattcgcttgtaatgccgggcgctgtgataaaaaaaggcgcgagggtttgctactccataatcgcggaaaacgcgataattgaggaaaacgccgtcgttggcgcagaccctgccgtagtcggcgcagagaattggggaatcaccgttataggcgataatttggcggttggaaaaaacgccgtggtaaaccccgataaaatgattaccgaaaatgttaaggagggggagaaaatatgagagcatcggcagttgcggggcttgttttcgcaaatattaacgacgagctgcttaaaaagctcacctcaaaacgctcaatggcgtcggtacccttcggcgcacgctaccgtcttatagattttccgctttcaaaccttgtgaacgcgggtatttcgagcgtcggaataattacaaaggagaattaccgctcgcttatggaccatgtcggcagcggagtttattgggatttagaccgcaaaagcggaggactgtatcttttgccgccgtatcttacaagcggtgttaagcgctaccatggcacggttgacgcgctttacggcgccagggattatatagatcgctgcaaggcggactatatagtaatatgcaacgcggatgttatctcgaatattgatatttccgccgcggtagacagacatatcgaaaacggcgcagatgtaactcttgcttaccaccgcggaaagccgcctgtcaactgcgccgatacaatgttccccgaaatcgggcgcggcggcagaataaacaagcttaattttgatattgactgtgcacaggaaacggatatgtgcataggcttgataattattccgcgagagctgctgctcacacttataaatgacgcgcacgatgagggcgaaataagctttgcaagagacgttttggcaaaaaaggtcggcaagcttaaaatttacggctacgaacacaaggaatatgccgccgtgcttgacagcaccgaggcttattataaggcgagtatggacctgcttaataaggacgttcgctctatgcttttcaataaggagcggccgatatttacaaagacccgcgacgatatgcccacccgatacggcacaaaggcggtcgttaacaactgctttatagccgacggctgcgttattaaaggcaccgtgcgcaacagcgttattttcaggggcgttaccgtcgaaaaggacgcggttgtggaaaactgcattttaatgcaggaaaccgcggtaggcgagggcgcgcagcttgtgaatgttattgccgataaaaacgcgtcggtaggtgcgggaatggtgcttaagggtactgccgccaaaagcttctttataaagaaaaatcaagtgctttaaaacagataggagaaagaaatgaaagtattatttgcttcgagcgaggcttatccatttgcaatgtcgggcggtcttgccgatgttgcgggcgcgttgcccaaggcgctcagaaaaaggcttgtgggctgccgcattgttatgccgctttacagttgcattcccgatgagctgcgcgaaaaaatgagctttatctgcagtataactgtttcggttgcatggcggagacagtattgcggaatattcgaagcccatatgaacggcgttatttattattttatagataatcagtattatttcaagcgcgacgggctttacggtcattacgatgatgccgagcgctttgcgttcttctcccgcgcggtgcttgatattataccccacataggctttacacccgatattatacattgtaacgactggcagaccgctatggtgccggtatatcttgatactatataccgcaataacgatatataccgcaatataaaaaccgttttcacgattcataacatacagtaccagggcaagtacggtcacgagcttacgggcgatgttttggggcttccgtatgaatcggaaagccttgttgagtacgacggctgcgttaatcttatgaagggcgcaatacagtgcgccgataaggttacaactgtatctcccacctatgcgcgcgagatattagagccttactattcaaacgggcttgataatattttaaagcagtttacctataagcttacgggcattgtaaacggaattgattatgatgtttacaaccccgagacagataatttgatttataaaaattattctgttgacgatttaaaaaataaagcttataataagaaaatgcttttaaaggaaatggacttacccgaaaccgacgcgcccgttataggcattgtaacgcgccttgtaaagcacaaagggcttgaccttgtgaaatgcgtttttgaggagcttttaaaggcggatctgaaattcgtcattttaggctccggcgagtgggaatttgaaacatttttccataacgccgcgcaaaatcaccccgataaggtcgcgctgaaattgggatttaacccgcagcttgcgcataaaatatatgcgggagcggatatgttcctaatgcccagccaaacagagccgtgcggacttgcgcaaatggttgcgcttcgctacggcacggtgccgattgtgcgtgaaacgggcggtcttaacgataccgtatccgacagcggcgacggtgatggcaacggctttacctttaaaaattataacgcgcacgatatggaaaatgcggtctggcgcgcacttgcaggctatgatgataaggcgggatgggatattctgcgcaaaagaggtatgcggtgcgataacagctggggtgtttccgcaaacgcgtatatcaggttatataaagagcttgcgagcaagtgaactgatattataaccggtgctttgggggaattatggatattattaagtcgattattttaggaattattgagggtattaccgagtggctgccgataagcagcacgggacatcttattattgccgacgagtttataaagctcggaatgacggatgaatttatggagatgttcaacgttgttattcagctcggcgcgatactcgccgtggtggttattttctggaacaaaatgtggcctttcaccgccgataaatctaagggctataattacataacaaagggtaacggcttaattaagaaggacgttatggatatgtggttcaaggtaattgcggcaatgctgccggcggcaatcgtaggtattccgctcgatgattattttgaggctcacttccacaattggcaggtggtttccgctgcgcttatagcttacggtgttttatttatcgtaatagaaaaaataaacaaaagccgcaaaccgaaagtaaccggcatacccgagctttcctataaaacagcgattttaataggctgctttcaggcgctttccttaattccgggaacctcgcgcagcggctccaccattttgggtgctataattctcggcgtttcgcgcgttacaggggctgagttcagcttctttttggcagttcccgttatgttcggcgcaagcattataaagcttttgaaattcggctttacgtttacgggtatggagcttgctgttttggctgtgggaacgctcacctcgtttattgtgtcaattatcgcaatcaaattccttataagctatgttcgccgccacgatttttcgctgttcggttattaccgtatagcgctcggcgcgctggttatagcgtatttccttataacggggtgattttatgaaaatacttattgcatcggatattcacggctcggcatattactgccgaatgctgcttggtgccttagagcgggaaaaagccgacaggcttttcctgctcggtgatattctttaccacggcccgcgcaacgacctgccgcgcgattacgcgccgaaagaggttattgcaatgcttaaccccttaaaggaaaagcttttctgcgttcgcggcaactgcgatactgaggtagaccaaatggttttaaatttcccgattcttgccgattatgcgattcttccgctcggcgaccgcgtaatttacgcaacgcacgggcataagtttaactgcgataatccgccgcccttatgtaagggagatatacttttaaacgggcatacgcatattccggcggataaggatatgggcaatttcagatatttaaaccccggctctgtttctatacccaaagagcaaagcccgcacggatatatgacgcttgaaaagggcgaatttctttggaaaaggcttgaaaacgggggaatttataccccgtaaggtaaacgcattatgatgatttcaacaaaagggcgctacgctatgcgggttatggcggaccttgccgagcatatcggcgagactgttccgctgtccgatatagcaaagcggcaggaaatttcacttaaatatttagaggctattgtttcggctttgtcgcgcgccgggcttattgaaagtcagcgcggcaaaagcggcggttacaggctgaaccgcaagcccgaggaatacaccgcccgcgagatattagaggtgaccgagggcgggcttgtgcccgtaaactgtgcctgccttacaaagggtgaggaatgtaagcgttcggggctttgcccgtcactgcctgtatggcaaaagcttgataagcttatatacgattatcttgacagcgtatcactttccgacctggtttcaaaagaataacatattataaagcggaattttgtataaagattagtgttttttaaattcctattgactttgtaggaattatatgttaaaataaagtcacaaagaaaaaagggaagtgagcgataaatgaaagtttacgcggataacgccgcaacaaccagaataagcgatacggcttttgacgctatggctccgtattttaaggagctttacggcaacccgtcaagcctttatacgttaggtcagttatcgcaggaggctttgtgttccgcccgtgaaacagttgcaaaatgccttaattgcgatatgaaagaaattacatttacctcgggcgggagtgaggctgataatcaggctatactcacaggcgcgtatttgggcgcggcaaagggtaaaaagcacataatatcctctgcatttgagcatcacgccgttttgcatacgcttgaaaagctcgaaaagcagggctttgaggtaactttattgcccgttcattcggacggatttgtgcgtgttgatgagcttgaaaacgcaataagggaagatacggcgcttgtgactgttatgttcgcaaataacgaaataggcactgttcagcccattcgcgaaataggcgaggtatgtcataaaaaaggcgtgcttttccacaccgacgcggtgcaggcagcggggcatattaaaatagacgttaaagagcagaatattgatatgctttcactttctgcgcataaattccacggaccgaaaggcgccggcgtgctttacgctaaaaagggcattaagctgtatacgcttattgagggcggcgcgcaggagcgcggcaaacgcgcaggaacagagaacgtgcccgcaatagtgggtatggcggcggcgctgaaatacgcaaccgaaaatcttgataaaaactttgaatatgtaaaagcgctgcgcgataaaatagccgatgggctgtcacatattcctcattcaaaaataaacggcgatataagcagagggcttgcgggcacgcttaatatgtgctttgagggaatagagggcgaatcgctcttgttgctgcttgacgacaggggtatttccgcatcatcaggctccgcctgcacatcgggctcgcttgacccgagccatgttttgctggcgctggggcttccgcacgaggtagcgcacgggtcgctcagaatttcgctttcggaatacaataccgaggcggaagcggagcatattattaaggaggttccgcaggtggttgaatatttacgctcaatgtcgcctgtttggaaggatttacaagaagggaagaagcaatatgttatacagtgaaaaggtaatggatcatttcagaaacccgcgcaacctcggcacaattgaaaatgctgacgcaatcggtgaggtgggcaacgctaaatgcggtgatataatgaaaatgtatttgaagattgacgacggcataattaccgatgttaaattcaatacattcggctgcggctcggctattgccaccagctcaatggcgactgaaatgataaagggtaagcccgtaacagaggcgttaaagctctcaaacaaggcggttgtagaggcactcgacggtctgccggcgcacaagatacattgctctgttttggcagaggaagcagtaaaggcggcgctgtttgattattacaaccgtcaccccgagcttgaaaagcccgagggactgcccgattgcgcagaatgtcacggcggatgctgctcctgcagctgatattaatgctctaaccccctttttaaggggggttttgtgcggaaggcactagaaaatgttatggtacaatagataggtaacaaaaaaagaagaaaattcatctcaaatatggtatgatgttaataactacaaaaacaaagtaccataagaggtgaattttctatgacaagtataacatcaaaa

SEQ ID NO: 3397 - DNA, 12372 bp, Unknown
  16S sequences of unknown bacteria
ataattcaaaaaagttaagttatgggtggacttccggcggcgctctcgtcaacatgagcggtcaggtcgtaggtgtttgctcgtcaaaatacgcaagcaccgacatcgacaacgtctgctttgccattcccatgacccgtgcgctcggcgttatcgaccagcttaaaaaatacggcgacgtcaccaacagggcaaagctcggcataacctatacctatataaataccgtcaccgccgagatgaacaacatgcccaccgggctgcttgtcaaaagcgtcgacagcgacagcaatctctacggcaagataaacaaaaacgacgtcattaccaaggtggacgacaccgacatcgtctcggccgatcaggtgcttaacattgtggaaagcgccgctgtgggcgacgaggtcacgctgaccgtatacaacggctccacgggggcttatttcgacgtgaccgcgaagtttataaaggcatcctccggctcgagctataccaccggggacgacaccgcctcctacaacacccaaaatccctatgatttcttcggggacgaaaacaacaacaaaaaataaagccggcaaggggcacagtcctttcgtcggcccactttaagcggccgacgctttcggaactttccgaaaatcggccgcttttgtttttaaaagccgccccttaaaaggggaaaaaaactccgttttccgctctgttgaggggcaaaattcacactttggctttcgtttggaaaatttcccttatatttacgaaaaaaccctgtttttttcccccgaaaaccattgacaaaaagatgacaagcctttataattaacatataagtgtgagtttgtaacagaaaataacagacagaggtgaaagcatgagcattgcccgcagggaaaaggttttgacgctgctccgcgaaaacggaaccgtcatgctcaaggagctggaaaagctttttcccgaagtttcaagtatgaccctgcgaagagaccttgaatatttcgaaaatctgggtgaggccgtgagaattcgcggcggcgcccgctacatccgaaccatcggcgagcaggaggacgtttatgcccttcgcgccaccaaaaatcaggacgccaaaacgaaaatcgcaaatctcgccctgaaatttatcgagcctcgccgctcggtctttatcgacgccggctcgacaggaatgtttcttgcgagaaatcttcccgaccttaatttttcggtggctacctcgggtataaacgtggccatggagctgtccaagcggtataagccgtcggtcaccattctcggaggtcttataaaccgcaacaatctggccgcctcgggaaatcagtcgagccagataatcaattcccttaacatcgacacggctctcatcgtcggctcggccttttcggccaaaaacggcttcacggtgggaaattatgaagaaggggttctcaaaaacggcataatggccaaggccgacaagcgcatcatgcttatcgacaattccaaattcggaaagagtatgcccttcaccttcgcccacatggaaaacgtggacattctcataaccgacaggcgcccccccgacgacataacggagcttgccgaacaagcgcaggttaaggtcatttacgaatgactttaatataaaatcaaaaatcttttttaggaggaaatataaatggcaacacccgtaatgatgcccaacgtaggtatttcggtcgaaagctgtattcttaccgagtggcacaagaaaaagggcgacgctgtaaaaaaaggcgacgttcttttcacctatgaaaccgacaaatcgacccttgaagaagagtctccggttgacggaatcatgcttgaacagttctttaaagaggatgacgatattcctaccatgaccaacgtttgcgtcataggtaaagagggagaaagcaccgccgagtttgcaccaaagcttgacggcgacgccgaagaggctcccgcagccgcacccgcagcagctcccgcagcggctcccgccgttcccaccgcagccgctcccgctcaggctggcgaattcatcaaaatttctccccgcgcaaaggctcttgccgaaaagaccggcattgatcctcactttgccgctcccaccggccccaacggccgcataatcgagcgcgacgtgcgcacccttatagaaaacggacccaccgccacctatgccgccgcaggcgaatttgccggtgcagcaggcacggggctcggcggaaagttctcggttgcggacatcggcgcagctcccgcagcaaccgccgctcccgccgaggcaggtcccgaatatgtcgacgagaagatgcccaacatccgcaaggtcattgcaaagcagatggtggcttctctctccaccgccgctcagctcacccacaccacctccttcgacgccaccgaaatcatggcgttccgcaagaaggtcaaggaaagcggcgagaaactcggtcttgccaacatcaccctcaacgacatcattctctttgccgtatcgagagtgcttgcaaagcccgagcacaaggctctcaacgctcatctgcttaacggcgacaccatgagatattttaacggcgttcacctgggcgttgccgtggacaccgacagaggacttgtggttcccaccattaagaatgctcagaatatgagccttaacgaaatctcggccaaggccaaggagcttgccacaacctgcaagaacggcggagcaacccccgacatgctgtccggtgcatccttcaccgtctccaatgtcggctcctacggtatcgagagcttcacccccgttatcaacactccccaaaccggtattctcggtgttgacaccatcaccacccgcatccgcgaggtaaacggcgaaatcaagacctatcccgccatgggactgtctctgacctacgatcaccgcgctcttgacggaagccccgcttccagattcctcgtcgacctgagaaacgcacttgagaatttctctctcctgctttccaaataaggaggatttaaaatggaaaaatatgatcttatcgttctcggcggaggccccggcggatacaatgccgcagagaaggccgctgccggcggacttaaaacccttgtaatcgaaaagagagctctgggcggcgtttgccttaacgaaggctgcgttccctccaagtccctcctttattcgggcaaggtttacaactatgtcgtaaacggcgaccactacggcgttaccgccaccggcgccgccatcgaccagaaaaaggttatcgagcgcaaaaacaaggttgtaaagacccttgtttcgggcatcggtgcacagatgaaaaagctgggcgttaaggtcgtctacgccgagggcaaaattctcggccgcgacgccgagggctttaagcttgaggctgagggcgagacctatatttccgacaagctgcttgttgccaccggttcggctcccgtcgttccccccattcccggacttcgcgaaggtctttccgacggctttgtcatgaccaaccgcgaaattctcgaccttgaagagatccccgcaaacctcgtagttatcggcggcggagttatcggccttgaaatggccgcctacttcagctcggtgggaagccacgttacggttgttgaaatgctcgaccacatcgccggcaacaccgaccgcgacatttccgaaattcttaaaaagacctacgccaagagaggcgttgaatttaaactcggctgcgccgtcaccgccgtcggcgacggaaaggtcacctttaccgaaaacggtaaagaggcttcggttcccgccgacaaggtgctctgctccatcggccgccgcgcagtgaccgccggctacggacttgagacccttaatgtcgagcttgagcgcggtgccattaaaaccgacgagtgcatgaaaaccaacatcgccggcctttatgcctgcggcgacgtcaacggcaagatcatgcttgcccacaccgcctatcgcgagggcgaggtcgccgttaacaatatgctgggcaaaaaggaccgtatgcgctataacgccattccctcggtcatctacaccaaccccgaggttggctcggtgggcgagaccgaagagtcggccaaggccaagggctatgacgtcgagtgcgttaagctccccatgatgttctccggacgctatgtcgccgagaacgaggagagagacggaataatcaaggttattgtggacaagaaataccgcagaattctcggcgttcacatgatcgcaaactatgccgccgaaataatttacggcgccgctatgatgatagagaccgaaatcaccgtggacaaccttaaggaaatcgtattcccccatcccaccgtctgcgaggtcatcagagaagcgctgtttgaaattaaataataataaggagttgttttaatatgcctaagtcaatgtatgttaaacccgaagacaaattcgcaaaacgtaccattaccttcaaagacatccccgtttgcgaatacgacaagaccgtcaaggacgagaaaaagaatttctccaaggaagattttctcggaatgtatgccgacatggtcgccatccgtgagtttgagaccatgctccagagcatcaagcttcagggcgaatataacggcaaaaagttcacctatcccggcccctcccaccttgcaatcggtgaggaagcaaccgcagtaggacaggcctacaccctcgacgtcgacgacttcatcttcggtacccacagaagccaccatgaggttatcgcaaagggtctttcggccataaagaagctttccgacgaagagctcatcaaaatcatgaaggagttcaacgacggcaaaaactatgaaatcgtcaaaaagcacaacgacaccgacgacgttaaagagcttgcccgcgacttctttatgtacggtctgacctgcgagctgttcgcaaaggacaacggcttctccagaggactcggcggctccatgcacgccttcttcctccccttcggcatttatcccaacaacgccatcgtcggcggcagcggtcctatcgctaccggtgttgccctttacaagaagtgcaacaagaagcccggcatcgttgttgccaacgccggtgacggcgccgcggcaagaggccctgtttacgaggccatgaactttgccgccatggatcagtacaatgatctttgggaggacggctataagggcggacttcccatcatctataacttcaacaacaaccactacggcatgggcggccagaccaagggcgagaccatggcctacggcgaccttgcaagactgggctgcatcgctcagaatcagatgaacgccgagcgcatcaacggctggaatcccctcgccatgatcgacgcttaccgccgcgcccgcaagaccctcgaagagggcaagggacccgttcttctcgacgttgttacctaccgtctgtccggtcactccacctccgacgccatgtcctaccgcaccaaggaagaggtcgaagagtgggcaaagctcgatccgctgaccgtattcccccagcagatcatcgacgccaaggttgccaccaagaaggaagtggaagccgttcacgacgcagtcgtagaccgcaaccacagaatgttcgagcttgcttccgaccttgagatttctccctacaccgattatgacaagcatcccgatcacatcgagagcagaatgttctccaacggcgttaaagagaagatggacgaccgtccctgcgacgttctccagaagaaggaagacaacgagcgcgttaagaagattgcccgttccgagcgttatgcctttgacgcaaacggcaagcccttctccaaggccaaggtttacaacatccgcgacggtcttttcgaggccattatggacaaatattacaccgatcccaccctggtttcctacggtgaggatgtccgtgactggaacggcgctttcgcagtttaccgcggactgaccgaggctctgccttatcatcgtctcttcaactcccccattgccgagtcggcaatcgtcggctccgcagtaggttatgccatggccggcggccgcgtaatcgccgagctcatgtattgcgactttatcgtctgctcgggcgacgaggttttcaaccagatggcaaaatggcaggcaatgtcggccggcggccttcagatgcccgttgttctccgtgttcccgtgggcttcaaatacggcgcacagcactctcaggattggacctccctctgcgctcatgttcccggacttaaggttgtttaccccgtaactccttacgacgccaagggtcttatgaacaccgccctcaacggcaccgatccggtctgcttcttcgagagccagcagctctacgataagggcgaggaattcgttaaggaaggcgttccggaaggatactatgagattcccttcggcgagcccgccatccgcaccgagggtaacgacgttaccattctcaccatcggcgcaaccctttacaccgccatggaagccgagaagatcctccgcgagcagtacggcatcaccgccgaggtcatcgacgcccgttcggtcgttcccttcaactatgagaaggttgtcgagtcggttaaaaagaccggccgcatagttcttgcctccgacgcggtaggccgcggaagcatcctcaacgacatggccaccaacatcaccaaccttgccttcgattatctggatgcacctcccgttatcgtcggttccgaaaactggatcactcccgcttcggaatacaaggagcagttctatccccagccctcttggatcatcgacgccattcatgagcgcctgatgcccatcgccggctacaccgcaaagcacagctacaccgacgccgagctcctccgcagagccgaaaagggtgtataataaatagtcttttgaccctaaccggggttgctgaaaacttcttcggcaaccccttttgtgaatttttccgcgagtcgctttaagaccgcgggcatgaaaggacgacaaatatgaaagcagtaatgtacggcgccggcaacatcggccgcggttttatcggtcagcttttctcacagtcgggttatgagaccgcctttatcgacgttgctcccgcagttatcgaacagctgaacacacagcacgaatatcccgtgcgtattctttataaagagggctatgaggagtccatggtcaaaaacgtttcctgcgttgacggcaaggaccccgaggccattgcagacgccatcgccgaggccgacgtcatggccaccgccgtgggcgttaacatcctcaaattcatcttcggcaacatcgccggaggactgagaaagcgttggcaggacccgaacaaggctccccttaacatcatcatctgcgaaaaccttatcggcgccgacaaatacctcaaggaggaaatcggcaagcttcttaacgacgacgaaaagaagctgcttgacgaaaaggtcggctttgttgaggcttccatcggacgtatggttcccgttcagaccgacgaaatgaagggcgacaatcccctccgcgtttgcgtcgaaagctacggaattcttcccgtcgacaaggccgcctttaagggcgaaattccccccatcaagaacatggtgcccttcactccctttgagttttatatcgagcgcaagctctttattcacaacatgggacacgcattcaccgcatatctcggcagcattatgggcgtggattatatctggcaggcaatcgaaaatccttatgtcgagctgctcgtcatgcgcgccatgcagcagtcggcaatcgctcttgccacccgccacaacgtgccttatatcgagcttaacgaccatgttgaggatcttctttcccgcttcggcaaccgccagctgggcgacaccgtcaagcgcgtgggcaacgacctcaaccgcaagctcaatcccaacgaccgcattatcggcgctctcaatatgtgcgtcgagcagggcgtcacccccaaatatatctgccttgccgccgcagccgcaatgaatttcaaatatgacgaggtttcaaagaaacccgccgaggaaatccttgccgaggtctgcaagattgataaaaattccgacgcaggcaagctcattctcgagtatgatgccgcaattaagagcggaaagaccgtcgaagagcttttcaaaatgatgaaataagcttacaaaaaaagaaatacgccttgacattcaaggcgtattttttattttatggcaattattttgacggggtgtcaagcaggcggccgtgagcctcggccttttgcttcgactttttaaagagcacaaggaaggcggcaaactcggccataaaggtcagcacccaggaaatcgggtaggacacaaagagacaggaggcgttgtggaaagccggatcctgaaaaatcgtgtatatccacactattcgcatgacgcatacgccggcaacggttattatcatgggggctaccgacgagcccatacctcttaaaattcccgtcatgacgtccataaggccgcagagaaaatatggcaggcagacaaaggaaagacggagcaccccttcggcaatggcgtcgggagagtcggttatgtagattttaagaagggcgggcgaggcaagatacatggaaacgccgcatacgattcccgtcacggccaccgatgaaagggcgatgagcataatcttttttatgcggtcgaattttgccgcgccgaaatttcttcccacaaaattaagcgcggtctggtggaagctgttcatggtgaggtaaacaaagccctcaagatttgccgccgccgcattgcccgacacggccacagaaccgaaggaatttatcgacgactgaattatgacgttggaaattgagaaaagcgaaccctgtattccggcgggcagccctattctcactatcttcgccagcggcttcttataaaaccgcatttttgaaaggtaaaggcggcagtcgtcctttcttttcataagggcgataaccacaagaagggccgacagcgtttgggaaaccgaggtggcaatggccactccggcgacgttcaggtcaaagaatttgacgaaaatataattaagaattatgttgagcacgccggcaatcgacagataaataagcggccccttggtgtctccggcggcgcggagaattgccgaaccgaagttataaaccattccgcctatcatgccgcagaaatatatctccatataaatcgacgaaaggtcgatgacgtcggcgggagtggccatcatttcgagaaaattttttgaaaaaagcacgccgatgacggtgagaaaggctccgccgagaattgccgtgggaatggcggtgtgaaccgtttcgaaaaccgttttgcttttttttgcgcccagcgcgtgagccaccgacacgccggcgcccaccgaaagacctataaacaggttgacaagcagatttataagcgcacccgtggcgcccaccgccgcaaccgacaaacttccgcagaaatttcccaccattataaggtcggcggcgttaaaaagcagctgcagaattcccgtcagtattattgggacggtgtataaaatcatttttttaaaaagaccgccttcaagcattgggtcgctttgacggttttgctgcaaggtattttccgacatattttatttcctttttatatttattttacatataaaattctatcacacaaaatttttcttttcaagaccgttttgtgcagtttttatttgaacgctacccttaaaatttatgaaaaataaccacttttgagccttcattttgcggccgattttcgggggaatttacttgctttttacagccatttgtgttattattgtatacataaaaatatattttgggttgatagcggaatttttaaatttgaacggaatttttttggccgaaaatttgaaaaaagaaagaaaaaagcctgtatttttgatttgcgcccctttaaaaaatcccttcgggcgccccatttaatttataaaaaaaggaatgagaatgacggatgaacacatttgaagaggtatgggaaaacgtttgcgattattgtaaggatgaaatttccggagtggcatataactgctggataaagacgctctctccggtcaagctgcacggcaaggtggcggtggtttcggcccccacgaaatatcagcgggatttaaccgaaagtcactataaggagctgctcgagcgcgccttttccgaggttttcggatttcaggtgtcggtggaggttatttccgaggaggaaaacgctcccgcaagacccgagcccgaaaatatcaccgaaaccttcacctttgacaactttatcgtcggcccctccaacgatttcgcccacgcggcggcggtggccgtggcaaagaaccccggaaagcagtataatccccttttcatatacggaaagcccggcctcggaaagacccatttgctcaacgccattaaaaactatgtttccgagcacaatcccggatttaacatagtttacacccagggcgaggcctttgcaaacgagataatcgacgccatccattcgggcagcacaccggatttccgcgagaaattccgcaacaccgatatgctttttgtggacgacattcagtttatcgccggcaaggattcgacccagaccgaatttttcaacaccttcaattcccttcacgaggccggaaagcagatcgtgctgacctccgaccgccccccaaaggaaataaactccctcaccgagcgccttcgtcagcgctttgaaatgggacttcttgccgacattaaggaacccgactacgaaaccagggttgcgatcatccgcaaaaaggccgaagagcttaattttgagatgtccgacgccgtggctcagtgcatcgcaaatcagatcaagaccaacgtacgccaaatcgagggcgtgctcaacaagctcatggcctataccaatctgaccagcgaaaagccctccattttcaatgtcatcaccgtcataaacgaaattcgtcgcgacgaggtggacaataccataacggtggagaaaatcatggacgccgtttccaacgcctatgacgtcactcccgccgacatatgctccaaaaagcagcacatggagatttccaacgcccgccacatcgtcatctacatagcaagccaaatgaccggcatgacccttaagcagatcggcgagaaaataaaccgcaaccattccaccgtttcggcctcccttaacaaaatggaaaaggaaatggcaaaaaatccgagacttcgcgccaacatcgaggacatcatgaaaaacctcaaaaacgaataataagttttcaacacgggctgaaaaaacagcctgctcaaagcgactcttctttccgcgctttcggcccgaatttgtttaaatcttttttaaagccgagcaaaatcaaggcttgcgtacggtttaaggtttttaaagcctgttgaaaatatttttcgtttttcggttgcacaaggttacataatacctttatttttcgacacaaattttgaaatgttttaactttcaactttcaaaactttttaacggttttatctgttatctttttaaaagattttccgacatttttttgacagcccgctttcggctttaatgctcggacaagacgtgatttcaacactttgacagcccctattactcttactgaattaaacttatattacttaaggcacaaacccgaaaaattttcctttgtgtcccaaaattataacggaagtgaaattatgaagcttatatgtgaaaaaaataaactgaccgaggccgtttccaaggttcagattgccaccgtttcctcctcccttccggcccttgaaggaattttcttcgactgcaaggacggctacctcaccctgacgggttacaacctggaaatgggagtgaccgccgcagttgaggcaaaggccgaacaggacggacaaatcataatgtcggccaagtatttttcggaaatagtgcgtaaaatccccggaaacaccgtttccatcgaaaccgacgataaatatatatgcacaataaaaagcggagaaaccaagttctccataatcggtatgccgcccgaggaatatcccgacgttcccaccgtgacggggggagacggctttgaaatcgagggaaatctttttgccggcatgataaggcagacccgctttgccgtggcaaaaaaagaggataagcccatttacaacggtatttgcttttcccttggcggcggcgagataacacttgtcgcgctggacggctaccgccttgcaatcagaaaggaaaaaatcgactttgacggcaaccttaaattcgtcgtgcccgaaaagaccctgagtccagcttttcagccagaacggtttccagattgtacgcccaaatctca

SEQ ID NO: 3398 - DNA, 6265 bp, Unknown
  16S sequences of unknown bacteria
accgccactaaagcgcacgaaacgcgcgcgggatgagtggcactgccacgcatccggtgcaaaaagcagggggcctgcagcaatgctgcgggccccctttcgcttttcgttctgtgtcctctttgaccgggaaagctcctagtcctgctcgggcctgacggcgaactcctggaagaagcccttcggatcctcgaggtcatcgacggaggtgacatcgcggccgaggacgaacgcgccggtccaatcgccaaagacgcgcagcttgcgctcccaagacggcagcgccagcccatggtagccacgatgcgccatccacgccggccagccggtgaagatgagcttcttgttgccgttggcgaacagccccctgttcacgcccaggccggcgaccatgcccgcgttctcgtggtagtactgctcgagcgcctcgccgcgcagcgcgtgaacgaggtttctcgccagcaccttcgcctcgcgcacggcgtgctgggccgtcggcgcgcacgacccgtcggggaacccgccgccggagaggtccggggccttcgtgcagtcgccgacgccccacgcgtcctgcaccagcgagccatcctcgttcacgacgcacagatactcgttgcagttgagccttccacgtgaatcgagcggcaggtccgtgttcttcaggaccggcgccgcgatctgaccggccgtccagacgagcagcccgcagtcgatgacctgaccgtccgacaggtgcaggaagccgtcggtcgcgtcttcgatgctcgtcttgagcagcacgtgcgcgccgcggtcctccagcatgtcgatgacccactggccacgctcgggcggaacttccggcatgatcttgtccatgacctcgatgaggtagaggttcacctccctgaagctgacgccgcgcgtcttgcgcgcgaggtcatgcgcgaggctgacgatctctgcgaagcactccgtgccggacagaccgccgccgacaacggcaaacgtgagcaggcggtcgcgatggcgcgagcccttgggcagcgaagccgcctcgttgaagttctggatgaacgtgttgcggatgtaggttgcctcctgcgtggtcttgaggccaatcgcctggtccgcgatgcccggcgtcgggaacgtgcgggtcacgccacccagcgcgacgacgagcatgtcgtagggaatagcccactgctcgcccgacttgctgcgcacgtcgacctctttgtcggcgtggcggacgccctcaaccttggccgtgacgatgttggtcttggggaggtgctgcgcgagcgggacctgcacatggcgcggctcgatggcgccagacgccacttccgccaaaaacggctggtagacgaggtgtgagtgcatgtcgaccagcgtgacttccgcctcgcccggcttcaggctcgcctcaaggcccttcgcggtgtagtaaccgcccatgcccccacccaaaatgacaatctgtttcatggtctcgtcttcctcacgttgttgtgaacacatgcgacgcctagcatacgcctacacgaactcaatctctactagatttgtagtctatccgcagattttttggcgcctacgcccaccccttgccgtcggagccgaagcggaccatgagctccttggtgcgctcgaccatggcctcgcggccgggcttgagcagcttgcgcgggtcgtaccccttgccgaccttgtccttgccctgctcgatgtagtcgcgcactgccgcggcgaacacgagctgcaggtcggtgttgacgttgattttgcagatccccaagctgatggccttcttgatctgctcctccgggatgcccgtgccgccgtgcagcacaagcggcaggtcgccggtcttttccttgatggcctcgaggcggtcgaacgacagcccctcccagttgtcggggtagatgccgtggatgttgccgatgccgcatgcgaggaagtccacgcccagctcggcgatctgcgcgcactgctcggggtcggcaagctcgcctttcgcggtgacgccgtcctccgtcccgccgatgccgccaacctcggcctcgacggagatgcccttggcatgcgcgacgcgcacgacctcggcggtacgctcgaggttggtcttgaagtccgcctcgtgcgagccgtcgtacatgacggaggtgaagccggcgtcgatgcacttgaacacgtcctcgtaggagccatggtcgaggtgcaacgcgacggggaccgtgatgttcttggcttcgaccaggtcgcggaccaggtcggcgacgaccttgaaactgacctgccatttggcagcgccgctcgtgcactggatgatcaccggcgactgcagctgctccgcagcatcgaggatggacgccgcccattcgaggttgttcgtgttgaaggcgccaagcgcatagtggccgcgctgggccgcctggagcatgttcgttgcgttgacaagcatggactaaacctttcagacgtcgaatctattgaagcttgggtaagaataatgcattcgcgcgcagatggcgcgcatcgagtgagagcgcctcgcaaaagatccgacaatcgatatacttttcgcgaggtgcgcgtttcctgaaggacggcacgcatccgaaaaggcgcgggacaaccccgggcaaaggaaggaagagggagctatgcaggacaaggccgagcttaccggcgatacgccggaagagcaggacgagggcacgttcgaccggctcaggctcatcttgggcgatgagggcatcaagcgcctcgccgactcgaccgtaaccgtcttggggctgggaggcgtcggctcaaactgcgcgatggcgcttgcgcgcggcggcgtggggcatctcgtgctgctcgaccgcgactgcgtgacgccgagcaacatcaaccggcaggcagtcgcgcgccgttctacgctcgggcgccccaaagccgaggtcatgcgcgagatggtgctcgacgtgaaccccgactgcgaggtgaccgccctgcgcgcgttcctcgacaaggaccgcatcgacgagcagatggcggagctgcccgaccccgactggaccgtcgacgccatcgacacgatctcgcagaagctgcgcatcgcgctgtgggcacaggaatcgggccatcggctcatcagctccatgggcgcgggcaacaagctcgacccgacgcgtctgcatatcgccgacatctcggagacctatgccgacccgatcgcgcgcacggtccgcaaggaatgccgcaagcgcggcatcgagaaactcgaggtggtcttctccgacgagacgccgatgcactttgcgccgcccgccggcgccgagctgctcgccgacggcaggccagccgaccgcggcgtcctgctggggacgatgagctacatgcccgcgatgatgggctacacgatcgccgggcgcgtcatctgcggcctgttggggcttcaaaacgagctcgacccgttcaggacctggtaggtaatcgccatggggcagatcgacgcggcagcgggaacaggagcagggacgccggtacttgccgacatgcacttccacctggagtttttggacgaccccgaaacgtttttgcaggaagcggctgccggaggaatcgggatgcttgccgtgagctgcgaggtcgatggcttcttgaggacgcgtcgggcgctggaggcgacgaggacgccctttgcggttgcggcgctgggcgcgcatccgtggagggttgcagcaggagacgtcaccgacgagcagcttgagcgcttcgaggaactggcgccgagcgccgcggcattcggcgaggtggggctcgactttgccaacaagcacacgccggcagggtcgcacgagcggcagctcgccgtcttcgagcgcgtctgcgtggctgccgatgcttcggcgcgcgcggcgcaggccagaaagccgctttcgatccatgcggtgcgcgcggcagacgaggtgctcaacgtgctcgataagacgggttgtctcgaatcgtgcgcgtgcatctttcactggttttccgggtcgaacccgcagctgctgcgggcgcgcgaagcgggatgctggttttcgattaacccgagaggcatcgcgacgggacgcgggcgcgaatacgccaagctcgtgcccgccgaccgcatgctcctcgaaagcgactgccccgaggaaggcgacgggcgctttcgcgcggcgcagctctccgagctgctggagcaggacctgcgcgccgtagagcaagcggtcgggcacccggtcgcggctcaggtgctcgagaactcgctcgagctgctgggcagcctcgggcagcaggcggtgagccgacgctagtcgcagctctccgcgtcgccgacctggcgttccagccagcccttcaggacgatcgcatggtttacctgcgggtccttggctgcatagagcagggtcacaacagggggattggacgctgcgagcgtgctgacgtattcgtgcgcctcggcgctctggtccagctcggcctcatagcggcctttgaactcgccgaagttttccgccttgtgggcaaacgccttgcgcgcctccgtcgaaggcgccaggaccttggcccagtcgtcgagttggagcgtctccttcttgatgccgcgtggccagagccggtcgacgaggatgcgcgtgccgtccgattcttccggcgcatcgtagacgcgtttgatctgaatgttcattgctctcacttccctttctcacgcatgctagcgccgcggggagatgaagggcgttgtggatacaacgtcagtcttcgtgagcggcgacgctcgggatctcctggagctcgaagcggtacttctgcgcgacctcggggtacttctcgtggtcgacctcgctcaagaacatctccttggggcggatccacagcgagccgtcgtcgtagagcttgcggtagacgacgaactcctcgcccgtctcggaatgccgtgcgacgtcttccacgaggtagctgtcgcctttgaagtgcttgtagacccggtgcagtacgatttcgcgcatagatggctcccatccaataagtggccaagacgttggaggcgctgggcctcgcccctagcctaccacccgcacctggcacgaggggccgtgggtatcgtgccattttttgcgaaaaaatgtgttgacaatacccccaaggggtatatagtcgcgtcatgaaacataccgggtgggggtatccatggaagacacgaacgagaagagctgctgccacgcgcgccacaaggcaaacccgcgcagccaggaactgcaagacaacatcatcaaacgcctgaaccgtgccatcggccagctcaacggcgtgaaggcgatgatcgaggacaaccgctactgcggcgacgtcctcatccagctcgccgctgcggacagcgcggtcaaaagcgtcgagcggctcgtcttgcagaaccatctcaagacctgcgtggtcgaagagatcagaaacggcaacgacgagatcgtcgacgaggccatggacctcatcaaacgcatatcaaagtaagttggtgatctgaaatgaagcaacgcttcgatgtcacgggaatgacctgcgccgcatgctcggcgcgcgtcacgaaggcgacgcagagcgtcaacggggtgcaaagcgccaccgtcaacctgctcaaaaacagcatggacgtcgagtacgacggcacacccgagacgctcgcggcaatcgggagcgctgtcgagaaggcgggctacggggcattcccccacgtagagcagatagccggcgcgcccggtgcgcctgcccccgccccttctgcccaggagcgggcggtgcgcgagatcaagcgtgtgaaaacgcgcctcatcgtctcgtgcatcttcacggtacccttattctacctgtccatgggccacatgttcggatggccgctccccggagtctttctgggccacgagaacatgatgacgttcgcgctcacggagctgttgctcctgttgccggtcctgttcgtcaacttcaagttcttccgaaacggcttctcgtccctcgcgcggcgctcccccaacatggactcgctcgtcgcgcttgggtctgccgcatccaccgtctatggcatcgcggcgatgtaccgcatgggctttttcctcggccacggcgacctcgcggcagcgcacgtggcggccatggacctctatttcgagtccgcggcgatgatcctcacgctcgtgacgctcggcaagttcttcgaggcgcgcgccaagggcaggacgaccgacgccctcaacagcctcat

SEQ ID NO: 3399 - DNA, 14609 bp, Unknown
  16S sequences of unknown bacteria
agtatacgggtaaatccacgttgctacaaatgtgaggtcacttcatattgtctaaatacagagcaaattttttcgcgaacacttatgccctccgcatccttttctttcaagaatggcaaatagctttctgcattgttcaaaatcgcatttaattccgcttcatgaacttgctttgggattgaagcattttctttgcttctttgcagcggtaggaactttccgttttcaatatcttctaatatcgcagaaacagtgctttggtcgtcttcagaacaactcatcgcctctagaatcttttttatatttttaaagaatgcatcatactccttttcatttgtgagtttttttgccgcatatttctttccgtttttctttacttctcctatgtagtttgaatatgcattctttgcattcggattattgaaaaactcattataagtcttcttatcacaatacttcagaattaatgtccgaagtgttctaagatcccttttatgtttctcgtattgctttacctttgctttagaaatatattcttcttctccaaggatttcagataacttcccccagtcgtacagcatcttcatgctttcaataatgcgggcttcgtccggataaactgcctccatttcaggaagaatggtttctgaaaagatttcttctccgaaagagaatgatgttttttccattccacaaaagtctgtattatagaatatttttgcaacatcacccttgttccctgcaaagagtttgcagatatgggtgatgctgtctttccgttttttcttctcatctttatccagattctgagtcccatagagaaatactggcgctaactcttttgcacggcttgaattcggctttttactatttaggatttctctcgctgtttgaattccatccggtgttacttcaatatcaaatggaaaagcatcacttgtcatttcttccagaatttgtaaaaatgttgcgtcaaaatctctggcagccttcatatcgccatcgattaggaaatgcccacgattcttaataatgtgatgaagtgctaaatacaccaaacgaatgtcatgtggttccggattatcaattaattcttttcgcaaatgaaaaatcgtcgggtactctttgtggtaattgacatcgttatattcatccgaaacaaacagcggatatttaaaatcgacacttttatcctctgtatgcaatctactttcattcaatcgaatgaaaaatgtattatctatcttcgccatttcttctgcaaagagcatttgcaataaatcaattcgttgtttgcgtctatccgttcttcttctcgccgttctctgcgatctgcgctccgctgcggttttaccattctcaaacagtcggattccccacatatcctttttcttgaatttacacagattgtattcatcgtctgtaactgcccagcctacagaattggtaccgatatccaatcccaggtaataattcttcacaacctcattcataatgtttcctcttttttaacacttgacaatagcgactccgtaatgtaccatatagacaatctcaattgactaccatatgagataacactacaaggttcaaataaagaactttccaaaccgcccttcggggcccacatagatgtggattcagaagctcactgttgtgggtttctttttttatttgtctaaatcgattataacgaatagattatcgctttacaatcgtacttttcaagaaacattttattgtccaatttctttcccatttctgctgcatatgacacatcccaacgtcgttaagctaaaccgtcgttgaacgttgaatgcatttctaaattcaagttgtgtaagattaaattccacatgcttgtaattactcttacacaattaaaaaacacacctccaaggttggtttcatatccaaccttggaggtgtagttctttatgttattctcttctttttcccttcagatacttaattcttgcaatgaagtaaattacggcagcgaataccgataacacgagaatcgctccaataccggccgccaccttctctttaattatccggcagaagttcgccgttcacggagaaggccacccagttgcccacgttggcggcgtggtcgccgatgcgctctaggtatttggcgatcatcagcatgtccagaacatcccggtcgctgtcatcgatgcggccccggatgcgttcgagaagattgaattttattttttcaaaatactcgtccacgacgtcatcgtaggcaatgacttctttcgcgtgctccaggctccggacttggaaggcctctacgctggatttgaccatgtggaccaccgcttcgcccattttctggaagtcctgggtgcgaatggcctgggtgagctgaccggtgaggacgatctcggcgatgtccagggactgatccccgatgcggtgcaggtcggtcaccattttgagggtggcggaaatgactctcaggtccgacgccaccggctgctgtttcatgatcagctggatgcacatgatttcaatttcacgctccttctgggaaatcgtatcctgcagctttaccaccttctttgccagcttctcgtcattggtgaggaaacaacgaactgcccggtcgatgatgtcttcgcacataccgcccatcaggcaagtctgatcgtctaattctctcaattctccttggaatgtatctctcattaaccgaacctccctgtaatgtaatcttctgtacgcttgtctctcgggtcggagaaaatctgattcgtctctccgtactccaccaggtctcccagcaggaagaaggcggtgcggtccgaaatacgaacggcctgctgcatgttgtgggtgaccatgacaatggtgtactccttcttcagtgcctctgccagatcttcgattttgcccgtggaaatcgggtccagagcactggtgggttcgtccatcagaagtacatccggctttacggccagagcccgggcgatgcaaagtctctgctgctggccgccggacatgcccagcgccgactttttcagccgatccttggtctcttcccagatggccgccgccttcagggaccgctctacaatctcatccagctcggtcttattgcggatgccgccgatgcgcgggccgtaggcgatgttgtcgtaaatgctcatcgggaacggattcggtttctggaataccattccaaccttccggcgcaggtcggtcacgtccacgtcgttccccaaaatatttttaccccggtactccagggttccttccacccggcaagccggaatcaggtcgttcatccgattgatattccgcaggaacgtggatttgccgcatccggatgggccgatcagcgccgtgatggatttttccggaatgtccatgctgattttccggagagcttggtgctcgccgtaccacaggtccaggtctcggactttgataattggttcgttcatgctctatcctcttttctcctgtattttcttagcggtcttggaggcaatcaggttcagtgccaaagtcagcgccatcagcacaatggcgatggcaaacgcgatgtcgtaggcgcctcgctcactggcgtagatgtaaagggctaccgtcagcgtcgcggaggacgactgcaaagcctgcacgaaaccgatcatcttcagtccgaagcccgcggtaaaaagaagtgccgccgattccgaggtgatccggcccaccgacaaaatgcatccggtgatgatgccgtccaacgcgcttggaagcaccacggttcgaatcatatgccatttgccgctgcccagcgccagggccccttcccggtagctccgaggaaccgtcagcaaactctccctcgtattgctgataatggttggcagcaccatcagcaccagggtcagcgcgccggccagaataccttgcttcaggccgccaatctgaatgaaaaccagcatgcccaccagtccaaacaaaatggatgggattcccgtcagaatctccgcggcaaaactgatcaggttggtcagcttccggctggtggaatactccgtcaagtagatggcggcacccacgcccaaaggcaggacgatgatcatcgccacgaaaatgatatacagcgtattcagaatattgggcagaattccgatgttgccggtaaggttattcggctccgtggacaggaggttccaggtcaggcgcgggatgcctcggtacagaatgtaaccgatgatcatcaggagcaccaggcaggtgatgccggaacacagccccatcagccctctcagcagtctgtccatattttttctgtgcgtactcattattgctcctccttccggatcactctgtgcagaatccagttaatcatcatgatgaacaggaacagcaccagtccgatggagaacagggcctgtctctgcagcgatccataggacgcgtaggacatttccgaaacgatggcggtggtcaggaaccgaacggattggaacagtcccggcatgttcgccacgtttccggcaaccatgataatcgccatggcctcgcccagcgctctgcccacgccctgaatgaccgctgccgccacgccgctctttgcggcccgcagggatacgcggaaccatgtctccgtgtagttggcccccaaagccagtgaggcttcttcatactctctcggaacggcccgcagcgcggtggccgacacgctgatgatgtacggcaaaatcataatcgtcaggaccacgatggcggagaacaatgtggcgccggaggacaggtgaaatgctttctgcacgcccggcaccaatacggtcatgcccaccaggccatatacgacggacggaattcctgccagaagctctacagctccctgaatcaccgctgcgattcttgggggtgcggctttcgccaggaacatggcggtaaaaataccaatcggtattccaaggattaccgctcccgccgtgccgtagacgctggtcaggatgaatggcaggatgccgaactgattctgaccggatttccaggtggtaccgagcaggaacttgatcggtccgatttggtgaatggccggaattccggagataatcaggtacacgctgatcagcagcacgaaggcgacactgacaaaaccacagaacaggaacagtccgtgtattacgttttccattaaatcttttttcttcttcatcttacgattcgcttaccggaacggcaccggcgttacggatgaggtctgccgcatctttcgatgttgcgaaatcgtagaacttctgtgcttcttcggaaagctttccgtctttcttggtgatgaagcagaacggacgctgcagcttgtagcttccatctttgatggtgtcttcggtgcaggttacgccattgactttgattccctgaatcttgtcctggccctctactgcggagaaggacgcgtatccgattgctttctcattgctgcctactgcggaaattaccgcaccggtggatgtcaattcctgttccagcttgcacttgtcttcggtgccggttgcgctttcgaagccgtctctcgtaccggatccggactctctgccgatgcaggaaatctttccggatttaccgccgacctgactccagtctgtgatctttccgctaaaaatgtctgctacctgctgagttgtcagatcctttacaccgttctttgcattgacgattacggagattccgtccagtgcgatgaccttctgctccagtccgtccttctcgtcatccttcaatgctctggatgccaggccgatgtcggtattgccgttcttggcttcctcgattccggtaccggatccggttggatcgtaggttacctttacgccttcgttatccttctgatactgttccgaaagtgcacccatcacttcttccatagaagtggatccgttcgtgctgaccgttgcactcttttccttgctgctgccgcatccggtaagtgcagccacgcccatcagaccggtcaggcccagggcaatcagtttgagatttctttttttcatccttctctctcctttactttctttcccttttcaattgttttcttgtctgttttctgattacaggtataagtatagggcgatttcgtaaagactgttatcgaggtaaagtaaaaagaacgtaaaggatggggtggcctacactactttcagcaacgagaaatccgcaaactgcgcctgctgaagctcggcgattttaatgctctgggcggtttcctccaaattgtacaggtgatccacttcctgggcgatgcgttccatatccaaacccaacggtgtctcgaacgacatcagcagattcactcctgggatgaaccccagattccggtagatatccgtcttcccgttaaattcattgcgatagaactcggaggaggtttcatgataccaaagccccaaatgctcccaaagaaaaatggctcccgtttccggatgaatcaggaggaaatccggacggatgaattttcccggcgcatattcgatgggatactcatagattacgtagaaacccgctgcgctgaaccgctcgtagagcagcgcttccactcggctccgcacggccgttccgtcaaatgtcaagattttcaaattctccgggtaatgaaccgggatctttgctttatgcgcctgcatcgcccggaagcgctgccagatgggattcttctccgggtgcagtgcgtactccgtcggacgtgtcggacgataatgcttgggaagagctgcttttaccgcggcggccgatggcgaactgtacttttcgaggaaggcctccattgctttgatgttcttctccagcacctccagcatcgcccggcagaatcgaagctcccggatgccgcgcaccgtctcgttctcggcactgcccagatatacttccttccccttcttcttaccatagtaatatgctcgcccgttcttgatgcatatccgcagcgtcattttgtcatacttcatcagcgccttctgccgctgaaggtatcgtttccgaagcagccgattctcgtccagaccggccttcacgtatttcgaacaatgaaccattttcctcgctcctttccttcattagatgtgattgaccgcaaatctcttgcggccctcttcttagttctattatcgcaaatgcaccgtgcccatgcatcatatttcgttcgagaaaaatcgagatattgcttattgcataatcctgattggtattcccctgtgctctaattaatttatctttctcatgctatccggctctcatatgcctagtttttttgagcgagttcacgctaattttcaaagaagtcccgattagcgtgaatcactttttgaaaaaatcccgaaactctaattctccgccgtccctttcgttttattttcacgctgaatcgccatttccattcaaaaagcgtgaacattttttttcagcaaattctttctcccccttgacacacctttctacggaatttacccaaaaaccgttcacgctatttcaccgttatttctattttagcgtgaactcgtctcgtttttctaggcatatgagagtttcgctataataatatctctacttcaccccaggcggccggtgatgcttcgtggggaccggtccgcccttgtcccaagggcgccccattgccattcggcgcacggaaaaggcccgccgggcgttcccggcgggccttcacttgcacacttgcgtgcctgcaaacttgcacacttgttatttgtattccttatcccatctctcgaagtagtcaatctgcatcgcatgctttaccgcagccagcgtcttctccgcagtggctaccgcatccgcggtaccggctctcagaatctcaacgacttcttccggatgctgctcgtagtacgctctcttttcccgaatcggggtcaggaactcgttcagcacgttgaacaggaatttctttacctttacatcccccagaccgcctcgggtatagtgttccttcagctcgtccaggttcttgtattccggcaagtacttttcaaaatcctcatcacagcagaaggcatccaggtactggaacacggtgttgccttccaggtggcccggatcgctgaccttcaggtgagtcggatcggtgtacattcccatgaccttctttttcagcacgtcctccggatccgacaggtaaatggtatttcccagagatttactcatcttcgcctggccgtccgtgcccggcagtctcatgcaggactggttcggaggcagataaatttccggctcgatcagcacctcgccgtacacgtgattgaagcggcgcacgatttcccggcacagctccagcatcggctcctggtcctcgcctaccggaacggtggtggccatgaaagcggtgatatccgaagcctggctcaccggatagttgaagaagcccatcgggatgttatccccaaaacctctcatttgaatttcggatttgatggtcgggttccgctgcacgcgggacacggtgaccaggttcatgtaatacatggtcagctcgtggagctgcggcaccagggactgaatcataatggaagtctttgacggatcgatgccgattgccagataatccatggcgacctgcatcacgctctcccgcaccttctgcggattctccgcgttgtccgtcagcgcctgggcgtccgcaatcatgataaacatcttgtcgaactccggatccttctgaatctccagccgctgtctcagggaacctacgtaatgtccaatatgtaatttaccggtcggtctgtcgccggtcagcataattttacctgccataattttttcctcctcataaaaacacgttgcgattgtcatagtttaccgttttgccgggttaccatcgccgatgttccaaggcggccgggtaaattgccgtatttttcataacacctttctcctgtatcttatagattatagtacatcgatcatctcccgatgaattttgcgggaatagataatcgagaacgtcaggcccacaacctctgcgattgggaatgccagccacacgtaggcgacctcgcccaagcgggacagcaggaacgctgccggaagcagcaccaccagctgtcgaataatggaaatattcatgctgtaaatgctttttcccaaagcctgaaatacactgcccttcattatagcatagccggccagtggaaaaccaacagaaataattcgaagcgccgggatgccgatagccagcattttgtccgaggcatcgaaaattcccaagaagacgttgggaatcacccagaacagaagcattcccaccgtcataatcatcaccgcgtaccgggtactgagccgggatgcttccagaaggcggtccttcttccgcgcaccgtagttgtacgccacaatcggaaccacaccgttgttcagtccgaacaccggcatgaagataaagctctggagcttgaaataggcaccgaaggtggccaccgccgtggaggaaaaggcccccagaatcaggttcaggaagaataccatcaccgagcccaccgcctgcatgatgatggacggcacgccgatctggtagatttccttaatgatatgcagatccgggcggaagcctttcatgccgatcttcagctccgtatttttcttaatgttcaggtacacgcccagcagcgccgcaaacgtctgtccgaagaccgttgcgatggccgcaccggcaacgcccagtttcggcgcacccagcaatccgaaaatcagaatcggatccatgataatgttgataatcgcaccgcttccctggatcagcaggatgtaggaagttttgcccgtgctctgcagcagccgttccacgcacagctgcaggaataccatgatggacaaagtacagacgatactcagataggtggaaccgtattctacaatccgggcattctttgtctggaacgcgatgaacggatgcgccgccatgccgatcagcaggaacagcagatacgttgcaaaggccaggaaaattccgttctgcgccaccttattggcccggtcaaaacgttttgctcccaagtatcgagaaatcaaggcgctcatgcccaccgccgtaccgatggcgaacgccagaatcagcgcctgaatcgggaagcacatggacaccgccgtcagggcgtcttcgttgatccaggacacgaacatgctgtccacaatgttatacgccgcctgaacgaacatggaaatcatcagcggaaaagacatcttcagcaaaagccccttcaccggcgcataccccatccgattttccggctgcaaattctcttcactcatcatttctttactcaaactaaatctcaacctctctctttttgtattcttctcgtatatattacctttcattgtaacatacttttccattgttatgggtaaaataaaatattatcaggcgggagtggccggaaacgtccggacggggcgaactttttttaccgaaaagttcatgcaaaatccgcatggctactccaaaaaatactctaatttagtgtcggaaattgtactcgaaatacaaatttgtgtccaaaattgcacggtttcacatacaatttgaggttttttctaacttctttaatttttataacaaaaatttttaaaattttttgttgacaaacacagaaacttgttttaaactaatcccatcagtcagagagttggttggaataagtttttatctctgacgggaatttgaaactgaatctataaaataggaggttgcattcatgaaacaattcacagcaatgctgagcaccatcgatggttatgtgtggggcatccccatgctggtactcattatcggaaccggtctgcttctcaccgtgagaaccggagccctgcagttctgcaaattgggtaaggcgctgaagtacatggttcacaacgaggaaggcggcgaaggagaggtctccagtttcgcagcgctgaccaccgcactggcggccaccgttggaaccggcaacatcgtcggcgttgccaccgcaatctgcaccggcggaccgggcgcattgttctggatggaagttgctgcctgcgtgggtatggcaaccaaatattcggaaggtctcctggccgtaaaataccgtgtgctggacgaaaacggcaaggcactgggcggaccgttctactacatcgaaagaggtctgggaccgaactggaaatggctggcaaagcttttcgccttcttcggcgcggcagccggcattctgggaatcggcaccatcactcaggtgaactccatcacctccgcagtgggccgggtattcgatccggaaagcaagcacattgcattctccatcggcgaccactcctacacttggactacaacaatcgctgcaatcgtcgtaaccgcactggtggcactggttgtcatcggcggcatccagagaatctcttccgtagcatctctggtcgttccggcaatgatggttctgtacgtaaccgcagccgttgcaattcttgtatataactacgctgcaattccggcagcaatcgccaccatcgtaaagagcgcattcggtatggatgcggttgccggcggtgcactgggtgccatgattgccgcaatgcagaagggtgttgcaagaggtattttctccaacgaatccggtctgggttccgcaccgatcgcggcggcggcagcgcagacaaaggaaccggttcgtcagggtctggtatccatgaccggtactttcctggacaccatcgttatctgcaccatgaccggtctgaccatcgtcatcaccggttcggacaaagtgggtctggaaggcgtagacgtaaccattcgtgcttttggccagggacttccttggagcgaaaccttcggcgccatcctgctgatgatctgcctggcagtattcgctttcaccaccacactgggctgggactactacggtgaacgctgcttggagtacttcaccaataaaaacatgaaagccgtaaaggcataccgttacctgtacattctggcggttctcatcggtccattcctcacactggaattcgtatggaccttcgccgatatcttcaacggcctgatggcattcccgaacctggttggacttctgggactcagcggtgtcgttgcggcagaaacccgcagctacttcaagcgtctgaacgccggcgaagtagacgaaggcgagaagttccgcaagaaacagaagaacgcagcataacgcattcatatcatttcctatatcatcacacaatttgatgaaagaatccccggggcgtcctccaaaatgaccccggggtttctttcgttcttttttctattcctccagctgcttctgcatcgtccggtggctctcgatggtcagcagcttctctttaatgtccaacccgccgttgtaccccgtcagccggcccctggatccgatgactcggtgacagggaatcaccagcggcagccggttgtggttcgccgcaatgcccaccgcccgccaggctttgggactgccggcggcttcggcaatttcccggtatgtgcgggtttcgccgtaagggatgtccagcatggcacaccacacttcttcctggaagcgggttccttccatgcgaatgggaaaggtgaattcctcccgctcttcttccaggtattcctgaatctgccggcaggccttcttcaggacgggggcaacttcggcgcaattcaggttgttccgggtgtaggccggtccttcgacggcggggaaatcgcttccctcaaagaagacggaggggaaggggtctcggaggaaagcgatttcccgaatctccttttggtttcctttgattttcagttttccgatgattcccgtatcataaatgacggtttccatccgcccttcccggttttcctgcatttcgacctcctgtttctatcaatccgttcgttggagccattgtatcacaagaatcgcgccggtaaagggctgcggaacaaaaaggacttttcccacgggaaaaagtacgaaaacgcccgaaacgtaaacttccgaatataaaaaaaccggtcaatgcatctgcattgaccgaattttctcctcttggagctgctggcgagaatcgaactcgcaaccccttcattacgagtgaagtgctctaccattgagccacagcagcacgttcgtaaccgaattgccctatgattatacacgaacgaagaggtaattgcaagggtgcgcccttttatttttcttatccgatgtctttgatattgccgaaagccaggcccacatagccttgggcgtatgcggccgccaccatctcgcccgcgctgttcatgtataccagggtgccggacgacttctccacgaaggtgaaatttttctttttcagcgccgtgaggtatttctgataggttttcttcccggctttatattggacggaggtcaccccgtcagccttcaggaatttgccgcgctttccgtacagcgccccaaaatccgggattttatatcctttatagtgcttcggcaccgtgattctgcacttcaaagcaatgccgttccgcacagccgtaacggtacaggttccgccctttatcccagtcaccgttcccttcttggacaccgtcgccaccttcttgttgccggatttccaccggatgcggcccttcccgccggtcaccttcagccggaaactccgggaattgtagacggtgattttctttttattcagccgcggattcactacggtcaccttgcaagtgtattttttcccgccaaaacgagcgactaccttgcaggtcccgcttttccttcctttcaccacgcccttaccattgaccgtggccactttcttgttggagctgctccacttcataccggtcttcgcccccaccaaaacattggtgaaccgagcgttcttccgaatggttttcttcttatacttcagccccttcggctccaccgtcaccttgcacaccgcccggctgcccgacggaaaaaccgcgctcaccgtacacttcccggcgctcttggccgtgaccagcccatttttgtccacggcggcaatcccggcattgtcggacgcccaggtcacatggaccggcagcccttccggctgagtattcgctaaaaccagtttctttttcgccttgtacttcaggttcaacgcggccgggagctccccggactgcgcctcggtcggcggattttcttctccttcccccggcagaatccccggtccttccggctcctccgttgcccggccgtcccggctgccttgattttcttgacttccttgaccttcagcagttgttccaagctgcctgctgctacctttatcagttgccgatcccacctctgcagctgcaaaagccggaatcacagacaccaccaaaattcctgcgaggaccattgctagaatccgtttcatattctgtcctccacttacaactattcaggttaacacgtcttaagtggagtatatcagagccgccgcccacccgcaaggggcggcggcaacatggacgcccggcaggtgagttttgagccggcctgttggcgtggctcggcggtggcataaggctttgccggcggaggggcgccaacatgggcggccggcaggcgggattcgggccggcctgttggcgtggcccgacgatgggataaggctttgccggcggg

SEQ ID NO: 3400 - DNA, 11932 bp, Unknown
  16S sequences of unknown bacteria
ttccgccacaggcggcggccttcgtgcgcccccctccagtttccgctaaaatcctacggatttccgggcgcggaaactgcaaagaaacgatttttgctctggaaaatgggattttccgccgcaaaaatcgccccgtccccgccgtacacgccgccggggacgattttaatgcgagagggcttcggttctctcgcgctctcctcggggtttttgacagtctgagggatcatgaaagaacaaccaaagtttcttcacagcccattcaatcgctgaagcatggcgaaggatccgccgcggtatccatcaagcctttgctgctttacaagagcaaattgagcgccaccagtagtcccacccctggcaggccgaggaaccccaccgccatggccgtaaatggattgagcgcgatggaaaaccccaccatgccgccaaaaaagttgatcaccaccagcaccagcgcgccaagcacgccgcccgccagcagccgccagagaaaccgccggggcaccagcagaagatagctgatcaccgccatcaacgccagccccacgccaaacgccagaaccagttcccacggaatccgcaaatccttcgcctcccctcgccaaaccatatgcggaggaaggcaggcctatgcgatgggcgaaaaccaattcccaaagccgcgccaaagtcctttatcccttgatcgcgccgatcatcacgcccttgacaaaatatttctgcacaaatggatagatgaccattacaggcacactggaaacgatgatcagcgaatatttcatcaaatctgcgcgctgctccattttttcgatgttcgccaggttgttcagatcctgattggtcagcgagtgctgcacattgaccatcagaatttcgcgcaggaaattcggcaacggcagcttgctgcgcgtcgtcagatacaccatgggattgaaatagtcgttccacatgcccacggcgtaatacagcccgatgacggccaagattgccccggaaagcggcagcacaatggaaagcagaaagcgcacatccgaacagccatccagcatggaagcctctcgcaattcctcgggaatttgcgtattgaaatatgtgcgcatgacgatcatgttgtacacggacagggagccgggcaataccaccgcccagatggaatcgatcagcttcagttggcgcatccacacataagtgggaattagacccccgccgaaatacatggtgaacacgcacagcgccatcataattttcccgccgccaaaatccttgcgcgataacggataggcgcagcagaccgttacggccagggaaatcaccgtgtacagcgcggtataaatcacggaatttttgtatcccacccaaatatcgctgtgttcgaacaccgccttatacccttccagagaaaacttggaagggatcagggaaaggttcatataggccgttccaccgctaaaagacgacataatgatgaacagcagcgggtatgccaacagaatcagaaagagtgtgagcagcagccaatcggccgcaaggaatatccgatccgcccacgaatagcggatatgcgtttttttggcgattttcccgttcattttcccactcccttccactaccacaatccattgccgctcaggcgcttggtgatcgcgttcacgatgacgagtagcaccagattcaccacggacgtaaagagcccaatggcagcgccataggaatattggggcacggctcccgaagaattgaggccgatgttgtatgtataagtgctgatgatctccgaaacgctcaggttcaagttgttttgcagcagcaaaaccttttggaagcccacatttaagatgctcccacagcgcatgatgaggagaatgcaaaaggttggcaaaacgcagggaatgtccacatgccaaatgcgctttacaatgttcgcgccatcgacgatggccgcttcgtgcagatccggcggaaccgcggacagggccgctatataaatgatggaagaatagcccagtccctgccacacgccgctccagacatagatgtgccggaaagcgctgggataggtaatccaatttcttgattctatgccgaccagattgagcaaaacattgatcaggcctccacgcgcctgcaaaaattgcaaaatgatgccgcacataaccaccgtggaaatgaaatgcggcgcatacgaaatcatttgaatggccttgcggtagcgtttggaaggaagataattcaaaagcagcgccagcaccagcgaaagcggaaacgtacacaattcatacaaactgatggccagcgtgttgccgatgtacgtccatgccatggggctatcaaaaaatttcgtaaaatactccagccccacccacgttccgctcgtgatggatcgggtgattttgaaatcccgaaaagcaatctgcaccccgtacatgggtgcatacttaaaaagaatgagtatcgccaggggtatgagaattaacagatacagctgccagttgcgcatcacatcaaaccaagcacgctggaccagggattttctcttgaagaccgggatggaatgcatgttctttcgcctcttctcatcgaatatagggggaaggcagccctgcctccactttgcgctagaccagggaagcaggagactgccttctgtgcaggttccagggaaacctctcgccgcgctcaggtctatatgtctatacgcggcttgccagcatgcccaaagaaatgcctctttgcgggcgcgtcaggaaccaaagttcacttcataaacgacctcgagatagcgagacaggcccaaatcttccaggctctgcttgtattcctcccactccgcgtcgtcgtccacgtcgcggcggcccaggatgaactccgcatacgcggtcgaaatggcgttttcgatattggtctggagatcggccatttccgtgagcaggtcgctatcggtgcaccagaccgaagcgggcatatagtcgcctacgccagcggcggcgtattcccggttggcggcgcgctgcacctggtcgctcttctgctcagccgagccctcttcatacgcaaagtcatagtagctgctggggatcgccgggaacacccagttgccatagcagtgctcgttcaccgagccgccatccttcagatcggcgcctggaaccgccttcgacacgatgggcaattcgccttcttcgcttacgcgagtccaataatcaccctcgttgcccaggttcgtcacgcggttgatctccgggtccaggcaggcgtcgagccagtcgatggccagctgcggatcttcgcaggcggtggtcacaacgccattcaggctgatgccgctcttgcgggtgtaggtctgcgctggggtattttcatcgcgcttcagaaccggcatataggtgaactcgtcgtaagcgcgctcgccaaagatggaaacggtgacgaagcgcatccagtagggcgcggcagcgatgcctacgacctgatcctcctgcttggtgacgttcacgatatcgcggtattcgttcagcgtaagcgcgtagatgtcctccgcgatcagcccttcttcatacatgctgttgagatacgagaggccctcgcggaaatcatccgtaatggccacgcagctcacgttgtgctcctcgtccacccacaggaagttggacggagtaagctggaacgcctgcatgatggcatacgtgggatcggaaccatcgtggtcgaaggcgaaagagcccagcatgggaatttcgtcgttgggatcgccattgccgttcatgtcgtggtcgcggaaatagcgcaacagttcgcggaattcatccaccgtttccggcatatccatcccactggcctcgagccacggctggtaaatccacagcttataagggttggcgttgctatccttctcccctgcttccggcaaagcatgccacaggctgtaaatgttgccatccggcgcggtaatggcttcgcggatttccggcatcgcctcgaggtattccttgatccagcgcgtattctcgatgtaatcgttgagggggatgaacacgtcgttggcgtattcaatgatgtcggcagtcgtcaggttgttcaaatatatgtcgggatagttgcccgaagcaatgtgcaggttgaacatcacgttcatgtcctcctgcgtgccgggcgccgtggtccagttgatcttcacgccggtcagttcttccagcgcagccgtctggggattcacttcgtagttggcgacattgccatcctgcccgcaccaaatgtccagttcagcgccttccgccacgggatacaggctcggatctaggtacttcagccgcaattcatccgcaagggcggagcccgtaagcagcaaactcacagcaagaatcagcgacaacaattttttcatggggtttcctcctccaaaatggtcgtttcatgcgtcgaagggaaagtcgagaaagcgacgggaggattccagaaggcctgcgccttgcctgaaggaaattaaaggtacggcagattccctatggacaagggcgtgcagcgaaccgcataaatgcgccaatgcacgagcaatagcattgcttgtgcattatggagaataaataaaaatgcacctatgcaaatcaattatcctacgcttcgatttttgcaaaatattttcgtaaaaatttaacattattgtgacgcgcaataaatatccactgatggctatatggtcattgacgcacctatagtattttcccgcaatcgtagtaaaattcctctaggacgcaatgagaggaataaaaagaatgaatgcaaaaatacccgtgcgctctgcgcacattgattatgagcacctgtatgaacgcatcaaaatgtatcgcaaggaaaaaaacatcaagcaacatgaaatcgcaatccagctgggatatgaaccggccaactatggcaaaattgaacgcggcgaccgcccaatgagcctatctgtgctggcagaaatctgcttgatcctcgaagtgccgctcgaagaaatgctaaaagggtgtctcattggcggcaattggaaagacacgccccaaatttcttgtgaaaagcccgatattggccgtgctttccaactcttgctggatggaaagccgcgcaaaaccgtagatctagcccttgccctttgtcaaacattggtgcatgaaatggaaaaatcccctcaggcagaatgcgccaagcggccgcaaagttagcgcgaaagcgcatgcgcggcttttatggcaagccacgcatgcgctcaattccaaagtttgccgtccctacttgccaagatactccgcgaattgaaacctggccagccggatatgcttgcgcgccacggtataggaaatatatgccgtatctccatacaggcgcacatagggataaaagcagctatccttcatatccaccaccagcaggggcgtgctgttgcaaagcgcctcctgatccacgcgcacaatgccaaagccatcgcggtcgaccggcgcgtgaatcaaatacagctcgccatcatagaggacaaaatccgaacgcgactgcgcgtcggcaatcagaaaaggcgtggcccaggttttctggcacaaatcgtagtacgtcaaaaacccctgctcgcactcctgttgccgtacgaaatagtagcaccgatcgcccaccacatacgtcgcattttcccaccgggaattgttgggaaaatccggcgcggccacatattcccaggtgatcaaatcgcggctcttgatgatgcaattgaaattcccggaatacgcgccggaataataccaggtttcccccgcttccatgcgcgtggacaatttctgcatgatgccgatgtcgctccacatggccttgaaggggagccggtagtagctcagcgccgccttcatcccagaaatgctgaaatcgttgacgacatcgcccacgcggaagcgattcacccggatgggcccaagcgttttgcgcgaaagactgaaggtgcgatacaggcgatgataattgtcctgcggcgaagctgtccacatcaggtacaactcatcgccgcccttatacatgaggatggtatcgtaaacgtgcgtgatttctcgcccatccagcacgtctccaaccttttgcaattccaggatcgccatatcctcgggattgtccagcgggcaaaaggccagccgtgccgcctgctgcgttggatcctcctggtctgtgcccgtgttggcgtaatacgtcatgtataccatgccatcgaggattacaaaggtggaaacatgcaccatctggtcgggctttcccccattgcgtcggcaatacgcctctgttttttcaaaatccgcaaggatcttgcccgcgatttcccgcgcgcaggcatcgcccagcgccttggcccgcgcgtcgtcggccgggcgaatgaagccttcatatccctgaatgggaaccgtcggcaggatggtatcgccattgccatttgtgatatccggcgtatatacgcttgtcgcggcggagtttaccatgcgatcattttccatgctcatgcctcgctttctctggcgtttcaaaaacccacttgtattataggcgaatttctgctataattcacgccataaagcgctgaatactggccaaaaatatccttcaggagcgaaaacgccttatgaattatctccaccagcaccacgatgggccgcaaatccttcacaaccaaaaaatccatttcgaattgcacctgcacagcgaagtggaaattattgcgctttataagggcagcgccagcctttccgtggatggaaaaagctatcgcatgggcgctggggatttcctgatcgtctttcccgaatcccttcacagctacgccgctgaagcggatgtagacgtggggaaattcattttttctccggaaatcatccccgagctggcgcccattctcaaagaacagacgccgtgtttccccattctcgcgaaagactgtgcggcggcgaaagcgctcgcagacctgtccagagaaattttggcggaattcgggcacagttcccccatcgtgcaaaaagcctatttgctcttgctgacgggtaaaatcctggaatcgctcgaaacagaaaaacagccaaagggttctggcgacctgctcatgcagatcatcgaatattgcaaagcgaattttcaaaacaccatcacgcaagccgatgtcgcgcgggcaatgcacatcagcaaaagttatctttcccatctctttgccggcaagctgaaaatgaacttctgctgttatatcaacatgctgcgcgtgaatgaggcttgccgcctactgcgccaaggcgaaaaaggtatgctggaagtggcagaaaaaagcggtttttccagccttcggtcgtttaaccgcgcgttcgccaggcaaatgaaatgttcccccaaggaataccggcggcaggcgctcgccgccgagcatcctctcccaggcatgggttgaaccaaatgccgcattccatgccattgcgctcccagcttgacaaagcgcccccatccaaagtataatggaaccgtttggaggatacgaatatgccgatggatggatttaccctgcactttctcgcgcaggaactgcgcgaagcgctcgtgggcgcgcgagtggaccgcgccgtgcagccagagcgcgacgaagtgcttttgaccatgcgcaaccacaatgaaaacttcaacgtgctattttccgccagcgcgggctgcgcgcgcgcccacatcacgcgcgtcaaaaagaacaacccactcgagccgcccatgctatgtatgctgctgcgcaagcacctttccggcgcgcgcgtaacggatgtgcgccagatcgactgcgaccggattttggaaatcgcctttgagcacttcgacgagctgggcgaacgcacaaccaagacgttggtgtgcgaattcatgggcaagcattccaacctgattttcctcaccgcggacggcaagatcatcgatagcgcgcggcacgtcaccgagcagatttccagcgtgcggcaggtgctccccggactgtactaccagcgcccacccgcacacggcaagctgcccttccttgcgctggagcctgccgcgttggccgcccgtctggcggaagcgcccaagacgctgcacaaggccctgagcgaatgcgtgagcgggctttccacgcagactgcgcgggaaatcgcctaccgcacactcggcgatgaaaacgcctccacgggatcgcttgcgcccgaagccgtggcggaagcggtggtgcgcgtcatgcaggaaatgctgggcgaattctcccccgcgctcctctacgcgccgggcgaggacgcgcccatcgacgccgtgcccatccccttcaaaagccgcgcccacctcgattgccgccccatgcccagcctgagcgccgcgctggacgaattttaccgcgcgcgcgatttggcggagcgcatgcagcaaaaatccgccgcgctgcaccgcgtgctgaaaaacaacctggagcgcagcgaaaaaaagctggccatccaggaagaagcactgctcaactgcgagcgcgcggaggactaccgcatcaagggcgagctgctgatggcgaacctgcatctcgtgagcaagggagccaagcgcgtgagcgtgcccaactattatgacgaagccctcacgcccatggaaatcgagctagacgagcgcatttcccccgcccagaacgcgcagcggtatttcaagcgctatcaaaaagcccgctccgcgcgcaaattcgcgctggagcaaaaggccatcgcgcaggaggaaattcgctatctcgcctcgcagctgctcgcgttggaaacctgcaccgaagaagccgaactggccgaaatccgcgaagagctggaaaaactgggctatgtgcgcgcaaaccacaaccgccggcagatgaaaaagctgccgccttccacgcccctgcgctttaccgctccttcgggcgcggaaatcttcgtgggcaaaaacaaccggcaaaacgacgaactgaccttctccgccaagcccggctacgtatggctgcacgccaaggacatgcccggctcgcacgtgatcatcgcgcgcgaaaacccggatgaggccaccatccgctttgccgcctcgctcgcggcccgctattccagcgggcgggaaagcgggcgcgtgcccatcgattacgcgctgaaaaaatacgtgaagaagccttccggcgcgaagcccggcttcgtcacgtacaccaaccagaaaacgctctacgccgaacccctgcgggaagcgtgagccgcgtacaaacgcatcgcgcccgcctagaaaacattctgggcgggcgtgtcaggctgtcaaaaaaaccaggggagcgcacgagatggctggagccctttcgcgctttaatcgtccccggcggcgtgtacggcgggggcgcacgaaggccgccgcctgtggcggaaacaggccgtagtaagcccaatgaagcagggagtgccacaagcgagcttgcgagcgcagtggaacgaccatgctgaattgagggggtgcaggagctcgcaatatgccgcgtcggaaaatcccattttccagagcaaaaatcgcttccttgcagtttccgcgcccggaaatccgtaggattttagcggaaactggagggggcgcacgaaggccgccgccagtggcggaagcaggccgtagtaagcccaataagcaagggagagtcgcaagcgagcctgtgagcgcagcggcgcgaccattgcgaattgtggatgtggcagtggcgggggagcttgctcccccgtccaccagcttgtcaaaaagacttttttgacaagctcccgcgagccattgcgccaccgcgccgctatcgttgctgccgataacgcctgtggcaatggccttcaattctccggcggcgttcgccaccgcatatgcctcctgtgaaatttgaaacatgggaatatcgttgatggcgtcgccaaaggaaacgatcctttcacagcccagcaagcggcaaagcttttgaatggcgtttgccttggtcgcccgcgcgggcatgatttcgcaccagaattccggccggtacagttcctgctggagcgtacaacggaaacggacatcctgcgcaaaaaaggcatgcaccggctccaacgctgcccgttcgccaatgcaggtaaaataaaacttgtcaccgcggaacagttcctcccggctggcaacggggcgcaagcgccggtccccttgccgcagggaaagatagcgccgcacgccgtcattttcccgcccagcgatccaggatactcgctccacgccatccacataggcatacaccaacggatcaacgccgaacgaatcgagcgcctgcacgacgaaatccatctccggcgcgctaaatccttcccgcgccaggatttccccgctgtccgggcgcagaatgtacgccccattgtacacaatcaccggcgcgctcacccgcaggccatccgtcaccacggaggcagaaacgtacgaccgcgccgtggcataggtgaacagcattccccgcgccatcaggcggttgagaatctccaggctttccggtggaatgcggccggcctgatcgagcaacgtgccatccagatccgtcacgtatagcgttcttttcactcgccttcctcccctatatcaaacaaaaaccggatgccgcaaattccttaaaaccgcgcgccacggcggagcatttccgcccgcacatcctcgccgcggattgcgcgcacttcgctcccatcgcgaacggccatcgccgcggcgatgcccgccgcctcgcccagcgcgcgggccgtgggctgaatgcgcagggaagattgcgctacgaattccgaagagatacaccggcccgccaccaacaggccatcgacccccaccggcaccatgcagcgataaggaatctcgtaatatggcgcggtattttcctccgaaacgatctcctgattgcgcagtttatgcccatgcacatcgatgggatagttcgaacgcgcaaccgcgtcggagaatttgcggtggctgagcacatcctcgttggtcagcatgtattcgccgtgaatgcgccgggattcgcgcacgcccacctgcccggcgatgctggataccgacgcgcccgcaaaccccggaaaatgcttgcggtaaaaggccatctggcggtaaatcgcgcggtgcgcctccagttgtgcgcgcgtgaggtcatccggattggtgccgtccacatgctcaaagaattccggacaattgaaagcgatggaatccggcctgccgggcacagagaagcattgccagtatttgccatcctcttccgtcaattcgcccgcgcgcacgcccgcacggaaagtttcgatcaggggataatcccgcccccacaccaccgccgcatggaagaaatccgggttgagcgcataaggatatgcgaatccggtttgggacaattcgcgcagatattcgataaacgccgcgatatcgatgcccgataccacgtaacgcacggatatgggctgatttttgcccgtttcgggatcgcccgcatcgcacggaacgcccgcacgcgcggcaacatcggcatcgcccgtgcaatcgatcacgcacttcgcaaggatggcgaaccggcccgccttatcctgggcaattacgcccgcaacgcgcccttcctccagcacaggttcgcaaaactgggtgtacagccgcacttgcacgcccgccgccagcaccgcttcttccagcacgtaggccagcgcgatggggtcaaaatggccctcgttccccttggcgtcagcccggccaaagcccagggtaatggcgcggcggttcagttcatcgctgatggctgagcacatgggattgcccgctatgcccgtgtgcataaaaggcgtaacaagtccctgcgtagccgcgccgcccagcgtgccaaacgcttctatcaccgccgtgcgcgcacctgcgcgggcagcgg

SEQ ID NO: 3401 - DNA, 5774 bp, Unknown
  16S sequences of unknown bacteria
gagctttttcttcatgacagccttgaagccgaggagctgtatcgtgatgagcggcgtcatggcgaccatcgcgacgataccgaacgcgtgggtcagtaccgactccgcgccgctgaccgtgacgcacgcgccgaccgcgagcggaaggatgaacgtagatgtgagcggtccggacgcgactccgcccgagtcgaacgcaatcgccgtatatatgcccggtacaaagaaggacagcccgagcgagatgaaataaccgggaatgagatagtaaagaatgttgaacccgagaacaatccggagcatcgagagcccgatcgagaacccgacgccgaccgacagcgcgatcatcatcgagcttttcgagacggtgccgccggtgatctcctcgacctgcttattgagcacatgaaccgccggctccgcgaggacgacgacaagaccgataatgaatccgaacacgacgagaagaaattcgttgttcccggcgatctcgacgccgagtctgtatccgaccggcatgaagccgatggttgcggcggacaggaacacgacgagaccgagatatgtgtagacaattccgacggcgatccttttcagggtctttttcggcagcttcaggtacagacactggaggatgatgaagaagacgacgatgagtccgagagcgatcccgacttccttcacgatgcccatgatagtcggaagaagctcgcttcctatgtgtgcctcgaccgaataatcaggaacgctgtatgtaagctcgcccttggcgccgattccgagcccgagaaccgcgagtatcggacctatagagcacatcgcgatgagaccgaagctgttctcaccggcgtttttgccgccgatggttgacgctatgccaacgccgagcgccattatgaacggaaccgtgatgggaccggtagtcactccgccggagtcgaaggcaaccgcgagaaacccgctgctcccgcttatgacgacgagcgacgcgagcgcgaacatcagcatatagaagaacatcagaaggctcgacagatttttcctgaacactatcttcagaacgttcagcagaagaaatatgccgacgccgacgccgaccgtcacgacgagcgtcgtctcgtttataacgtctttcacctgtgaggcgaggacagtgaggtctggctccgctatcgtgatgaacagacccatcagaaagcaaacgatgagaaggagcggaagactcccggatcttgtgagaccggagccgatatgctcgcccataggcgtcatggcgagatccgcgccgaggttgaatagtgcgatgcccaaaataagcaccagagatgagacgaggaacacgataagctccgtgtccgtcaggctgacaagcggtgtgaagtacaatatcgcaacaataagcgataccggaagaacagatatcagcgcctctcgcagcttgacgccgagtgcctttgccaaaagaaatgcccccttgtattttgtttttatggcgaagttttgcttcacccattattataataatatcatattttaacagtaatggtgttaattcatggttaatattgagaaaattttattgacgccgtgtgggaaaatccacatgggaggggtctcgtgtggcattatggtcaaacaagagactgcaaatctgaaaatttaagtataatttgccgaaaaacctattgactttttcttcgcgatgtgctataatatttttgtcgatacaccggacggtggtgacataaccgggtaactgtatcacatatccggaacattcagggaaaggtgttacattatatgaaaagatcagcaattatcagagttctgagcctctcgctcgcctcggcgatgttggtatcattcgcctcggcgtgtgataaatcatccgggggggggtactcccgacgacggcactgagacttcagcagagagcgtcacggagacagagaagcccggaccggcgcttgagcgcgaggataacgggggcgcggtattcacgacgtattcctccgacagggacttctacaggaactatttcttcacggacgagcagaacggcgacgcaatgaacgacgcgctgtataaccgtgacaagcttgtcgaggattatctcggcgtgaagattgagcatatcctgacaggcacgataagcgatgtcatgccgtcggtgcagaaaacggtcatgtcgggggacgacgagttccagctcgccctgacccactgctatgtaggcgtcgcggaaatggcgacaaaaggatacctttacgactggaacaatctcagatactgcgactacacgcagaaatggtggaatcaggactgtatcgagaatctgacggtcaacgggaagaattactatatggtttctgatttcgttgttccggatatgaactgcatactgttcaacaagcagatgatcgacgagttctcacttgagaatccgtacacacttgttgacgacggaaagtggacgctcgataagctgtcggagatggcgtcgaaggttacgagtgatattaacggagacggcgtgttcgatatagatgaccgctacggactcgcggcgccgggcgactggtactggtgcagcttccttcattcgagcgggataaaggttgtcagtcggaatgacaagggaaactatgagctgtcaatcggcggggagcgcgcggtgtcgatggttgaaaagctcgatcagcttgttaacagatcgggagataccttcctttacagctatctgtatgagactgacggcaccgagactctgaggatatccaccggccgctgcctgttccaggtcgaggcgatattcctcatgaacacactgcgcgattcaacggtcgagtacggcatacttccgtacccgaagctcgacgaggcgcaggcgggctattattcgaccgactggagcggtctcatgtgcataccgaaaacggtcggtaatccggatcttgtctccaaggtgtgcgagctgctcgcgtattacagcggcgacacggcgcttccggcgttctatgatcttgttctcggcgagaagctgtcgcgcgacgaggattcaaagcggatgctcgacgttatcttcggaagccgtatatatgatgtcggcatgagttatttcggcggtcagccgaattgcggaaatttcttctacacgccagcacgtcttgtgataagccagaagagcgccgatttcgcgtcgtggtacgcaaaatacgaaaagggcgctcagaaggagatagaaaaattcgagaaggccatcgctgagctcgaatgatatatttttcaaaaaggagaaatcaccatgaaaaaaacaatactcattctcgttgatggaatgcgtcctgacgcggtcgtacagaccgggcacagggtcgtcgatgagctgaaagctcactccgtctacacactgggcgctcagaccgtcatgccgtcggtcacgcttccgtgtcatatgtcgctctttcacagcgttacgccgcagagacacggcatactgtcgaatacatacgtgccgcaggtgagacctgtgcgggggctctgcgaggtgctgtcggcggcggacaagaagtgcgcgtttttcttcaactgggaggagcttcgcgacctttcgagacccggctcgctcgcgtattcaaagttcatttccgggcgttacggctacgaggcgtcgaatgaggctctgactgatgacgcaattgcatacgtgaacgctgagaaacctgatttcgcgttcctgtatctcggctttgtcgacgaggcggggcacggacacggctggatgggcgaggagtatatgtactcggtgaaagagagccttgactgcatagagcgcgtgatgaactctgtcccggaggattacacgatcatcataacggcggatcacggcggacacgaccgctcgcacggctcggatatgccggaggacatgacgatcccgctgttcgtctacgaccgcgcgcgagatggaggagaactcgcggatgcgaacatcatggatatcgccccgacgataaccgctctcgccggtgtctcgcccgacagagactgggaaggtcacgaccttctcgcctgaaaagagaaaactgacgcgcccgaaaacgcgtcagtttttgatgtggtcagtctatgaagtccccgaacgtcagcagcatcgggtaatccttcgccggtatgttctttatgattatgccggagccggtcttttcgacaaagtccgaaatgtcatatatcgttccgtcaatcaggtcgacgagagacatcttttccggaagtcccgccgcgcggaagctcaccgtcgtttcgatcgtcgttgtcagaagcggcgtcggcacccagtaagcgagcgcgaatgagccgccgggcttcctgaatccatgaagcgagagcgtgtcagcgtaatcatttccgagaaggctggccgatggtctgatgacgcggacaatcggcaggtcgcacggttccgggtcttccgcgaacacggagcagagattctggtaagcgtagtatgacggcttcggtgaatactcacctgatgagaacccgttctcgtcgaagtccgcgccgaggattccgaaatagccgtaatcgagataagatgtcttgtccccgacctttccgttcagagcctcgatcatgtccatacaggagaagtaggatgagaagagcacatcggtcgagagatccgcgaccgcgtgccgcagacactgcttagcctgcctttccggcgtccacgcgccgcccgcgagagcgccgcagccgtcgcttctcgactgtgatccggactctccctgtatcagtcgtattttcgggtcgtgcaggcgtatgagagcctcgagagccgggacatgggtgtagagcgctgtctcgtcagccgtgtattcatggaatgtgacagcgtcgacgctgcctgccatcccggcggacagagcggtatccatgtatgagagatcccagatcatgcagaccgatccgccgattatgaacgcgtcatcagacacttcacgtatagccttcgcggtgtcgtgcgcgaacctgccgtattcctcggcgctgacgccgtgcttccagcaccactttccatccggttcgttccagatctcatagtgtgtcaccctgccggcaaagtgtctgaccgtcgcgcggacatagtttgcccacgcggtcttttcctcgtcggtgaatatcggagggcagccgacggcgccgaacacctgctttgccgactcggtataaaggtcgttgccgtaacagagacaaatccacgggcgcataccgcgcgcgatgagctcgtcgaccacgcggtcgagccacgcgaagttgtatacgcccttttcgcgctctgtgcgctgccagccggactgaagccttacccacttgacaccgacgagcgcgagcttgtcatacgccttctccgggtcgaatacgtcgcggtcgagcttttcgaagccgatcccgaggcgggagctctttatatcgagcgagcgtttcgggattatctttccgattggtttcagagataccataacctgatggttcctttctggattatggaaacactgaataatccgggttttcgctggaaaatcttggattcgtggactttttccgcgaaaacggccatggatcagtatttccttatttatagcaaatccattataccatgttatcggaaaaaggtcaagcgctttttcattgtccgcgcaaaaaaagtgaccgccgcgccatagctgggtgtacgtaagacagtattgcgctaagattgacgaagcggc

SEQ ID NO: 3402 - DNA, 32759 bp, Unknown
  16S sequences of unknown bacteria
cttctatctgctgctcaaacatcttaggcatgagaagaagattaaaaaacagaacaaccaatatgacaattccatagtaatataaaagagactttttcggcttttttacttcgttcattccaaattcctccatcttttgcaaataaattataaatttgcagctacaataggtttttctctgtacaaattttaaaccctttttttgtacttattttatatcgtaacatattatcaatttactatcaataaatatcttgcactgtcacacaatctacaatttatcttctcatttctgcaataaagctgtattttacaattattaccataaaaaataatcgtgagcaataaaataatacacgctatgcatacagcttatgcggtgatataatatttacagcaaattttatctgcttcacccatactgattacaattttaggagaatatatatggaatactgggatgtatacgacaaaaacggaaagttgacaggaaaagtcgttgagaaaaacggaaagtttctcgaaggtgaatatcataaggctatcgaaatttggattgtcaatgacgaaggtcttctgctcgtacagcaaagaagtgcaactgttgaattctatcccggctactggggtctcacgacaggcagaatcaaggctggcgaaactccaaaggccggctgcgtacgcgagctttcggaagagcttggtatagaagctgaggaaagcgactttatccatatataccatgccatacgagaaacgctcccacttatctgggatattttcgtcctcaaatggaacggcagcatagatgatctcagctacaacgacagcgaggtccaagatgcgaagtggatgacgccgggtgagctgcgcggcattatcgcccgtaaggaaatattcatatatcctgagctcgaagaaatccttgctcttattgagcaaacctactgcacacatgccggtatctgacacactgcgatctcgcagctttttaaccaaaagctaaggggctgtctctaactattttgttttgagacagccccttattttatatagagcaattcgcttatttgggcttatttaataatttcggtgccctcatcttctggatataattgaagcgcatcctgaattgttataaaggctccggcatcattccagctatttgtcattcttttttccattgctgtcatcgccggatactgaagccagcttttttgatgtatgtaattcatccagctgctgatgatatatccatcctcgagctccacaataggataagcgatatagccgcggtaattttctccccttctcggcatcgagaaagctgcaaagatatcggtatttgtctgctcacccccaaaaatactattataagtaaaagtttgatttccaaggaaatagtacggtgcagcgaatatttccccattatcgtcatacagtacgcgaccggtcacttcgccgtaagaggcccatccctccgaaacactttgatatgcaggccaaagctgaattgcctccgtaccataaaatccgggatcaatagtccataggaaatggtggaatataatccagttttctcgttccccgggtatttgcacgccaacgccggtaataagcagttcttttgcatcgccggaagctctgccgttattaagcggctcctccgtaacatcaacagcaacctgtaaagcgcctctgcaagctgcaacgtcatcctctgtgaggtcatcaagaacatactgcggaaacccaagttcgatgagctgctccttaatttcctccacctcagcatttgccgatgcattcactttgctccaatccattttatagctgccgccgaaaatatagccgaaagcacaaccgatgataagcactgaaacaagcgaaatcacgatgcatctatccgttaccttaacagatacagtttgaatcgaatatccggcctcatcaagttctttggaaagcttatagatattacggataataaagatataaccgataaccatcgccccggcaattaccagcccgctatactgaataactgccagaatgtacataagcgcataccagataatcagtgcaaccgcgcctccggctcgcggcggaaggtttactttttgctgcacggctctcagtccacaccagagacagaaaaattcgacaagcaggagcagcagatttacaatagtcagcacagacatgaccggtagagcaaatatggtactttgaataatggtcgtatttagaatcagcagcggaaaaaagtataccgccctaattactgttatgatgaagcaattcctaaaccatttattttcacgccgcagactgcggaagcctaatattgacagcaccattccaattgcaggaagtatataattcaggcacaggaaattcagcgtaattgtacaaagcgcaatgccagtgagtactcgcctcatcgcttttctccatggtgttacctcggcgacaacatcttcaggaggaagccctgaaacactgctttcgagcatagtatcaaaattcctttcttttatggaatcacactcacgattatccatgcacttcaccccctaacattttacgaagcttctttttcaagcgatacagctttccctcaactgctctttcggtcattcccagctcagaagcaatttgtgcagtcgactgcaagtaataatattttctgtaaaatagcatcctctccttgggcggcagctggcgcaatgcatgattaacctccgtctgacgctcttgttgtacgattacttcttcaggagtcggtgccgttgatggtatatcatctgaaagctccgcgccacttccgcagcgaagcatgtttctcctatgatttaacgccgtatttctggtaattgctgtcagccaagcgttccagcttccacgttcttttttgaattgctctattttttcccaaactcgtattgtaacttctgaaaggcagtcctcttgctcatgcggattttgtaaaataggcgcaataacgtatctcatcagcggtccataatgcagcagcaaagcgtctatgcctttttcatttttttgcagtagtaattcaatgatctcctgctcttgcacggcgtagcctcctctcagattttatctctatctaattatacacgagccggcaggaaaacccacgaatatttttataacttgtatataagcagtttgccctgcttgaaaactgtaaagcagaattgactgcctgcagaagaataacaatgcagaaaaataacgggcacctggctttttataccaaatacccgttatcacgcttatagtccccgtaacagctgccacaatcgtgattttttaaccactttttaatgaacacctgcgtaaaactgcggggcactttatcatatcagtattttttctatgcagaaagaattaagcttctacattatcccactctgccataatctcaggaattaccttgaaaaggtctcctacgataccgtagtcagcaacttcaaagatcggcgcatccggatccttattgattgctacgatgatatcggagttctgcattcctgcaaggtgctgaatagcgccggaaataccgcaggcaaagtaaatcttaggctttacagtagtacctgtctggcctacctgatgcgaatggtcaatccagccattatctacgcatgctcttgatgagcctacgactccgccaaccttgtcagcaaattcctgaatgagcttgaagccctcaggtccgcctactccacgaccgcctgaacagataatatcagcatctgtgagcgataccatttccttagctgatttaacgatttctactatagtagttctaatatcagctgccgtaatctgcggcttgtatgtgatgagttcacccttagctcctgcaacaggctctctctttgacataactcccggtcttactgtcgacatctgcggccttgttcttgggcagatgatagtagccatgaggtttccgccaaatgccggacgagtctgcttgattcccgtcgaaggatcgttagggtcgagagttgaagtatcaagagtagtgtttgccttagcaaattctatgtagcttgatactttaatgtcgagccttgtgcagtcagctgtaagacctgtgttgcatcttgcagcgattctcggcgcaaggtcacggcctatgtgtgttgcaccgtaaagcacgatttcaggcttgtattcctgaattgcatcgtagataacctttgtgtaaccgtcagttgtgaagttcttgagcagcggatcttcaatgaggattacaccgtcagctccgtattcatagcattcgtcagcgaggttggcaatgccgtctcctacgagtactgcgtataccttagtttcgtcgctgatttctcttgaaagtctgtgtccttcaccgataagctcaagagcaacgctcataagtttgccgtctctctgctctgcgaatacccagatattcttatatgctgataagtctacaggtccattttcgtcttctgtcttttcaatagcgcttacggggcattttgatacgcaaactccgcaagctgtacatgcagttccgattgacgctttgccgtcaaccattgaaattgcgctgaatgggcaagcgctgacgcaagcgccgcagcctacacatttatcttttaatacttgaatagccattataaatttcctcctccgattagattacatgcttgctcttaaggttagcgagcagctgctttgcaacatccttctctgtatctccttcaagaacaacacccttgccctttggagcaggtgtgaatgatctgaatacgtttgtaggtgatgcttcaagaccaaccttagtgaggtcaacttcgatatccttagcgttccaaatttttacagtcttgtccttagctgagaagatacctgacatcgacatatatctcggtgtattgagttccttgatgcaagtgagcatacaaggagtctgtaccttgattatttcatagccgtcttcgagctgtctcttaacagtgatatccttgaggttatcagcgatttcaaattcttctacatatgtaacctgcggaagtccgagcttttctgcaatctgaggtcctacctgcgcggtatcgccatcgatagcctgacgtcctgcaaagatcatatcataatcaccgatctttctgatagcagcttcaagagtatttgaagtagcccaagtatccgaaccgcctactgctctgtcggatatgagaatgccttcgtcagctcccatagccagacattccataaggaggtctgtcgcctgaggaggtcccatcgatactactgtaatatatgtatcaggatgcttatccttaatttttaatgcttcttcgagcgcattagcatcatctggatttaaaatgctaggcacgccgtctcttataagagttcctgttttaggatctgttttgataacgtttgtatcaggaacctgctttgcacatacgataatcttaaatgccatatctgtattcctccctatttactatttcttgaataatgatcctgctataaccatcttctgaacttccgaagtaccttcgtagatttcagtgatcttcgcatctctcatcattctctctaccggataatccttagtgtatccgtaaccgccgtgaagctgaacagccttagtagttacatacattgcagtttcagccgcgaaaagcttagccattgcagcgtttacaccgtaaggaagatgtctgtccttagtgtccgcagccttgtaaacgagaagtcttgccgcttcaatctgagtagccatattggcaacctcaaactgaagtgcctgcatctgtgaaagcttctttccgaattgctttcttgcctgcatatattcaatggttacatcgagagcgccctgcgctataccgagagcctgtgatgcgataccgatacggccgccgtcaagagttgacatagcaactttgaagccgtcgccgatctttgaaagaagtctgtccttcggaattctgcagttctggaaaataagctctgttgtcgatgatgcacagatacccatcttatcttcagtcttgccgattgagaaaccttcgtcgcctttttctacgatgaaagcactgatgcccttagtgccctttgacttgtcagtcatagccataacgatgaatacatcagcgtatcctccgtttgtgataaagcactttgagccattgaggatccaagcatcgcctgcgtcaacagccttcgtctgctgtcctgcagcatctgttcctgcacccggctctgtaagaccgaaagctccgagctttctgcctgaacaaagatcaggaagatactttgccttctgctcatcagtaccgtaattaaaaataggccatgcacaaagcgatgtatgagccgagcagataacgcctgttgaagcgcatactctcgacagttcttcaaccgtaatagcataggagatgtggtctccacctgctccgccaacttctgtcgggaatggtacgcccaataaaccgtactttgccattttttctactgtttcaacggggaatctgtgttctttgtcgatgtcagcagcaagtggttccacttcattaacagcaaactctcttaccattttccttacaaattcttgttctttcgtgagttgaaagttcatgtaaatgcctccttaaataaatattaacggcagtccgaataaacccggactgttatagcccgcatctcaagtgacggaaattgtcaacaatataacaatctcctattttattaaacaccatttctactgtttttgcaaggtctttttatgtttttactcggctattttttccctgagcttacaaagtactcttttttctatcctcgaaacctgcacttgcgaaattccaagtcttccggctatctgtgcctgcgtcatatctttgaaataacgaagcactattatctgccgttctttttccggaagacttcctattatactttttaaaaaaatcatatcaaatggctcgcccggatgtccgcctccttctgtaaaatcaagattcatcaagcttccgccgtcctttgcagtctccgttctctcgggattgtcgaggctctcaatacccgaaagcgcatcctttgctgccattatttcaagcagctcctcttttgtaaccttcatcatttctgcaagcacggaaagacgcggatattcgccgtttttacttaaatactcatcctgcaggcgggtcatattgcgaatatccgtctttagctgcctgctcacctttattctgccatcgtcccttatataacgctttatttcgcccattatcataggcacagcatatgtcgaaaacataacatcaaagcccgtatcaaaacgctccgcagctttaagaagcccgataaaacctatctgcatcaggtcatcgagctcatagccgcgctgcgtaaatttgaccgctatatttttaacaagccctgtgttattttttattatcgcttccttcgcttcttcgtctccgttttttgctctttctataagtttgtatgtatcttcttttgacagcggtacataattataccccataatacgatatatcgagagattttataagggtgactctcgtgccttttccttcttcagattcaaccgcaaccctatccataaagctctccattacggtaaagcccataccggaacgctcttctgcatctccggtcgtaaaaagcggtctccgtgcctcctcaacatcctttatgcctacgccgcagtccgatactgctattttaatgattccgctgttctcatactcgcactccataacgacggtcttatctgcgctgcctccctgatatccgtgaatcaccgcattgctcacagcttctgatacagcagttttgatctccgtgagttcttcgaccgttggatcgagccgcgaaaaaaatgcggcggcggcagctcgtgcaaatgcttcatttaccgctaaagctgcaaactcagtcctcattttattcacagccacgctctcttttacttctgccgtagctacctttttaacaggctcatttgccgtctcagatgctgattcagtcttttccaatgtgtgtctttcgctgtatataccgctcattattccgcctccttctcttcctgaaatatttcttcactctcagctgcctcaagcctttttacaagctttaccgcatcttccttgtttttcgcttccttaactatcgtaaatataccggccatataaaggattgaccttaaatattccgagcagccgcatatagccgttataccgccattttcggcagcttttttatacctgcccataataactcctatcccggagctgtccacaaacgaaacgcccgaaaaatccattattatgtgtttctttttgaaagcggcataagtaccgtcaatatcgcttcttatgtccgcggcttcatgatgatctatctcgcccgataatttagctatcaaaatattatcggttatttcaaattccgttttcatataaaaaccccctttctcctaattatacttcgcattgctgctttgtgtctttaggaaaaaaagggggaattcttctatttttgtcacactgtgtcgaaataggtcacatttttcttattttcagtgtaataaataaatcattccgggaatatatttatagtttctgccgattcaactgccgccgcaacaagtccatccacatcgagtttactctccgattcgataattttttcaagtttcggcttcgtcaccggatgcttaggcagaaatactgtacagcagtcctcgtacggcattatggacgtatcatacgtgcctatttccttggccttgtccattatatctatcttgtccatcgctataagcggccgcattaccggcatcttaaccgccgcatccgtaacgacgagcgcctccgccgtctggctggccacctgcccgaggttttcacctgtcacaagcatatatgaacccgtcttttccgccattttttcggcaatacgcatcataaaccgccttacaagtatagtcgtctcttcctccggacaatttgacactatctgctcctgtatcggcagcaaatttatagtatgcagcttaaatctaccgcagtagcccgcgagtattttcgccaaatcctcaaccttttcctgagctctttcactcgtatacggatacgagtgaaaatgtacagcttctatcatcatccctcgtttagccatcatccaggcggcaaccggagaatcaattcctcccgacatcagcaccatacctttgccgtttgtcccgagaggcagccctccaaaacctgaaaccttagcgtcgtatatatacgatacatcttttctgacatcaacgaataagagcacatcaggattatgcacatttaccttaagcaccttgcagccgatgagcaccttggcgcctattatccttgcaatatcgggcgattttacaggaaaattcttatcggcgcgcttagcctctaccttaaaagtcttaacgccgcgctcatttatcagcttcagcatatacgataccgcagcttcacctattttatcgagatttgtttccgcttcaactgcaggcgatattgaagcaacgccgaacacctttgatacttctttgacaatctcttcactgtcgtagctcttgtctgtgcgcacgaatatgagaccttcatgccgcttcacttcgagcggcgcgcccgtatatatttttttaagcctgccgcgtattctatctgcaagcattctctcaaaatacggtttattcatacctttaagagctacttcgccgcatctgactatgaatatgttttgttcgttcattttacttcctctttcgcttcccgcagcaatctttgcgggcttcgttttatctaaagctgccgagctttctgaatctcattacggcttctttcagctttgccagcacataattcatttcctcaatcgtattttcttcgctgaaactgaatcttatcgctccctctatttctttttcagaaagtcccatcgccgtcagcaccgggcttttgcccttcttgtttgacgagcacgcagagcccgtggatacatatatacccgactgctcgagcgtatgaagcaccacttcgcctctcgtgccgagaaacgatatattgagcacggatgggcagcagaggttttcctcgccgcgtattccgcactcttccacactgtttactcttatatcttctatttcctctttgataccgcgcagcagataaccgcggacactcgctatatgctgcattcttgcctcaagcgtcgcatatgccttatctgcagccgccccaaatcccgctatcgcaggcacattttctgtacccgaacggaagtgcttttcctgcccgccgcccacgatatatggtcttatatttatacctttttttatatagatagccccgatgcccttaggcccgtgtatcttatgcgccgataccgatatcatatcaacaccggattttaatacctgcatcttgccaaaagcctgcactgcatccgtgtgaagcaatattttagtaccgtgctccctattatacgcgtctttaaaagccgcaatctctgatatcggcattataacgccgttctcattgttaacagtcatgacggatatcaaaactgtctcttcgtttaccgcgtctttcagcgcagatgcatcgagaatgccgtccttattcacgggaacatacacagcttcaaatccggactcttcaagccttttcactgcctcgctcaccgccggatgttctaccgccgtcgtaattatgcgctttccccttctctttcctgcttcggcagcaccaaaaatagcggtattatcactctccgtgccgcccgatgtaaagtatatctcatcgtccccgcacgcaaacgctcgcgaaagcgagcgtctcgcctctttcacagccttttcggcatctattcccggcctgtaaagcgacgagggattgccaaattgttcacgcatataacgtatcattatatccgtcacctcatcgtattggcgcgtcgtagcactgttatccaagtaaactgccatttctttttcctgtaacatcaaagctcccgtcctacatataatcctggttgtaaatgttaatccacttctttgaaaatactctcgttacagtcataatcagttttactatatcgttaatgcttacaaagagaatgcagaaataaagcggccacttgaatacgagcaccgccagcagtgcaagcggaatctgcatgccaaggttgccgacaagatctaccttaagcgaataaatcgtatctccgcctgcacggagaatgccgcagatatttacataatttatcatcttcggaatcgtaataattccccatacccaaagcgtctttatgagcagatctatcgtagacggttcaaagtccgtatatagtcccgaaacaggctttgctatcacaaatattactgtacatgttattgcacacagcaatattgccagtttaaatgaaatttttgcatattcgtttgctctgtcgggatcgttctgcccgagagcccctcctatgcttacagccgatgcgtttccaagtccgaagaatattacctgcgccatattggcaactacctcagcaacctgtacgacagccagttccgctgctccgagtataccgtaaatcgcaaatgttactgaagcaagaagcgagaacattacctcggtaacaacaaccggaaatgccgtttttgtcacttctcttgcaaagtccttgtggaaatcgaacatttccttaaacttgcagtgcagcggatgatccttgcttacacgcagatatatgagcgctgacacaaattcaagtgctctgcatataagagttgcgagagctgctcccgccgcttcaaggcgcgggaagccaaagtttccgaatataaagcaataattgagaaaaatattcaaaaacagcgatatacagtttactgtcgttataaatctaagcctttgtactacacggcagttaaatgtaaccgcaaatgtcataaacgaaaacagctgcccaaagcaaactatcctcatataatcaacaccataaccgattacaaccggttctcgcgaaaacagccatacgagctgaggtccgagaaggtatgtagatgccacagtaagtatacctgccagcgctcctacaaggaaatcaagtccgagtacatttcttactctatgtacattccccgcgccccaatactgcgaagcgtgcgctacagcaccgctgaaataaccgaatacgagaccccaaaacaaccacatcagctgattggcagctcctactcctgcaagctgctcttctcccagctttcctatcatcatagtatccgccataccgaggccgatgctgatcatattctgaataattacaggaattgcaatcgcaatcatcttcttataaaattccgatttctgctctgctgtaagtgtgtagcttgttgcctgaacattgttcataaaaataaaactctcctctcttccgatatatcctcattccggctttagctttacatgaggccggatcactcacattgtcaatcaaaatagaagcgacatagcgtcacttctatcttaatacacgatatctgcatatcgttttgtgcacattactttgcataatctatggctctcgtctcgcgaaccacattgacttttatctggcccggatattcgagttccgactcgatcttcttgcttatttcccttgcaaggaaaactatttcctcatcgtttacagcatcaggttttgcgataactcttatctcgcggccggcctgtattgcaaatgatttatccacgcccggcgtagtatttgctatatcctcgagcttctggagtctcttgatataagtttcgagcgtctcccgtctcgctcccggccttgccgctgaaagcgcatctgccgctgcaatcagcacagcttccatacttttaggctcataatcgccgtgatgcgcggccataccgtttattaccatctctgattctttatactttttgagaacatctataccgatatcgacatgcgttccttcaacttcatgatcgagagcctttcctatatcgtgaagaagccccgctctcttggcaagcttgacatcaagtccaagctcccccgccatcagtcctgcaagatgcgccacctctacagaatgcttgagcacattttgtccatacgacgttctgtatttgagccttcccagcaattttatgagctccgggtgcagattatgaataccgacttcaaatgtagcctgttctccttcttccttgataatgttatttacttcacgttctgccttctctaccatttcttctattctggcaggatgtattcttccgtcgactatgagcttttcaagcgcaattctcgctatttctcttctcacaggatcaaatccggaaagtattacagcttccggtgtatcgtctatgataagctctacacctgtcagcgtttctatcgatcttatgtttctcccttcgcgcccgataattctgcctttcatctcatcgttgggaagagggactacagaaacggtgctttctgcaacgtgatctgccgcacatctctgtatcgctcctgttattatttccttggcgcgtttatcagcttcttctttagcttttgattcaatgtctttaatcattattgaagcttcatggcgtacttccttttcgcagtttgaaagcagtatagctttggcatcatcaaccgaaagacccgatattctttcaagctcctccatctgctttgccagaaagccgtcaagttctttattcttttctatgagctcctgctccttattggctatgctctcctcttttttttctacattttcaagttttctgtctatcgactcttctttttgtatgagccttctctctgacttctgtatttctgaccttctttcgcgcacctcacgttccgcttcgcttctcaaacggtgcgcatcctctttggcctcgagggtaatttctttttttatcgtctccgctctgttttcggcatccaaaatcaagttgcgtgcctttgtctccgcacttccgatagctttttctccgacatttttccttataatatatccgattaacagccctacagccagcacaaaaaccatacacaaagcaatcatcagctttgttaacaatatactttcctcctattctgttatttttgtgtgaatatgcgcagaagaattctgcgcatctatatttttatgacaacaaaatttatataaatcttgatataatcatacactatatattataatatataagatacaaatgtcaaggatgcaaaggacaaactatgaagtatttttttagactattaaaaaatttagataaatcaattttaatgctcgtatcagtgcttgcagtaataagcctcgttatgataagcagcaccgcctactctgacggttttgtcataaaccgcgatatcataattcaggctcttgcctaccttcttggctttattgccgtagtaatactgatctttatagactataaatcatatctgcatttcgaaaaaattatatacggcgtttctatcgcctttcttcttacggtatatataccgtttatcggaaaggaacagtacggcgcacgctcgtggatacagataccgcatgtaacaaccattcagccttcggaatttgtaaaaataacatttgtcatacttatggccatctatttttcaaagcacagagctgatctcgatacacttaaaggcgttctcaaagctgcactctatgcttctcctattatacttatagttttaaaagaagacctcggcagcgcaatagttttctgcgccatattcgtcgtgatgcttttttatgcgggcgtcgactataagctgttcgccaagcttgcgggctgcttcgtcgccatcctcccgatcatatatctgtttatggctgatcatcaaaaaaaccgtattctcgctttcctgcaccctgacgacctgtcgatatcctcaacctatcaagtatggatgtccaagatagcaataggttcaggaggttttctcggcaaagggctgtttcacggttcgcagaaggagcttgacttcatccctgttcaaaagtccgacttcatattttccgtcgtatgcgaagagctcggtatggtaggcggaatcctgctcatccttctcttttcaatacttctttacagaatggcgcttatagccagagatatcgtcgatctctatggcgctcttatcgtcgtaggttttataggtatgtttggttttcagatatttgaaaacatcgcaatgacaatgggtataatgcccgttgcgggcatcacactgccgttcatttcttacggcggctcttccatcctttcaaatatgattgccgttgggctcatattgtccgtcggtatgcgaagcaaacagataaacttctaacgaaaaaacatttttctcctaaatttgataatatgattgtaaaagtcatcgcaataaagaaaagaaatttaaaacaataagaatactgcccttagatgttataaatctttctcattctccgattatcctatcgatgattttttccatattttcatatatatacgaatcctttttaaacactatcggcagtccgttattggctgcgatatgaatgttatcgtcatactgtattatacctgcaaacggcatacgaagtatactgtcaatttccgatatagacggcatcgcgccgcccaccataagctcaggccgtactttgtttatgacatagcatttttcttttatgcccacatctgtaagcaccttatccaccatttcggcatcgcgtaccgccgcatactcaggagtcgtgactattacagccttgtctgcacccgccgttgaaagtataaacccgtcgtcgatgcctgcaggcgcgtctattatcacataatcgaatttttctgcaagtttcctgcacagaacttttatatggagcatcgtaatttcgccgtcgtctctgtgcggagctgccgccataagatagagattttcaaaacgcttgtcctttataagcgcctgctttatacggcacattcccgatatcacatcatatacattgtatacgactttcgattcgagccccatatagatatcgagcgtgcgcaatcccatatccatatcgacaagcacgacgcctttgccgcgctctgcgagcagcgctcccatattagaagcaaatatgcttttccctgttcctcccttgcccgaggctattaaaaatacttttcccatcttgtccgtctcctactcaacaacagtatttatattcaactccacactttcattatcgtcataaagcttgagataatcacctatgatttcccgcgcgacaggcgccgcgtatcccgctgtaccgccctggaatatgagcacagcaacagctattttcggatcatcggcaggggccattgccaccacccaggcaaagttatcgtattcagacttccactgatttatctttgtctgattgactttgcctcctgaaagattcttaacagcctgatctactgccgccgcctgcgtcctgtatttgtccgattcttccgcaagaattctgttcatttcggtttcaacatcttcccagctaagacttgcatcgagctgacggagatgcgttcttatatattcgacttcgtccgcaggttgtatcacgcccgacttctgcgcagttcccgtcttagcggcaactgtaaccgggaaatttccaaatacgccgcgcaggcttccggacgtgccgttcgcaacaagcgtcattccatctatcaaagcctcaagattttcttccgttatatctacctttgtcggagccgctttttctatcggatcgtgattttctatcgccttgacaacggatacctcgttatgaagtccgccgtttcctatcgtagctatataatttgccatttgcagcggtgtataggaattttcaccctgtccaatagatatgttaaaatcatcggcacgcgtcagctttgcctgattgtagtaatcaaacttacaggtatcggcaaggctcgtgaccatatcttcttttacgccgtattccggcagtctttctatgatttctgaacgcgtcggattttcctccgtccatgaaactatcgtctctatgtttttactgagagtctcatcatcattcaaaatatcttcttcaaacaggtcttctgcattagaattcaagtaatatctgagcgatgatttcatcgaattcatctttctctccgccgaaggcacttctgctacggtctcgcttatctctattcctgtcgcaagtcccagaccatactccttagcagtctccattatatcgttcatatctatatcatagccgagactttttccggtgtaatagtcaaaacccgttcctatgtcgtagaaataatagttgcacgatacttctatagcatggcgcagatcaaccgcgccatgagtgctgtggcttcgcgtccaaataagacagttaaacggtctgttgccgaccataatatagccgccgtcacgaagctttgtctccggcgaaagtccttttttcatcgctgccgtagcaacaaccatcttaaatgtcgagcccggctgcacggccgtcctcgtcgctacattgtaaagcggcgccggcgaaaggtaatcccgcgtattcttgctctgcagagcttgccagtcctcgtttgaaattcctgttgcaaagagattaggatcgaaatccgggcagcttgccattgcaagcacatcacccgtctccacttctattgcaaccgcagcgccgacattggcatttgggtatgctgtgccgtatttataattcccatatttgctctcaaacgttcccgcagtctgaatcttttcgagcgcctgctccagcgcgcgctccgccgtctgctgcaattctgcatctatcgtcagataaacggaatcgcccttcttttcctctatttcgcttatgacattgacaagctcgccgttcgcatttacctgcactgtccttacgccgtcactgccgcgtagcacttcttcataactgctctctataccgctttgtcctataagatcgttaggattatatcctttttcgtttacatattcttctttgttagcctccgaaattttaccgagatatcctatcacgtgagatgcagtatttccatacggatagtacctcttcgtctccgatacaacagatactccgggaagactgtcgctcatctcttcgagcattatgatgctgttttgagaaatatcatttgctatcgtcgcactcatatacatcatatatccaagctcagcaatttcatttctgacgacaagtatcttgcgcgcatcagctactgagtattcttctcctattttaaagcgctcgcgcagcttattaaaggcctcttcagcagaaatatcataatctatctgatcctttgccataccgtatttcccgagaaaaatctgctggttattatactgtgtaaatgtcatatttttaacagagatcggcggatatacattgtatgtgttctgcatcacaagctgcgcctcatatacatcaagtgactcatctatttcgagattttccctgatctgattaaacgccatttccgccgtgtaataaaccggcattccttcgcttaccagccagtcgtctatatttttctgatatgtgtacacaaagcttccgttttcgattattataggaaattcgtctatatattcgtctccattttgttcaagaatatttatgacgctcagcgcaatattgtttatatcctcgctctccattccagtggaatcaaagctcacctgaaatgtctgcacatttcctgcaagtactctgccgtatctatccagtatttcgcctcgcggagccgaggtatatatttttttctggctcaaattatcggcatatacactccactcgtcgtgctcaataaccgtcagcacaaaaagtcttatggcaagcactgtcataagcactgctccgactatcaaaaactgataatatctaaattcaaaaatttttctcattttcccactacctgtaatatctatcgcttctgaaacgcgttacttttcttataaatatttgatagagaattgcggaaactgccgtattataaattatattaagaggtagctgacgcagcatatatgtgatttctatattgcttccgaggaagaaatacatcgtccatatataaaactgaaaaagcaccgtggaaattacagtcagtaccagcattgtaattaaattctctctgctcagcatcttgcctgcaaatataactatgagcgataccgcaagatatccgagtgacgaaaccccggcatacatcataaagcacatatccgcaattattccgaatatgcatccaaacactactccatgcatctgattatcatagagcagcgaaaacatcactacgaggcatagcatcagattaggtgttactccaaaaacggagaatagattgagcagcgtgccctgaactaaaaacgctgccaaaaaaacgagaaaggagtacctgtatttcatcaaataagtaccatcactttcctcaggtttttgaagtttacggcaggttccgcttttacggacataagctgcgtgtcgctgttgtagtcaacggctgtcacatttcctatttctataccttccggatacatacctataccggtagtgatgagtatatctccctctactattccggaatctccatcgaatgtatagccctctatttttccattgccgtcacctgatactacaccgagtatactcatatttctctcaacctgaaatgaaatatttatattatcatctattacagctgtcacttttgaatacccgtttccggtctctgagaccctgcccacaagaccatttcccgatactacgacagcattctccgatattcccgattccgtaccgacattgattgtgaatgtattgaagtagtttgaactatcggttgatactatcttgccggtaacatagctctgtgactccgctacgctcgtataattgagtgcatttgcaagctccctcagctcggcaagttctctttcgctcaatcttatctcagtgatttcgcgcttgagcgcctcaacttcatccttcagctcttcgttttcacgcattatgcttctgaatccgaaaatccctttaattcccgatttaattcctcccgtaacatcagacgcaggccctgaggcagctgtatatgcactatttacagcttttccaaaaaaaccgtttcctctgaaatacgatacggatattataactgcgagaataattactatgcttacggccgccgtaaatattttatgttcttttatccatctcagcatcctttttaccgccgtccttacctatatttaatgctggctttactgtttgcgtatctcttgagtttgtctatgttagcaagactcttgcctgtgcctaacgccacagcttcaaacgcgttttccgcaacatcaaccctgatgttggtcttttccgcaattatcttatcgaggtttttaagcataccgccgccgccagaaagcataaggcctgttactgctatatcggcagcgatttccggcgccgtcttttcaagcgttgcttttatggcctcaaccaccatatctacagactcttcgagcgcaaaatatgtgtccttgctcgacacaggcaccacttttggaagtcctgtcacaagatctcttcctcttacatccatatactgcaaatcttcatttccgtcctcgtcgtaatttagaagtgcgcagcctatgttcacttttatttcttctgctgtctgctcacctatgagcagattaaatgtctttctcatatattgaattatggcgtcgttaaacttatcgcccgcatagcgcagcgatgtgctggcaacgatgccgccgattgctattacagctatatcgcatgtaccgcctccgatatccactatcatatggcccgtcggttcgtcaaccgggatatctgctcctatggcagctgccataggttcatcgagtatatatacttctttggcaccgagctgatgcacaaggtcttctactgcccgtttttctacttccgttacccctgaaggcaccccaacaacaactcttaaatttactcttcttgcattaggcatagcgcgcattataaatatgcgcagcatatccgcggtcatatcaaaatcggaaataactccatcctgaagtggccttacgaccgatatatttgccggggcttttccgagcatttccttagcctcttttcccaccgcaattacttcttttgttacgttgtcctttgctattactgaaggctcgctaagcacgatgcctttgtcgctcagatatatgagtgtatttgccgttccgagatctattcccatatctttcgatgaaaaaaagaacataatttttcctccacttttttattgcataattttgttttctttaaaactgtaatatctgttgtttcctatgataatgtgatctgccacatatattccaagaagctcgcctgcttctatcagcctgcttgttgtctctatgtctgctcggctcggctccggatccccgctcgggtgattatgtgcaagtatcacggaaaatgcatttctgcgcaccgctgcctgaaatatttcgcgggcctttacagccgccgtattaatatcgccttcggcaactttctcaaacgatattacttctcccttactgctcaaaagtatgacgagaaatacttcgcgcttaagatgcctcatatcttccataataagattcgctgcctgctcagcataagctattatatatcttccgtctttcggccttttcgctattcgttttcccagctctattgatgctgcaatgctgcaggccttggcgtacccgatgccggaaatactgcacagctcttcaggcacacagtcagcaagaaaaagtataccgtttctgtcactgtcgagcagtttttcggcaagctcaagcactggaagttctcttgttccagtgccgagaagtattgcgagaagctctctgtcagagagtgctcccgctccaagtctcaataatttttcccggggtctttcgcttcccggcagttttttaatgtccatattcctcccctgtttctcataatctctctttccctttttgttatttttccttaatggatatagttaagttgattttaacattttttgagaatgaaaacaagtgagtaagtactcaagaatataattattatgtgaaatttttaatattttttgcacgcgtggacaaaatagtactgtactaaaattttaggaggtattaaaatgtcaaataatatcaattcaagcatcaaatgtacagttgagcagtgcaagcatcactgcgattccagtgactactgcacacttaactgcatcactgtaggcactcacgaagcaaaccctacggtagaccagtgcacagactgcctttcttttgaaagataaaagtctccgataaataggtccaggcttatttaaagcaggtcaggcactttccccctcttttttgcatatagtgaaaagcatatagagggggttacatatatgagcgattcctttccgatgcctcttaacgaaaaagaggaagaatactacctcagcttgtatcagacgggagacgaggaagcgaaaaaggtactcatcgagcgcaacctcaggcttgtcgcacatatagcgaaaaaatatactgtggcaacctgcagccccgacgacctgatatcaataggtacgataggattgataaaagccgtaaatacatacagcagcaagcgaagcacgaggctcggcacatatgccgccaagtgcatcgaaaacgaaatacttatgagcataaggtcagccaaaaaaaacagaggagaagtctcattaaatgagccgcttggcacagataaagacggcaatgagataagttttaacgatatactcggtactgatcccgatgcgataatagatgatataaatcttaaaatgcagatatcttctctttacaaggctatcgaggaagagctcgacgagcgcgagaagcttgtaataataaggcgctacggcatatacaatcaggaaagcatgacgcagcgtgaagtggcacaggagctcggcatcagccgctcctatgtatcgagaatagaaaaaaaagctctgcaaaaactcaagtcaaaaataagtccctgaatacatacggaaataaaaggggctgtctcaaaacaaaatagatagagacagcccctttcatattgatttatatatcagcaaatacagctgatttatttaatattctcacagaatctcataagtatcgaagccacctgtgctcttgccgcactgtttccaggtgcaagcttgctgcttgtaactccgttaataagtcctgccgcatttgcccatttcatagcatcaactgcgtatctgcttacatttgccgcatcgctgaaagctgtaagctcagccgaagccgatacatcatattccttgtactgtgcgtacctgtaaagaatagccgccatctgctcacgagtaatcgcgtcgttcggtccgaaaagtccgttgccgtagcctgttacaataccgtttgcattagcccacgcgattgcatctgcataatactggccggctcttacatcgctgaaagccgccgcttctgtgcccgtcggctgattttccagtctgtaaagaatagtaacaatcataccgcgcgtagtatcaagattcggtccgaaactgcttgcgcttatacctgtcataataccctttgaggcaacatactcaactgcgctgtaataccagtttcctgtattaacatcgctgaagcttcctgtctgtacagccgaacctgtagtattgtcagccggcggctgcgtgtccgctgcatttccgcctgatgaaccgcccgaatgaccgcctccatttgaacttgtgctgtgaacaggtatatcaacatatgtcgcgctgttgtcaacagtaagcgctacgccgctgttattagaaagactaattgttacctctgccgtatgacctgcttttatagtatacacagtaggctgaatatatactgtataatcataatactgtccgtcggcaagttctgtacgtacagaagcggaagccgaatcatatcctgctgtcggattgaatacatcgatatatccaagacctatactctttgaagttgccggagtctgcgcatattctaccaagtcgtaatttacaactccaccgcccatccaggcacctttttctttcaatgtcgtgataggaagataactcctgctcggaacaaaagcatcaaagctttcatcgtttttatcagtaagctctaccgtcatagtaacacggtccatatcactgagcggagtctctcccgttgcagtcgccgctgcacggatatgtacagctaccgctccctgaatgattacatcttcaggaatctcaaaagtataatttccgttaacagcaggttccacgatggtaggtctccatcccgagcctgttgttactgcacctataatctgcgatgttgcactctctgctacatccgaagcattaaatatctgctttgaagctgtcttccagctgctgtatgtgttccagcttccgtcaacattgctctgtacagtcacatttgccattctttcgatgccgttgtttacgccgtacaaatagtggctgaaccacttgttgaggattgtatcatagtactcaccgtcaatcttaatctcatatcttccgcccggataagtcggagtaaggtgtgttccctggtgaagaagaagttttacattctgtcccgccttatcaaacgacttgtacatgaggtcaaactgctttgtccttacatttgtatcgttaagtccgtgaacgatgagcgccggaatatgtataccagtccagtcgtccattaaaggcgcagccgtgtaatcacgaatctgccaatgattgagaccgagctctgcattggcatagtcgccgttgagagcagcctgatcgctgcttatctgagtcaagtaagcttcatatttttctttaattgcagtctcgtaatcttcgtctaaaagacgtccgttgcaataatatgcaagataatccgaatacgaaacaccgcccgttgccgttccctgagaatttgtatactcgtaccagcttgctataccggcaacaggaacgattgtctcaagtccggcaactcccgtagtcgcaagtccgaactgggtagtgccggcatatgaacggcctgtcatgccgactttgccgtttgaccaatctgcatcaatagtaatgttatttgttttatctgtataagctaccctatctccgtggagccattcgataacacacttgaaggcgtctatttcaaggtctgtaccgcaggtttcaaatccgtcagaaccgtgagttccgagaccgccgctctctactaccgcaaatccgcgtgaaagatagtagtcgtaccaatccaaatcctcataatcaaacatgcgttcataagggttccaataataccactcatttatatctgcgtcctgcgcatgttctgccgtagtcgtttcgccctccggcatgcgggcatccggctgactgtacatcttttctatatcatatgaagctccttctacatttggagttctgccgtccgtgcatcccgtaatatacggacgggcttcaaatatggaagccgccttgtagtctccttccattgccgcacgcggaagctgaacgagcgtctttacaaggtcaagcgcaccgtcaccgtcagtatcataatttgtctctacatatacgaagaaacgaatgatatcactgtcggtattattgtaagtgcccgtaagattgtgatcgtcatctgattcaaccattccgctcgtgtacgggaatataggctgtgccattccgtttatgaaaagcggctgaagcttgtcagcatgcagcgcatcataaagcggctgaacattgcttaacattgctgtaagatgtgcaaatgtacacgcttctgtcggattatactcaatccctttaaacagattgatactttccgcaagctgctcacagtcatatgcaaactgctccaaattttcttcctgactaactgccgaaagctggctgtcattcatacccgcaaaacgaagcacaaatattacattttcctgctgtgtcgcagctgcggttacaggagcaggagtttcttcttctcccggctcttcagatactggcagattttcaggatttatagggtttgccggatctacaagcttctctgcatttatcggctcgttcccaccgcttccgtcacctgctgcgtcaattacaacagcatctccgcttggaacattaagttcctcagggcctgcacctgctgtactgaaatcagcagcgagatcagtagccgcatttacctgttcaggctccgtttcactttccgctgcacctcccgatacggtttttccgtctgcttcataggcatcgccaatcagtgcgtaaagttcatcaagcacatctgttgtaacgatatcgtcaccgtcatattcggcaataatatcggcaacatcgccgtacacttccggcacctctgaagctgaagccggaataaccggaccgagcagcataacgaatgccaaaacaagcgttaatactttctttctcaacttacaattcctctctttctttcatagtaataaataatagtaatcagaattccatcatttgcttgtctgattaaagcattagtatactatatattattgttatttgcaacaatttttttaaatattttttgttataaatactcaaatacataccgactaaacataaacacacatctgcctgcacaattatgcaaccatttcttgaaatttttttgaaagacacgggactcctcgaagcccatgttgcatgaagtgcaaaatgcggcctttcagcttaccttcttaaatacaactttttcggaacaaacaagcttaattaccgcgtaagcaaggaaagcgagaagtgcataccatcaatgctcaatataaactgcgaactcacagacggagtttacagaatagaagtcggcggaatatcatacatagtttctaaagatgaatagaaacaaatgtataattataaacaaataatgttacatagccacaaaaggcgatgtggaaaatactcacatcatctttttctgcatacaaaaagcgggtatctgttctacaggcgatacccgtttttcatttatttttttatgtttaggcagcgctcttgcacaccgttcttatgcaagcagcacttcttttacctcatcggcaaaacttttttcactgctgcaataaaagctttttctgcccttctcctttacccattctgtaatcaaatataagctacttaaaagatgcctatttaaaaaataatgccggagcaatattgagcttccatttttattaaaagattaaaaagcaaaacggcggactgcactacatttatttcctaataattcatattagctatattatgcatatacgtctgtatcccacggaagctggattccttttttgaaggcttcgtatgtggccggcgtttcatcgaggaagtacggacgcgctatattgccgtttgcatcccagtcacagccgtcccaccatatcgccatttttattctgtttaatttttttatctcggcaaacatatttttcatccacgcctctttgtcaccgccaatactcgatgatgcaaattcagtaatcatcagcggctgtgaaaaccatttgcagtacgccgtgtagagctcgctgtaaagctcgttaaagctctgccatttttcaccgctgtaatatgtgcctgtgttataagccgtcattcccactatatctacataattatctcccggatagtacataagtgcgttgttccagtcaaagttaggatacgatactgaattcggattccatacccatattgtattttcgtttgctccgctgctttcaaatatcgaatatatgtatttgtacgcttctttaaatatctccgtatcctttgaggtgttgtatgcggaatatgggcaccagtcgccgttcatttcgttaaaaggtctgaacagtacaggatgtgcaaaatcttttatcgtggccgcatattgatagagataattatcgtactctccgttgagaatattatataccatattgtcctgtgcctgcgatgtctgtattgtcagctcaagaaccttaccgttttcatatgcgtcttcgagtctgtttttcagcaccggaatggtcgtatttaccacttccgtatagcttaatattacaggaaattcgtaatcaaaatcctcttcataaatattaagctgcgaatagccggtatagtcgacctcaggttcaaaaattccccaggaaagagacgcatcttcactaaaatatttgctgtaaaattcctgtgtctcctgattccagcctcgttcttccgcgcttaccttgctcgaggttcttatcataccggagctggtcggggaaaaggttctaaagctttcagcgagatatctgtaaccaccgccttctgcgattgctattgacgattttacaaaaattgtatatatgtatccgccgctctgaatttccagacaggcataataattcttgtcgtttgttactctcgcgagtttatctcgctcccaggtcgtaacatcgacactgtagccgcctatctgttccgtgcgtctgtatccgtttttatggtctattgtattttccagaaattgattagaatatcctatatatccttcctttgatagtccttgcatatcctgcttgtaaatttcaatgcgcttttcaccgttctcgagcacggctgcaacagcagaatagctcatatcaacggtcattcctttatccacggaaagctcatatccttccgcataatttgtaaaggtgtcgtacactccggcgcttgtcatactgtaaagctgcgaggactgctgcgcagcatacacgccctccgctacttcagcaaatgaaaataacatgcaggaaagcgtcattatcgctgtaattaaaaatgctatagtcttcttcactatttaacccctttcaaattttttatattttcttattaaaatttctgctgtccgtattccatcaactgcggctgatacaatgccgcccgcatatcctgctccttcgcctacaggataaattccttttatatttgactcataattttcatctctcggtattctgaccggcgatgagcttctgctttctacagccgtcagcagcgcgtcgtcggaatcgaagcctttcagcttctttgcgaaatgaggcatcgccttttctatcgcctctgccgcaaattcgggaagcgaatttctcactcttattcccgcatcgcatctgctcttaaattcgctccaagctgcctgcgggggtttatttggcgcacttccgtttttgaatgcgagtttttcatatttttcctgaaagtctattccggcaagcggctcatcgcttccaaaatcgctcgttctgacatccacaagaaggccgctgtttgcgaattttccgtctctcgcggaaaagctcatgccgtttgtcactgtcattccttcggcagatgacgccgttatgacttcgccgcccggacacatacagaatgtgtatactcctcgtccttcttccgttctatgcgcaagcttgtattccgcaggaggaagtcccagctctttgcctggcttcccgtactgtgctatatctatcaaactctgcgggtgttctatgcgtacacctatcgaaaacggcttctgttctaactcaagcccctgtgaataaagcgtccttaacgtatcacgcgcgctgtgccctgccgcgagcacgagcacctgtgtgtttatttttctcgtgcttcgtcccgtgtctttttgtatttcaggcagtaagttactttcaggctcagctatgacatttttgttttttatggccggctccgacaaaaataccgcacttatgatgccgcaatccttgtctgcacagctatgcgttttgatttctgtgatctgcttcaattctacgccgtcaagccgcgtctcaaacagaacttcgccgccgagtgcttctatcttttttcttatgtttttcacgacactccgcaggacatccgttcctatatgtggcttttgtctgtaaagtatctcttccctcgctcccgcatatacaaattcacgcagcactttctttatccttatgtcttttatgccggtcgtgagcttgccgtcagaaaatgtgcctgcgccgccttcgccgaactgcacattcgactcggggtcaagtttcccgctttcccaaaagctttttacatcctccgctctttcgtctgcgggtttgccgcgttctatcactatcggcctgtatccgttttcggcaagtgcaagtgcgcagaacattccggcaggtccaaagccgcatattataggccgctcttttagctcttccgtaccagactttggatattcgtaatgctcttctccgccctgcggaagtctgagctgtacagtgggaacagtatcaaaatctaccgtatatacccacctaatattttgcttatcgcgggcatcgagtgattctttaactatattccaagacaaaattttcgctccatgcagcgcttttccgagcttcttctctattttcttcggaatcaacgccttgctttcatctgttttaagtttgatttcgcttattctatacatagtaaaatcaatcctctgctgataaaactccaagactacatttgtagtccttattttatagtttacacttgtagtcaatgtttgtcaagtgccgcatcttttcctgcctttattcccgtcatccacgcgttttgcagattgaagcccccgcatggtccgtcataatcgagtatttctcccgcaaaataaagtccgctctgcagcttggattcacatgtgttttcgtcaatttcgtccagcgaaataccgcccgctgtacactgagcagctttccagccgcctgtacccgttacagtatatgtaagacatttgagcgctcttgctgtgtcttctatatattctatatcgcatggttcagatatgttcaccgttttcatatttactgccttagcgcctgtactttttaagtttgctgcggctgcccgttccagcacagcctttgcaagcctgtcatctatgattgtacggagcagattcactaaaccagctgttttttgtctttcaataagcaagcgtataatactgcctacttcataatcgggcatcaaatcaagagctatgctgtatctcttcattccctccttaagcgtttcaccgtcttcgatctttaaaaagcggctcagattaaatacggctatacccgaaacaccttcttctgtaaactgcacctcgccacgctcttcggcaatttgtcgtccgtcttttataagcgcggctgtgcatcttgttcttatgcctttaagtaatctgccgtcgtattcgcttgattcaagcgtaatcggcgcaagtacaggcgcaagacgtgttactttatggccgaaagccttggcgcacgcatatccgtctccgctcgtgccgtactgcggcgatgccttacctccgcacgcgattatcagtttttttgatgctatcgtcctgccggataacatttccgtcaaaaatatgaattggccattaccattattatttttttcgccggttttgcctttttcgcttgcgtcagcagcactcgcaattaagcttacggaaacaactgtttctccacagaagatgtctgttccgagctcattaagcttagaaacaaacgctgagaccacctgctcagcttgccctgaataaggataaactctgccttccgcttcttcgcggataaatataccgatgctgcgcaaaaacacttctgttttcgcatattccgagcagtctgtatttgttatattacatcttccgttgccagtcgccgcaagctttttgccaagtgttcctttcttttctgctattgcaactctgacttcgggatttgccatcgccgccgctatcgccgctgccattcccgatgcgccgccgccgataatgcatatatcatatgtgttcatatatctttccttttcagcgaatatattttttattatatcatatgtgaactgatgtcaccacaataaattgtttacaaaaatagtaggaattccacgcattaaaaagctttttcgtgcttcttccaggcagcaattttctcaaatcttgaataaaacacaaaaacttcacatatttatagttgcaacgctcattcagaaatgttaatatatacaagctatgtttaaactgataaaatttgtttttaaaacagcgctaacgctgatcataatactcgctcttgtattcgcatatgctcacatcatagagccatttaagcttgacgctaatgaaataaatcttgcggcagactatataaccgcaagcggaaagtctgtgtcaggcgcttcacggcctttcactatcgccttatttggcgatacacacttcggattttactatgatcttgagcattttgaagaagtaatagagatgataaacgaaagatcgccggatattattgtcttcaccggagatttgattgacgatcttaacacttacgagggtgacaaagcagaagtctccgctgcgctctcacgtctccaggc

SEQ ID NO: 3403 - DNA, 11760 bp, Unknown
  16S sequences of unknown bacteria
gaggccagagtcctttttaggaaagccggcgggtacggaatcttttgaaccaacgtccatacaataaggccccggggcttggatggctataaaatcataagcaatcggccaatccctgtcatgcataggctgcccttctcttttcaaaaagagagcgttatctctatatcatcggtattcgtcttcctttgaatcaccggccttgccggttttctccacacaaaaacacgccggcgggtatgccatgcccgccggcgtgttgtcatgatcccatgccgccctaaaccgccgcatgttataggcagatcagctcttttcgtgcgttggtcagattttcgcagccgtcgggcgtgatccgtaccatatcctcgatgcgcaccccgaagcggccctccagatagatccccggttcgaccgtcaccacgctgtccgcctgtaatattgtccttcccgcgccaggagagagccggggctcctcatggatatccaccccgacaccatgcccggtcccatgtccgaagcagccggtatatccggctctgtcgatgacatcccgggcggccctatccccctcgacgcagggcagccccgcccgcagaacggacaggcaggcggcctgcgcttccagcaccgtatcatatacccgccgctgttcggcggacacccgtccgatggccaccgtccgggtcatgtccgaccgccagccgtccaccatggctccaaaatccatggtgacaaaatcgccgtcctgcagcacccgctctccggggactccgtggggcagggaggaattcggcccggaaaccacgatgaaatcgaacgccgtcccctcggccccctgtttccggatgagaaattccagctccagcgcgatctcccgttcggtccggcccgcccggataaaggggaggatatgctcgaagccatattccgtgagtgcctgcgcctgacggatgcgggcgagctcctccggggttttgcagagacgcagagaccccatccagccctccagctcagcccccccttgccagtcgaccccgggtatgtcccgtttgagggcgtcgaattccccgagggtcagtccgctttccacaaagacgcgccggatcccggcctcggcaaacagggccgagagggattcggccacccgggtgatcatgcggcattcggccccgttcacccgcattttcgccgcctcgatgtagcggaaatcggtgaaaaaccaggcgcccttccggctgacgaccagccagcccgcgctggacgggaagcccgtcagatagcggcggttgtgtggggtgagaaccagcgccgcgtccccctcatcgggcagcagggccgcgagcctcccggttttatccatgatgctcatcctctccgcctgtacccttctgcagcccgagcagcgccgctactcccagcacatagctcatcttcccgaagccgctgatctggccggcacacaccggcgcgatgaccgaggtgtggcggaactcgtcccgcgcgtggatattggagagatgcacctccactaccggcagacggacggccgcgatggcgtcccggatcgcatagctggtatgggtatacgcccccgcgttgaggacgacgccgtcgtacacccccatggcgccgtggaggaggtcgatcaatccgccctcgctgtttgactgggcaaaagcggcctgcgcccccatctcccccgccttccgctcgacaaaacggcagacgtcctcataccgttcttcgccgtatacgcccggctcccgcaggcccagcagattgaggttggggccgttcaacaccaggattttcatcgtcatccctcgcatttcggtaaaatcggtctgtatccattataacggacgccgggccaaaaggaaatagtgtttactgctttgcctgcgtccgtcgaaccagcaatcgtcggtatggcggatccggaggagggtgaagcccgcaaaaagctccggaatctcatccagctccacaaacacatgcgggacgccgtcctccggcccgccgccggtcttgaccaccgtattgccgtccagccgggggtagccggcctcccggaacgaccaggtctccttggaacacagggtcaggaaaacctccccgcccttcttcagcacccgcccgatctcggacaggacggcccggagccccgcggtatcggtgtgagaaatgacgtgaaaggcaaacacacagtcgaaagccccgtccgggtagggaagccgctgcatatcggcggttttgacatcgatatccaatcgttcccggccggcccagtcccgcagatgggcggttccctcctccgacaggtcgaacgccgacacccgaaacccctgccgggcgaagtggatggcgtggcggccgaggccgcagcctagatccagcagggtctcacagcccattccgatccagcgggccgcgagatagtagctctcctcgcagggttccagccagatgggcgaccgctctttcccccagtcccaggcttttgaaaccgccaagcgtctccctccttccgtctcaagaacgcccccgtccggggaacagcgcgtaatacagcggcacggtcaggaaaaccagccaccccggatgccaccagccaaaatagccgaggagcagaaaaaccaccaccgtcagaaccgggtaggcgaagtgatgaaacgaccgcttatggagaagaacgtcgacgagggaataatacagcggcacggtcaggaagagaatccaggccgggtgccaccagccgcccaggaatcccagcagcaggaaagcgatggtcacgaggaccggatagggaaaagccagccacacattgttgttccaccttttcggcagcatctccatcgacggcaggccgtccaatccggagaggggcccggcattcggttccggagggacggacggcgggctgccgttccctccgttttccagcccattcggaacgggctggagcccctctccggccttgctttcctcctcatcggaaaggagcagctcgtcgagagaaacgccgtacaggcgggccagcgcgatcaggttgtcggtatccggcgaagcctccgccctctcccatttagataccgactgacggctgatcccgatcttttccgccagctcctcctgtgagaaaccatgggctttgcgcagccgcagcaagcggtcggcgatggcgatattcatcgatcaaaactccttttcggcgtgatggcccgagtatacccgataaccgcaaccgatgccaccaactctggcttccagcccccgcaaccgttggttgcgggccgaaaatcctcccatttacgcgccgcgcgcggcccgccagaggtcccgcatcgcggccgcgtcctcagcctgggttccggccgactcgcagatgacgaccggcgtgagggcccgttcggcgaccagctccatcaacggcccgggttcggggccgaatccaaggggctccgcaaaggtcagatggcgtttttccccgcctttgctgaactcgatccgggaaaaatgggcgtgaaagcagcggccccgttcctctcccagccggtcccggacggcgtcgagcacggcggcgaaatccgccttccccgagaggccgcccagggtacgggcgtttagatgcccgaaatcgatgcagggcaggaagcgttcctcggcaccgcagaaaaacagcacctcgtcgagatccccgagctgctggatctttcccatcgtctcggggcatatatgcacatgcgacagcccttccccgtcgagagcctcctgcgcccggcggagggtccgagcggccagggccgccgcgtccctgcgggcaaggccgccgagccccccgggatgcactacgatccgcgtcccgcccatcgcacttaccagccgggcgctttccaggatataccgcaccgagttgtcccgtttggcagggtcgtccgacgcgagcgagatataatagggcgcgtgcagggagacggcgatcccgtgagccttcgcttcggcgccgaatcccgccgccgtatccagcttcacgcgtagcccgtgcccgcactggtattcataggccgtcagtccccgggccgcgagccaggccggcgcctccagggtggaggtatgtccttcggccgcaaaggaggcactgctccccgccggcccgaacagcggattctccattttcatccctcacatcttctgctgctgtaaacggtggtcccgccgttccttcagccagcgttccagccggcgtttgagagccagggtaggcttgcccttttccagttcgaccggctcgagctggatgcaggggatcccgcagagattggcgcccacgatatcggtgaacacctgatcccccaccgcggcgacttgccgcttcggcaggcccaggcgcctgacgccccgccagaagccgatgggggacggcttgcaggaaaatgccgtataccgcaggccgattttttccgcgaaaggcgccacccggctgggcagtgcgttcgataccacagtcaggccgatccctgcctgctgcattgccgcgagccactcctgcacagcaggggacagatgctggctgccgtgggcggttaaggtgttgtctacatcgaggagcagccctcgtacccccaatgtctgcaaatcgtcgagggtgatgtcggtgatccgcctgcggtatagggtgggataaaaaagcgccatagaggtgagcatcctttcactggttatcaatgaggcggcgggacgggtgaacaaaaccgactgaggcacagacaaaaagatgaatagggatacggcatccccggaattcagttagtttttattctatcctatttcctgtaccttcgcaagcccctgtgcctgtttttccaccaggacggctgtctatgcttcccccgctctgtatacgataaaatcctgtgcacagagattcggaaataagtatgccgggtatgatacgtgcgggcggagagagaggggccgtgaagattatcgaacaagcagatgcataaaatcgtatattttgcgtaaaatagaaaataaacttgtaaaaattgcaagaatagaaattgaatcattcatttttccttgacaatgaagagcgggcgcgttatactggatatcgacaagcagggcgtccatcgccggggcgacgacacccgccgatggatgtttttttgaacgaaattccgcaaaggggtgctgcatatggacgataccgtctatctgatcctgcaaaacggatcggtgtttgagggcaaacgctttggggccgccgccgatacggtgggggagctggtgtttacgacagcgatgacagggtatatcgagacactgaccgatcccagctattacggccagattgtgctgcagacctttcctctgattggcaacgtgggaatcatccctgcggattttgaaagcgaagcgccgtcgcttcgcggctatattgtccgggactggtgtcaggcgccctcgaattttcgctgtgcgggggagcttgacacctttttgaaagaacacggtattcccggcctgtacggcatcgatacgagagcgctgacccgcctggtgcgggaggccggggtgatgaacgcggccatctccgcttctcccaggctgccggaggaacaggcggcggcgcttgccggctatcgggtggaaaacgccgtcgcttcggtgagccggccgggtattacggcggtctcacccaagggaggagcccgcttccgggtggtgctgtgggatttcggcgctaagggcaacatcgggcgggaactggtccggcggggctgcgaggtgatccgggtgccctttgacgtcacagcggacgacatcgccgccctgaagcccgacggggtgatgctttcgaatggccccggtgacccggcggagaacgccggtgtgatcggacagctccggctcctgcttttgaaaaacatccccaccttcggcatctgcctggggcatcagctcctggccctggcgatgggcgcccggaccgaaaagctcaaatacggccaccggggggccaatcagcccgccctggaccggcggaccggccgggtatacatcaccagccagaatcatggatacgccgtggtgccggactccctgccggagggggcggagatgcgttttgtcaatggcaacgatagaacctgcgaggggatctggtaccagaaccgtccggctttttcggtccagttccatcccgaagcggcgggcggtccccgggatacaggattcctgttcgaccggttcctcgatctgatgaaggaggcgatgtgagatgccgcgcaatccggatatccataaggtgctggtgatcggctccggtcccatcgtcatcgggcaggcggcggagttcgactacgccggggcgcaggcctgccgcgccctgagggaagagggcctcacggtggtgctggtcaactccaaccccgccaccatcatgaccgacagcgccatggcggatgagatctacatcgaacccctgaccctggagacggtcaagcggatcatccggaaggagaagccggacagcctgctgtccaccctgggcggacagaccgggctgaccctgtccatgcagctcgcgaaagagggattcctcgcggaacacggcgtccggctgctgggagccgatcccgataccatcgacaaggcggaggaccgccagcttttcaaggacacgatggagcggatcggccagccggtcatcccctccctggtggtgaccgacctgcaggccgccctggaattcgcccatgagattggctacccggtcatcgtgcggcccgccttcaccctggggggaagcggcggcggcatcgccggggacgaggatgaactgcgggagatcgccggcaacggcctgcggatgtcccccatccatcagatcctggtggaaaagagcgtcgcgggctggaaggaaatcgagttcgaggtgatgcgggacagcgcaggcaacgtcatcaccatctgctcgatggaaaacttcgatccggtgggggtccacaccggggattccatcgtcatcgccccggccgttaccctggcggacagagaataccagatgctccgcactgcggcgctggatatcatctccgccctgggggtggaggggggctgcaactgtcagtttgccctggagccgggcagcttcgaatacgcggtcatcgaggtcaatccccgggtgtcccgctcctccgccctggcttccaaggccaccggctaccccattgccaaggtggccaccaagatcgccgtgggatacacgctggatgagattcccaacaccgtcaccggtactacctcggcctgctttgagccagccctcgattatgtggtggtcaagctgcccaagtggccctttgacaagtttgtctacgccaagcgcacactgggcacccagatgaaggctacgggggaggtcatggccatcggccgcaccttcgaggaagcgctgatgaaagcggtgcggggggcggaaatctcccatctcagcctggataccccggaactccgggagctgccggaggaggagctgcgccgccggatcggggtgtgcgacgaccggcggctgttcgtggtattcgaagccctgcggcggggtatcccaccacaggagatccacgccgtcaccaaaatcgacagctggttcctccacaagctcctccgtctcgtcgagctggagaaccgccttgcggcggggccggtgacgtctgctctctatctcgaggccaagcaggtcggctatccggatagggtaatcgccgccctgtccggcggccccctgccggaacaccgctatcccgtctacaagatggtggacacctgcgccggcgagtttgccgccgagaccccgtatttctacgcctcctatgacgaggagaatgaggcggagacgttcatccgggagcacggcggggataaaaaaaccgtggtggtgttcggttcgggtcccatccggatcggccagggcatcgagttcgactacgcctcggtccactcagtctgggccctcaaggaggcggggtacgaggtcgtcatcgtcaataacaatcctgagacggtgtccaccgacttcgacaccgccgaccggctgtatttcgagcctctgaccccggaggacgccctgggcgtgatccacaccgagcggccctacggcgtggtggtggctttcggcgggcagaccgccatcaagctgaccgccgctctggcgggggccggggtgaggatcctcggtacgcctccggacagcatcgacgctgcggaggaccgcgaacgcttcgacgaactgctggagggcttgcacatcaagaggccggcgggctttaccgtcatgaccgccgaagaggctcttgaggtggcggatcggatcgggtatccggtgctgctccggccgtcctatgtgctgggcgggcagaatatgatcatcgcattcagcgaggcggacgtgaaggaatatatggccatcatcctggccggggggatcgagaatcctatcctcatcgacaaatacctcatgggcaaggaattggagatcgacgccatctgcgacggagaggatatcctcattcccgggatcatggagcatatcgaacgcaccggggtccattcgggggattccatcgccgtgtacccggcctggaatctgcgggacgagctggtggacaccatcgtcgactgttcgcggcggctggcagtagctctcaaaacccggggcctcgtcaacatccagtatctgatctacgacgacgagctctacgtcatcgaggtcaatccccgttcctcccggaccgtgccttacatcagcaaggttaccggggtgccgatggtcgacctagccacccgctgcatgctgggggagaagctccgggatttggaatatggcaccgggctctacccaccgcccccctatgtggcggtgaaggtgccggtcttctcctttgaaaagctcacgaacgtcgacacccatctcggccccgagatgaaatccaccggcgaggtgctggggctggcggataccctggacgaggcgctgtacaaagggctgctggccgccggataccggctggagcggcagggcggcgtgcttttcaccgtccgggacagcgacaaggtggagatggtggacgtggcccggaaattccgtgatctgggttttgccctgtacgccacggccggaaccgcccgggccatccgggaaggggggatggcggtggaggagattcccaaggtccacgaatccgaccggaatcccctgaccctgctggaaagcgggcggatccattacgttatttccacttcttccaagggccggatccccaccatggacgatgtgcgtatccgccgcaaggcggtggaacggagcatcccctgcctgacctccctcgacacggcgaacgccgtggcggacagcctgcgcagccggtattcggtccacagcaccgagcttgtcaacctcaaccgcctgcgccggggacggcggcgccatcccttcgctaaaatggagggctgcggcaacgattacatttacttcgactgtatgcgcctggacatcgaaaacccggagggcctcagtgtccgcctgtccgaccggcatcagggcatcggcggggacggcgtggtgctgatcctgccctccgctgttgccgacgcccggatgcggatgttcaacctggacggcagcgaggggaaaatgtgcggcaacgccatccgctgtgtgggcaagtacctgtacgatcacgacatcgtccggaaattggagatgactattgaaaccctatcgggaatcaagaccctgcggctgcacaaaataaacggcgaggtgcggcaggctacggtggatatgggcccgcctgagctgcggccgcccctgatcccggtgaagctcggcggcgaccgggtggtaggccggccggtttccgttgcgggcggggaatacgcgatcacctgcgtatccatgggaaacccccactgcgtggtgttcggcggcaatccggacgccctggagctggagatgctgggcccgcggtttgaacacgatccgctgtttcccgagcgggtgaacaccgaattcatccaggtcatcggccggaacactctcaaaatgcgggtgtgggagcggggcagcggggaaacgtgggcctgcggcaccggcgcctgcgcggcggcggtggccgcggtggaaaacggcttttgcgacaaagacaccgacatcaccgtcaagctgcggggcggggatctgttgatccgcgttgccgacgggacggtgtatctgaccggcggcgcccggaccgtgttcgaaggcgtcgtagagatttgaaggaggaaaccactatgcgaatcaaccggcattacggggagcttcaggacagctacctcttttccaccatcgcgcggcgggtggccgattatcagcaggcccatcccgaggccgatgtgatccggctggggatcggggatgtaacgcggcccctgtgcccggcggtaacagaagcgctctccgccgctgtccgggagatgggggagaaggcgaccttccgcggctacggtccggaacagggatacgattttctccgtgaggcggtccgggagtattacggcgaaaggggcattgccctcgacctgcatgaaatctttatcagcgacggggcaaaaagcgacctcggcaacatcctggacctgttcgatacggacaacaccgtgctggtgccggatccggtctatccggtatatgtggataccaatcggatggcggggcggcaggtgcggtacctcgatgcctcccgggagaacgggtttctgcccatgccggaggagggcgtgcgggccgatctgatctatctctgttcccccaacaatcccaccggcgcggtgtactcccgggagcaactgaaggcgtgggtggagtatgcgctggagcagaacgcggtcatcctgtttgacgccgcgtatgaggcgtttatccgggacgaagccctgcccaggagcatttacgagatcgaaggggcggagcgctgcgccattgagttctgttccttttccaagaccgccggcttcaccggcacccgctgcggctggacggtggtgcccctgtctctggagacggagggcatgagcctcaaccatatgtggctgcgccgccagacaaccaaattcaatggagtcccctatatcgtgcagcggggcgcggcggcggtattcaccccggagggacagcggcagaccgccgaggggatcgcttattaccgcgaaaatgcccgcctgatcgcggacgcactgaccgggctcgggatctggtacaccggcgggggaaattccccctatgtctggctggcctgcccggatggaatggattcctggacgtttttcgaccggctgctggagaaagcacaggtggtcggcacccccggggccggtttcggccggaatggggaaggctatttccgtctgacggccttcggcgaccgggaccgtaccaggcaggccgtggaacggctccgccgcctttctttatccggccgataacgtgccgtgaaggccttttttctctcctttttgcagatgacagcggcttgtccgaatttttgcttgacttttacagacctcttggatataatatttcaagcggtcttttggtggatatccgccagggacaagccgtataagaaccattagctcagctggcagagcacctgacttttaatcagggtgtccggggttcgaatccccgatggttcaccaacaaaacaa

SEQ ID NO: 3404 - DNA, 21447 bp, Unknown
  16S sequences of unknown bacteria
atgctggcagtatccgcggcagcgatcctgatggtgaacagacgccgtcatcaggcaaaatgatgtgatcgatcccgcagggcagttcctgcgggatctgttttcagcaggaaatttcccggcaaatagatgcgctgacaaagcgctttctgttttctgtgcaggaaagatctggaaatttcattttcttgaaacggtgtttcagaaaagatgtgaaaagtttgtgaaaagcgcttgaaattatgtgttaaaaatcttatactagtatcatcaattacggcaattggtcttgcgccgcagggcgcatgcatgaaaaaagggagcgagaaagatgaacaagatttcaaagtttctgatggccggtgtgatgtcactcaccgtgcttgccggatgcggcagcaatggcggcggttctgttgaactgcaggaaggggacaccgtcaagatcggtctgaactacgagctgagcggaggaacgtccacttacggcatggccatggataagggcagccgtctggcaatcaagcagtacaatgagaaagagggacacaagtacaatatcgaatatgtttccctggataacaagggcgacagcaacgaagctgtctctatcgccaccaggatgatgacggaagagaaggttgccttcatcgtcggtccggcgacatcgaccgcgtcgatcgccacttatccggtagctggtcagaaccaggttccggtgctgagcccggccgttacgcagaacggcggcatgatgaacggcgatacggcgtatgagtatgcatggcgtgtctgcttcgaggacagcgcgcaggcgagcgcgatggcgatctattcctatcgtgacctgggcaagcgcaaggcggtcatctatcaggacgtcaagaatgactacgcgaccggtctggcagaagacttccagaagaagttcgaggagctgggcggagaagtcgtttctgtagaaagctatcagcagggagacaccgacttcaacgcggtcatcaccaacatcaagggcatggatttcgatgtgctgtacattccgggctattacagtgaatctgggctgatcatcaagcaggcgagagatgccggcatcacccagacgatcgtgggaccggacggcatggattcgccgaagctgatggagctggccggcgcagccaatctgaacgatgtatacttcacgacggcatatacgaccgtcaacgcatctgaggagctgcagaacttcattgagtcatacaaggcggaatacaatgaagaaccggatatgttctctgtactggcattcgacgccaccaacctgggcctgcaggcactggaagaagccggtgcgaccggagaggcgctcaacaacgcaatcgcgaacatggaattcaccggactgacgggatctttcggatttgacgatgcacacacaccgaccaagaaggtgctggtcgtccagctggaagacggcgttcaggtgaaccctgtcgaagtggatccgaactcttaagagatgaataagctttgatcgatgtggaggaagagttctctttctccacattttttcactgatggaaaggggagagtgacaacgtgacacagtttttacaacagctggtaaacgggctttcgctgggaagcatctatgcgttgatcgcattggggtatacgatggtgtacggcatcattaagctgatcaattttgcgcatggagacatttacatgctgggtgcctttacggcattttacgcgacgacggtctttcatctgaattttttcctggcgctgatcgtggccatggtgctgtgcggcgtgctcggcgtgctcatcgagcgcatcgcctataagccgctgcggcatgcgaccaggatcaccgcgctgatcaccgcgatgggcgtcagctatatcctggagtatacgacgcagtatttcgcaggcagcgaggtgaagacattcccggaggatgtgctcaataacgcagtatttcagatcggcggcattcagatctctcagcagcagatctacatcattgccgtcacgctgatcctgatgctggcgctgacgtatatcgtcggacgcacgcggatgggacgtgcgatgcgcgcggtcagcgtggatgaaaaagcggcagagctgatgggcatcagcgtggaccgcaccatttcctttacctttctgctgggcagcgtcctagccggtgcggccggtgtgctggtcggtgtctattataattccatcaatccgctgatgggcatggttccgggcctgaaggccttcatcgcagccgtattcggcggcatcggcatcatcccgggcgccatgatcggcggctttgcgatcggcattgcggaaacgatggtcgtggcctatggctcaagcctttaccgcgatgccatcgtctatgtcatcctgatcctgatcctgatcatcaagccggcgggcctgctgggcaagaacgtgaaagagaaggtgtagggctatgctgaaacgatatttttccaagaccaatctgtgctggatcgccttggctgccgtcgtcttcaccgtggtcaccgtgctgatcaatgccggtctgctgggcagctattatcagatcactttatacaacatctgcatcaacatcatcctggcggtctcgctgaatctgatcatcggcatctgcggccagttctctctgggccacgcgggctttatgtgcatcggcgcttacagcgctgccatcatggtcaagagcatgccgaacatgggcgggtttgccatcggcatcatcatcggcttgatcatttccgcgatcgcggcgctcatcgtcagcattccgacgctgcgtctgcgcggggactatctggccatcgccaccctgggcttttcagagatcatccgcatcgtcgtgctgaacatggagatcaccaatggcgcagccggcatcacgggcatcccgcagctgaccagctggccgctgctgttcatcgtcatggtgctcagcatcatgatcgtgaccaatttcggccgcagcagacagggacgtgcctgcatcagcatccgcgaggatgagatcgcatctgaggcgatgggcgtcaacacgacgaaatacaagacacttgcctttgtcatcggcgccatgctggccagcgtggccggcgcgctgtatgcctgcaacttctttgtcatccagccggatctgttcaacttcaacaaatcgatcgacatcctggtcatggtcgtattcggcggcatgggatcgatcaccggcagcctgatcgccgcggtcttcatcggcatcctgaataccgtgctgcagagcttctccagcatccgtatgatcatctacggtctggcgctggtcggcatcatgatcttcagaccgggcggtctgctgggcacgaaggagttcaccttctccgcgctgttcaagcggcggaaaaagaaaggcggggagaaagaatgagcctgcttagcgtaaagcatctgacgaaaaacttcggcggtctgtgtgccgtctctaacgtcagcatggaaatcaacgaacatgagctgatcggtctgatcggtccgaacggcgccggcaagacgacattgttcaacctgctcaccggcgtctatgagcccagcgagggcagcatcgaactgaatgtggatggaaagatgacggagatcggcggcatgaagccataccgcgtcacacagatggggctttcccggactttccagaacatccgcctgttcaagaacatgaccgccttggaaaatgtcaaggtggccatgcataaagatatccagtatggaacgcttgccgccatcctgcgcctgccttcctattaccgggaggaagagcgtgtgcagaagcaggccgaagagctgcttcgggtggtcggattatacgagaagcgcgatgagcgtgccagcaatctgccttatggcgaacagcgccgtctggagatcgcccgcgcgttggctgccgatccgaagatcttgttcttggatgagccggcagccggcatgaatccgcaggagaccgcggatctgaccgcgctgatccatcagatcaaggatcagttcaacgtgaccatcgtgctgatcgagcacgacatgtcgctggtgatgaacatctgcgaacgcatctatgtgctggattatggaaagtgcatcgccaacggcgcaccggaagagatccagaacaacgagttcgtcatccgcgcttatctcggggaggaaatctgatatggctatgctggaagtaaaggacctgaatgtgcattatggcgtgatccatgcgctgaaaggcatcagcatggaggtacgcgaaggagagatcgtggcattgatcggcgccaacggcgccggcaagacgacgcttctgcatgccatcagcggcatccagaagaaatcaggcggggacatcctgtttgagggggaatcgctgaataaggccggcgcccgcaagatcgtcagcctgggcatcacgcaggtgccggaaggcagacggatcttctccggcatgagcgtatatgaaaatctgatgatgggggcgttcctgcgcagggacaaagagggaatcaaggcagatctgaagaacatttacagccgtttcccgatcctggaaaagcgcagcacgcaggatgccagcactctgtctggcggtgagcagcagatgctcgccatgggccgcgcgctcatggctcgccctaagatcctgctgctggatgagccgagcatgggcctggcgccgatcctggtcaaggagatcttccatatcatccgggagatcaatgagcaggggacgacgatcctgctggtcgagcagaatgcccgtatggcgctgtctgtcgcagaccgcgcctatgtcatggagaccgggaacatcgtgctgagcgggacaggcgaagagctcgcgcagagcccggagatccagaaagcgtatttgggaggttgatcgcatgtttgtaagagacaatatgaccaaagatccggtatgcatcacgccggatcagaccatcagccaggtcgtggacctgatgagtgaaaagaagctgcaccgcttgccggtcgtacagggcaagcgtatcgtcggcctggtgacagaagggaccatctcggccagcggcgccagcaaggcgacgagcctgagcatctatgagctgaactatctgctgtctaagacgaccgtggatacgatcatgatccgcaacgtggtcaccatccaggaggatgcgctcatggaagatgcggccatgacgatgctcaagaacgacatcggctgtctgccggtcgtggatgccaacggagagatcagcgggatcctgactcagaacgacgtattcaatgcctttctggagatcctcggctaccgtgaagagggcagccgcatcatcatcggcgtgaaggatgagctgggagccatcggagagatctccaaagtgttcgtccgcaatcactgcaacatcacgcacatcggtgtgtatcgaaatgaaaatggccaggcggacatcatcttccgcatcgattctttcgagacggcagcgctggaaaaggatctggaggacagcggatatcaggtgctcagcgtgatccatcatcatcgttaagactgctcatctgccgtgaatacgtttttgcggcagattctttattgtgtatacacgtgtatatgaattgcggacaatttttgcggattgtaaatcattgttgtacaaaaggaaacaaatgtaagaatttgtgggattttggtgtaaaaagtttgcacacaattattgaaaactttcattaaatggtgtagactttacacatatttagaaaaggaattggtgatgtatgtttaagtatgtgctgaaacgtgtcttgatcggtttcgtcactctgttcgtgcttggcagtgccaccttctttttgatgaaagcgacaccaggctctccggtcaatggtgaacgttttaaatcaaaagaggcacaggaactggctatcattcgttacggactagatagaccggtctttgaacagtataccatgtatctgaataacctcgcacacggcgacctgggcgaatcttatgtcaaggaaggcgtatatgtcgacaagacgatcgcggatacgttcccggtcacggcgcgcctgggtggggtcgcgttcctgttcgcgctcgtcgtgggcatcacgttgggtacgaccgcggcgctgtctaagcgcaaatgggtgaataacgtctgtatgtttgttgcgaccatcggcgtcagtgttccttcattcctgctgtcgatgtttttgatcatcatttttggtgtggagctcaggctgctgccctttgtcgggctgcgcactccggccaattatgtgcttccgatcattgcgctttcgctttatccgatttcgatgatcgcccgcctgacccgcagctcgatgctcgaggtcatgaaacaagattatatcattctcgcgcgttccaaaggaacatcgtataagatggtcgtcatcaagcacgcattgaaaaatgccatgcttccggtcgtcacgtatgccggtccggcattcgcattcatgttgacgggaagcttcgtcgtcgagacgattttctccattcctggtaccggtaaggaatttgtctctaatatttccaatcgtgactaccagatgatcatgggtctgacgttgtttctgggcgctttgatcattacgttcaatatcattaccgatatcgttgcggcgatgatcgatccgcgcatcaagctgaagtaagagagggggatgcggatgtttaagaaaaagaaagaagctgctcccacgcttgtggccgctgagtctgcggcaaagacagctgtatttgaaccgactcccgagatgtttgaaaagctggatgagtccagcaagaacgcggaaaagatcgcttatgaaagcaagacttattttaaagatgcctggggacggttcaaacagaataaactggcgatggtcgggctgatcttcctggccatcatgatcatgctttgcatattcgttccgcttttttcgccatatacgtatgacggacaggacctcgcgcatatgaatgagatgtcttctttggcgcatccgatgggaacggattatctaggtcgcgatcttctcgtgcgcgtcatgatgggcggacggatctcgctggtcgtcggctttgcggccgcagcgatctctctggtgatcggcgtgacctatgggggcatcgcgggatattgcggcggcaaagtggatatggtgatgatgcgcatcgtcgatgcgatgtattccattccggatatgctctatatcattttgatcacggtcgtgctcgaaccgagcatgggctctatcttgcttggtatctgtatttccagctggatgggcatggcgcgtcaggtgcgtacacaggtcatgacgctgaaggaacaggaattctctctcgcagcctttgtgcttggcgccagccgtaagcggatcttgttcaaacatctggtcgtcaacagcatgggtccgatcatcgtatcggtcacgctgctggtgcctagcgctatcttcaacgaagcgttcttgggctttttgggtatcggtatcccagcgcctaacgccagctggggaaccttggccaatgatgccaaacgctttttgacgacagcgccgatgcaggtcatctggccgacgctggcgatctgcttgacgatgttggcattgaactttatcggcgatggtctgggcgacgcccttgacccgaagaagaagtaggaggagtgattgaaatggcaatgttggaagtaaatcacctgactaccgaatttacgactgaaaacggcatcgtgcgggccgtacgtgatgtcagcctgcatgtagaaaaaggtgaagtgctgggaatcgtcggtgaatccggctctggaaagagccagacgatgttttccgtcatgggtctgcttgcccgtaacggtaaagtcagtgaaggttcgatcaagatcgacggtgaggagatctctccggcggtcatcacagacagcaaagaatatgaaagcaagatggaccgcattcgcggcaatgatatggcgatgatctttcaggatccgatgacattcctgaatccggtgctgcgtatccagacccagctgatcgagccgatcatcaatcataatccaggaatttcaaagaaagaagcaatcgaacgtgcgatcgaattgatgcgcaaggtcggtattccttctccggaaacacggatcagacagtatccgttccagttctccggcggtatgcgtcagcgcatcatcatcgcgatcgcgctggcatgtgacccgaagctcatcatcgccgatgagccgacgaccgcactggatgtgaccatccaggcacaggtgctggaactcatcagcaacctcaaagacgagatcgattccagcatcatcatgatcacgcatgacctcggcgtcgtggcaagcatttgcgaccgcatcgcgatcatgtatggcggcaagatcgtcgaacagggaacgacggatgagatcttctatgatcccaagcatccgtatacaaaaggcctgctcagctgtatctccaatccggaagagctggagcgcaaagagcttcacccgatcccaggatctccgccggatctgttaaacatcgcagacaactgtccgtttgcggaccgctgtgaaaatgcgatgaaagtatgcaagatggccatgccggaaatgaagcagttcagcgatacgcatatctgcagctgctggctcaatcatccgatggcacagggaaagggaggtgctgtccatgagtgaggaaaacatggtggaaccgatcctgaaagtagaggatctgaaagtacatttccatgccggaggcggacttttttccaagaagaaagtggtgaaggccgtagacggcgtcagcttcgagatcatgccaggtgaaacgttcggtctggtcggggaaagcggctgtggtaaaagtacgaccggaagggctatcgtaaagatctataatccgacatcggggaagatttattataagggagaagatatcacgcacatcaaaggcaaggagctgaaagacttccgccagaatgtgcagatgatcttccaggatccatatgcgagcctcaatccccgtatgacggtcggtgagatcatccgagaaccgatggatatccacaatatctacaaaacgaaagaagaacgcgagaatcgcgtgcgtgaattgctggaaatcgtcggactgaagccggaccatatccgccgttatccacatgagttctctggtggtcagcgccagcgtatcgggatcgcccgcacattggcgctacgtccgaagtttatcgtctgtgatgaaccgatctctgcgctggatgtatctatccaggcgcaggtcatcaacctgctggaacatatccagaaggagatgggtatctcgtatctgttcatcgcacatgatctgagcatggtcaaacatatctctgaccgtatcggcgtcatgtacttaggtcacttggtagaggtgggagatagtgatgatgtctatcatcgcccgcttcatccatatacacaggcattgctctccgcggttccgatcccggatccaaagactgcccgtgaaaaacaaaggatcgtattggagggggaattgccaagcccgatcgatccgccgagcggatgtgtgttccgcacacgttgcccgaacgccactgaaagatgtgcacaggctaagccgccgaccgtcaaagtcggcaaccgcctcgtctcatgtttcatgtacgatgaaaactaggaaatctaagaaaggagaaaagttatgaaaaaaatcttagcttccacagccgcgctggcaatggtcgcaacgactcttgcgggatgcggcggcagcggtgagatcaccgctgaatctggcaagaccaatctgacagtcgcagtgggaggagactttgcgctgccagatccggctattgtcgatgactccatcaccgcaaacgtcctggcacagtgctacgaaggtctgtacaagctggacagcgcaggaacggtcgtaccgaacctggctaccgatcttccagaaatcagtgcagatggtctgacgtacacgatcaccctgaaagatggtctgacttggagcgatggctctgcgctgactgcaaacgatttcgtatggtcatggaagcgcgcgatgacgacacagggatattacacgaacttcatgtataattatatcgaaggtacgactcacatgaccgaagtcaatggtgagcagaaagaaatgccgtataccgatatggctgatctggacgcaaacatgggcgtcgaggcattggatgatacgaccatccagatcaagctgaagatgtcagcgccttacttcacttccatgctggcaaataccgtattctatccggtcaagcagtctgaggtaggcagcgatgtatctaagtctgaatgggcacagaacgcttctgaagaagatccgatcgttaccaatggtccgttcaacatcaccagcgtaaatatcaaggacaccattacgctgagcaagaacgaaaattactatgaaaaagacgaagttaagctggaacagatcgacttcaaagtcatgagcgacctggatgctgagacgcagggattccagtctggcgaagtagattttgctaccgctgtcaatgttacgcaggtcaacggcgacgagatgctgaaggagcacgtttatgcgatcgatccgttcgtatgtaactactacgtgctggtcaacgccggtaatgaaaacgatggctctacaccgggtctggaagcgttgaaagatccggagatccgccaggcaatttccatgggcattggccgtgatgcagcacgtaccgcttacggatacggggatgactattcttatgatctgtatggtatgattccgaagggcatcccggatgcagaaggcaatgatttccgtactgaaggcggagacatcgctagcgacaatgtcgaagaagcaaagaagatcatggaatctaaaggctataacgctgacaatatgttaacgatcgagtacaagtataacaacttatctacacataaggcagttgctgaagcaatgcagaattccctgaaagagatctatgtcaatctggagctcgtcggtgaagagaaagaagcattcttcgctgaccgtgacaatggtaagttcgagctggctcgtcacgccatgactgctgactatctggatccgatggggtacttgtccatgaacgtgggaagcacgacgctgggcaacacgacggatgacgctgacttcgaaaagatggtcaacgatgcgaacctgctggatggccaggagcgcatgaatgcgatgcacgaagccgagaagtatctggtcgaacagggttatgtcattccgctgttcggatatactgaaccgttcctgaaggtcaagaacctgaccggcatcacttcttctccggaaggtcactatgatctgagccgtgcttattttgaataattcatgataagctctgtgcctatctgcggataggcacatgaaataaagcacacaggaaactgtgtgccttatttcatgtgaaggaggaaacttatgaagatcagaagtgtaaaagagcagtatgaacagcgcaacatctgcctgcgcgagcgcctggaacagatccttccgcaagtgatgagagagagcgaagcggacctgtggctgcacgcctcgaaagagtaccatgaagacccgaccttccgcgcgctgaccccggctgattacccgaccgcccgccgtgtgacgatgttcgccttcgtcaaagacggagatgaagtgatccgctattctctgagcatgccggacgctcacctggaagaattctacaccccatattggaaattcggacaggaaagccagctggatgccttgaagcggttgctggaacaatatgatccccagaagatcgctatcaatgcttccgccaattttgccttttgcgatggactgagcatgggcatctataccgaatggatgaaagcgcttgatgaaaaatggctgaaccgtatgatcagcgacgaccatctgggcatcaagctgatggaacgccgtacaccgacagagctgcagctgcttccggaagtcgtcgaagccgctttttccgtcatgaacgccatgtatacgtctgagcaggtcattccaggaaagacgacgaccgaagatctggagtggttcatgatgcagtctgtaaaagatatgggtctggactactggtttgagccgaccatggatctgcagcgcgaaggagaagtgaaagagaggatcaccggcgtcatccagcgcggcgacttgctgcactgcgatttcggtatccgttatatgaacatgtgtacggatactcagcgcctggcctacgtggcacgggaaggtgaaatcgaagtgccggaagatctgcgcaacgggatgaaagtaaacaatcgttttcaggatatcgtgcgtgaaaacatgaaaccaggacgcacaggcaacgaagtgctcatggctgcgctggatcaggccaaggccgaaggcatccaggccacactgtattctcacccttgcaacatgtatggacatggtcccggcccgaccatcgggttatggaatcagcagagcgtgatcccggtgaaaggtgatatcgagctcgatgtgaacacgacctatgccttggagctcaatgtcaaagtgccttgcaagaacaaggattattatatttacactgaagaaactgtattgttggacgaaaatggtgtacacttcctgtatgaaggaagggatcagatcacgctgatccgctaaggagggaaaatgatgagcaaaggaaccctgttggtgttgacgggcgcaagcagcgtaggcaaggccgcgatccgcgagcagctgctgaacgatccgtccatgaagctgttttattccatttccatgacgaccagaccgcagaagccggaagaacaagacggcgtcgactattatttcgtcgatcagaagacattcgcttccgcggtgcgcaatcatgagctgctggaatatacacagtttgacgggtattattacggcacgccgttagcctatatcgatttcctgctgcgcatcggcaagaacgtgctgctggaagtggaggcacagggcgtcggacagatcaagctgaaatatccggaggcgctggctgtcttcgtcatgccggagagcatggaggagctggagcgtcagatcagggcacgctataatgatacggcaagcgcagacctgcgtgtaaacaaggcaagcatggagatggagctttctggtctgttccgccatcaggtcaagaataccgacccggacaaggccaaagaggatatccgcgtcatgatgcaggagcatcagtccaaacagcagacgcgcaagggaacagccgttgaaaactgaacaagtgaaaaagggagtcttctatctgctggtgacttcctttctcttttccacccagcaggccttaggcaaagtgctctattatctgtcgacctttgagcgcaccttttatttctcactggtggccgctatcatcatgggcttactgtgcaaatggaagaaacagccgctcatcgccggcaatttgaagctgatcggcctgcgctctttgtttggttatctgtccaccgtgctgctgtttctggccgcgacacagacttatcccgtggccaatatctcgctgctcagctccacgtccaccatcttcgccctgctggccgcggtgatctggctcaaggaacacatggcgagagggcaggtgctgtccgtattcatcgcctttgccggcatcctcctcatcctgcggccgaccggcggcttcatcgagccggagtcgctggccggactgggcgccgggttctttgccggactggcctatacggtcgtcagaaagctgaaggatgaatccccgtttacgatcacgttctgcttcatgagcttcagcgtcatcgcctctctgcccgtcgtgatcgcgcagggattcacaccgctggggtggaaagagatcggcgtgctcatcctgaccggcatcgtctgcgcagcggcgcaatatttcctttctgtggcgtacagctatgccccatcgacgaagatctctgtctacctgtacgcgcagaacctgtttgcctttttgatcggcatcgtattttttcatgagctgccggactggatagcgatcgccggcggctgcctgctcatcgcggcaggcatattgaatttcatcagcggccgtgaggcccaaaggaggctgtcagatgacacatgagatgaagagaaagatgaacgcacggtttcgcggaatagaaggcggactgttttccgcggtagagaaggccgatgtgggagacggatttgaacgtctgcaggaaaacggcgtagatatgatgagctgggcagatccgttcatgcccgatgccgccgtgcctgaacatgtcaagcaggctgcgctgcaggcgatgcgcgatccgatcgcctcgcattacactgcgccggtcggcaatacccggctgcgcaagcagatcgccaaacgctggaggaagcgctatgggatggaccttgatccgcagcgaaatatcctcatcacaccgggcagcgacagtgccttgtattttgcgatgctgccctttatcgaagccggagatgaggtcatcgtctgcaccccgtgctatcccaataatctgcagaatatccagatgatgggcgcaaaggccgtctgctgcgagctgatgccggaggatggctatcagatccgcggtgaagcgctggaggcctgtgtgagcgagaagaccaagatgatcgtgctcacccatcctaataacccgacgacgaccgtctttgaccgcgagtcgctggaggctgtccgcaagacagtatgcagacacgatctcatcctcgtcgtcgatcaggcgtttgaagactttacctttgaacgcgagatgatcgctccggcatccatggaggggatgtttgcacatacgatcaccgtctgctcgacgtccaagggatatggtctcagcgggtatcgggtaggatacatcatcgctgaggatgtgttcatggatgtctattacggctgtgccgtcagcgtcatcggcgccaccaatacggtctcacagctggccgtgctggccgccatggaggatgagtcgttcatgcaggaatttgaggctgcctatgactggcggcgccatcaggccgcagagatcctctctggcatccccggcgtacagatccagctgccgcaatccggcttcttgtgctgggtcgatgtcagcggactggcagacagcagcgaggtctgcgcgcgcctgctcagcgatgcccgcgtcagcgtcaatgacggtaagaactatggaccgggcggagaaaaaggtttccgcatcgtcttaggcgtataccgcgacaatgagcgggtaagacaggcattgctgcgcatccgcgaagtgctgttgcagatggcgcaggaaaaagggctgagcgttcaatgatgttcatcgagatgagaggtgcttctaagcagaagcatcgctcatcttgtttttttctaagatctggagtgcatgttgaggaaatgatttggagttttatatgaaattggttcttttcctttcgggctccattacgcgtgagaccgcacaaaaagaagtggaaattgtgtcaaatgcaagatggcttgggaaatgagttttcttatggcaaaagccagatagtgttaaattgagaatgatgaacctgaaaaaggtactggacaaaatgccccagtaccttcttctgttaaaaatagcttttagttgtcagatccgtactttacaccttatggtgcttgaattagaacaatgttgttgttccgagcaaaaaatcaatcaggttgcaatgataaaatccgctgttatcgtaaaagttatgaggaatatccatacggattaccattttcttaaagaaatctcctgtgagttttaaggatcgtaattcagtttctgctttctgttccgtatccatctgataagcagactgaatatagatgcggcggtcaccatcgttcacaacaaaatcaatttcacgctggattcgctcgtcattttttcgttccgtgaccacaccgacatctacggaataaccgcgtttcaccaattcattatagatgatgttctccatgatatgacctggatcatactgtctataatttaaacgggcattgcgaagccccagatcagtgtagtaatacttattgggataattaaaataagtttttccttttacatcatatcttctggccctttctattaagaaggcatccatagtgtgagcgagataagaggaaaccaaatgattgctgacaggttcgtgccgcatagaagtcaaagcatttgcaatgttagtcggattggtgagagaaccaatttgtgatgcaatgaaatccagaatggcgttcaaaatatctttccgttccaatttgttgcgctctacaatatctttcacatagagttcttcatatagattggagaggtaggctttcttatctttttcatcctccaaagcaacaatgcgaggcattccgccgtaaagcatatattgatccaacgcagttttcttttcgccgccaacataggcatagaactcgtcaaatgacagcggatacatatggatgtgtgtggctctgccacggaactctgtggcaatatctttggaaagcattttggagttgcttcctgtcacatagacatccaggtttttatatgccttcaattcgttgagcatatcatagatggtaacttcaattccggcgttttcttcatcctttactttaattgtgaactgaacctcatctataaataagtagaacttctcgtcttttctggcgcttacgatagaatctacatagtcacagagagtaatgggattgcggtatttatagtttcttcgttggtcaagttccagacggataatttgttcttcttttatcccctgggaaagaaggtgctcataaaataggtcaaagagaagtactgatttcccacagcgacggattccagtgatcaccttaatttcaccattccacatattgtgaatcaggcggttcaaataataatctcgcttaatcataagatcacctctaacttttgccgtatatggcataagtttgttatgcatgaacgcggcgagactatgcatagaagatagcattatcggcgtttgatgtggatcttcgatgaaaaagcacgggatttaacatcaagaatgcgtaagatctgcttaatgagcgtctcatgtaattgctggaaacatcatgcatataaatcttttgttcctgaatcatggttatcctaaatgagaggtgacatatgaaaaaggtaaacatgatcttcagagaaaagaaaccattattctggatggcgctggcttttgtcatgatgatcggtgtattgtcgctctgtgtctggccattgttttcccggctgagcgctgatcaggcattgtggcaggatctgatgcgccatccattgctggcacagggggcgatgagcgtcgtcatggctttgcaagtcgtgcttgcgtttttgccgggggaaccggtcgaattgctgtgcggatatttgtttggcaccatcggcggcatggccgtatgcgtgatcggttcgatgatcggctctgctttgatcttcttgctcgtgcgcaagctgggagaaaaggcggtgctgcgcatgtttccgcaagagaaggtggaaaagctggcgttcttgaaacacaaggaaaaactcgtaggcctgctgttcatcatctttctcatcccaggaacgccgaaagatatcctgacgtattgcatgccgctgaccgatatccgcttctcctcatttctgctcatcaccggtcttgcgcgcatcccttccatcatcacgagcacgatgggggcatcgacgtttcgcatgggcgaatatgggatcatggcggcggtgctggggataacggcgcttctgtcattgggcggactgtggctgtaccgatacatctttgtgcataaaaaatagttttcctgaatctttttttcgctggatccggttgtacaatagagaggatgcaggagggatagcagtgagcgatcaggaactcatcgcgcagatccgcggcggcgacaaagagagcatgcagacgctgatcgaacgatattatgatgacatctaccggttcatccggtataaatgcggcaacgcggatctgtcttatgaccttacgcaagagacgtttctgcgcttcatccgctattttcactcatatgtggaaaaaggaacgttccgcagctatctgttccgcattgccatgaatgtgatcaatgatcattttcaccatatgcgtgagcgggatatgcagccgctggaggaagaaaatatacgggatgcggtcagcgtatccgaagatatccatgagcgcatgctggtggaacatctgcttgcgcagctgccttcctatcagcgggatgtgctggtgctgaaatatcaatatgggctgaaggccagagagatcgcatgcatcgtcaatgaaaaggtaccgaccgtaaagtcaaggatccgtcaggggctggccaggctcagggagatcatgagagaggaggaacgaggatgaaaccagaagaacagctgctcagcggtctgcttgatcatatccagatcgatgagacgcgcaagcaagaacagatccatctgctcatgcaggaggcggcacatatggagccgcagccaaaaaagagcctgctggcgcagatcctcgtccagagcggttatctcagtcgctggatgctcatcattcaagcagcgtttctggcgctggggctgcttttgctcagcggcgaagaatacagcggaatcccgcttcaggccgtgctcatcctggttccctttggcggcatgatcctggccgcgctggatgcggccgaggtgcataagagctataaataccagatgtgggagatcgaggcttcctgcgccaacagcctgcgtgaggtgatgctgcagcggctgctgctgtccggcgggatcacgaccttcatcctgatgctgctggccgcgtttgcctcggtgcagctgcgcatcagcctgatccagctgctcagcttcttcctgtcgccgtttctgctggtgaccggcagctatctgtatctgctcagacatctgcgcggacggatgaatgagatgatcctgcttgccgccgtgatcctgtgcggcatgggcctgatgctgggactggagtttctggaactgtataccgaaagcatgctgctgttcagcgtcgctgtgttcatcgtgatgctgctgtttgcattgcgtgagctgaagcgctgcttcagccgaaaggagagacacgaatggaattgaggatagcgcacctgagccgcagcttcaaagacaagaaagcggtcgatgatctgagctacacgctgacaccgggcgtatatggcctgcttggcgccaacggcgcgggaaagacgaccctgatgcgcatgctcagcgccgtgctgcgcccagactccggcaggatctggtataaccatggcgacatccatgaattgaatgaagcttaccgcagccggctgggctatcttcctcagcatttcggttgttatccagggttcaccggccgtcgtttcctgcactatctgggcgcgctcaaagggctggaacgagatcatgtcaaagaacgcacggaatggctgctgcaggaagtcggactggcacaggaagcagaccgcaaggtcagcacatattccggcgggatgaaacagcggctgggcatcgcgcaggcattgctcaatgacccgcgggtcctcatcctcgatgagccgaccgcaggcctggatccgcgtgagcgcgtgcgtttccgcaacttgatcagcgctttggcagatcgccgcatcatcttgctttccacgcatatcgtcagcgatgtggaatacattgccgatgagatcctcatgatgagagaaggaaagctgatccataccggaaatccggaaaagatcatttgccctatgcaaggcaaggtatgggaatgccacagcgatgcggctggtgccaaggcgctttcacgccagcataccattgccaatctgcgccgggaaaaggatgcggtggtgctccgggtgatcgctgagcatccgcctatgccgcaggcgcgtatgctcacacctactctcgaagacctgtacctgtattgtttcggtgaggagcaggatgatgcgcacgctgatcggatttgaaatcgcaaagctgcttcgtcgtccgatcgccgtctttgccttgctcgtgctctttttgctcacatggttctccgcgtttacggacagctacatgagcgagacgacggtctggtgcgcagctggggaatgtgtatatggcatggaggccacagcgaaaaataagcagacggccgcgccttatgaaggggtgctcaccgatgaaacgatcgcggcgatcattcgcaattaccggcttcaagaaacgatcgatcaagtggaacagaaggcaaaggccgcagcgcaacaaggtgaggcatattattatacggagatccctgaacgggccggttatgattacgatgcggcgagcacgctggtcatgcatcagttcatggagatcacagcggatggcgatgtgcgcatccgcccagtgtcggactatgcaaatggccggccattgatctgggaaagcagtgatttctgggatgagatgatctatgacagcggaacctcatgtgtcacgcttctcttcattgtcattatcctgttcgcgccggtattcgcgatggaacggcgcatggatacgtctgcgctcatcttggtttcgcaacatgggcgcaagaaagacgcatttgcccgcatcctggcctgcgcgatcatcttgctcgtcttgtatgcgctgatccatgcggtgctgttcatggtcaacctcatcaaatttggcccgtcgggcggtgcggtgagcgcagccctggctggtttttcgctggaagcacataccgcgatgagcatgcgggagctgctggcgttgcagctagggatgggactgctggccgtttggttcgtgagtgctgtcacgatcttgttatcatcttttcctccatttccccgcgcctaaagtcgcgcggacacaaatacttcatcaataaatcccacatgctctctttcgtgttacaatatcagagaggtggtacactacagagcacgtaggagagagtaggaattctgctcatttgaatatcctgtatttttatcagttgccgtcatcatctcaagcacaaataagtaggactttgagcctggacacttatgattgtttaatcaactgttgtcgattcgctttgatgacagtcaatgccacctctcctggtatagatatttcttctattccggtcaactgataaaattttttgatattttttactacttgtttttaagtcggccttttttacgcatttttattcacactt

SEQ ID NO: 3405 - DNA, 6147 bp, Unknown
  16S sequences of unknown bacteria
cgggttcgattcccggtggggtcaccatgaaaagcctttgaattttattcaaaggcttttttatgtttttggaacctgtgaaaattgagaagtctttatctcttgacggttattgttttccgttagacgcatcagcgatttgcaggagataaatccagtggagacttgaatggacctttccggggtattcgcaattgattaatgatctttaaaagcggtcgtatctcctgatttctttccgcgtgaaaaattgtttttctgctttcactctgaagtgaaatctaaagaatgtctaaaattttcgagtatcattaaataaaacttttacttgtagtcgaatgacaaggcaccggtaaagttttataatatatatggaatatgtatcagacagtaatagtaaaatagtaatccgtaaaatagtaatccgtaaaaaagaacagtaaaaaatagaacgaagaacatgtcttcaggctgtgaatatattgcagcgcatgcagagataattattcagaaaaagaaagtacaattttcaacttatgtttcctcttttagggatgtggttttctttgagcacccgttctttgaaaggctgttcaaatcgctgtcatcttcaggttcacgatgatccagtgcgtagcggcagcactgaatgacaagtttatttaccgagatattgttcttttgcgcaaggatttccagttctttcagcatatcctccggaaatcgaaatgttttagtgatcatatcgactcgtttaatctgaaacataatattccccctatttgatttgattgtcgaagcgattcggcaattttaattgtacccgctgatttgtagtaataatatacactgaaaattcgtgcggtttgcatcgaattaagcagtgtaaattatattggactgtacgagagagtgttaccggaggtgggaagaaatattcttgtctctgtccttttcatttccgagtctgtatatctgaatacgattttgccggaggcgttttttagcggagaaggcaaggaactgaccgggtacggacctcgagatgtctctggcagtctccttttcagcaggcggcagacggcggttgattttcctgttggggtgagatacactgtccgtaaagagatttaatacaggaggaaaaagtttatgttatttgttgaatacccgaaatgtacgacctgtaaaaaggcgaaaaaatggcttgaagaaaacgggtttgaatttgaggaccgggatattaagggcgatcggccgagaaaagaggaactgaaaaagtggcataaggaaagtggtctgcctctccggcgtttttttaacaccagcggtcagctttatcgcgagatggggctgaaagaacgtctcgcaggcatgacagaagaggaacagtatgagcttctggccagtgacggaatgctggtaaaacggccgatcatcgtcagcgaccgggggatcctcgtaggctttaaggaagcggaatggagtgaaaagctgaagtagatggacagtatagaacatcgttttgacagaaaccggcgaattttcggcacggaaggtgttttgcgcctgatgaaaaagcgggtggctgtcttcgggatcggcggtgtgggcggacacgcggcggaggctctggtgcgcagcggaatcggtgcgatcgatctcattgacggcgacagggtaagtgtctccaatatcaaccggcagatcgtcgcgctcagcagcacggtgggtatggccaaggtagatgtcgcggaaagacgatttctcgatatcaatccggctctcagcgtgcgtaaattcgaattgtttttcgatgagaaaagtgcggagcagatcgattttaccgtgtatgattatgtggtggatgccatcgatacggtatcttccaagttgcttctgattgagagcgcaaaagcagccggaattccggtaatcagcgctatgggggcgggaaataagctggatccgtcgaagtttagagtggcagatatctcggagacttctgtctgtcctctggcgaaagtgatgcgaaaggaactgaagcgcaggggaattaccaatgtacgcacagtctattctacggagccgcctgtgagtttgccgaagggcgtgcgaacggtgggaagcactgcttttgccccctctgccgcgggttttctcctggccagcgaggtggtcaggcattttctgaattctgagtgaggagaggatttgttctctctgaaccgggaatcagatcggatgtctgtgaaaagctggaggacggagattcgggcggtacaggagcgatattgaaaaacgggatttttatggcatgcggcatatgaaattatacgcatttcttcttgacatgtaagggatcagatgttattttatatatgtggttagcaagggctaatcacatatattttgtgatatagttagttaaatataacttttgattttactgtgataaaagcagctgcggtgttctctgcagctgttctataaaaatattctgaaaggagggggctcatgagtgtcgttatcgtcggaggaaatgaatgtatggtctgcaaatatcaggagacctgtaaaaagcacgggtgcagcgctaaagtatacgtcaaggaaaagggcggcttttcaaagagaatgggcgtaccggatctgatgattttatttaccaacaccgtatctcataaaatggtgacgagcgccgtaaacgaggcgaagaagaataagattccgatcgcgaggtcgcattcgagcagtatatcggctttgaacgatgtattgtcgcgctactgcgccgcggggacgtcctgacacgatgatatacagaaaagaaagcgagaatgtatcatctgatacgggaagaaggagggcagattgatgcctttagcgatggcagaggccggaaaggtctatgtgattaaaaagataggaggaaatccggatacgcgcaaatttctcgagagtctcgggtttgtaaacggtacgtttgtttctgtcatatcttttaataacggtaatttgatcgtaaatgtcaaggattcgcggatcgcagtggacaaatcgatggcgatgaagattattgtctgacaaattcgataagaagattgacgatagccggcggagatgagagcagatgcggattgtctgtctgttcggctgatcaggaaaggagagtacgatgaagactttgaaagacatcaaaatcggagagactgcggtagtgaagcgtctcaacggggaaggagctgtaaagcgcagaattatggatatgggaattacgaagggaacctctgtctatgtccgcaaagtggctccgctgggagaccctatcgaagtgacggtgagaggatttgaactgtctctgcgtaaagctgatgcgagcagtattatcgtagaaggctaaaacgcataagctcgtgtttttacatgaggctgtagacagaagaggcagtaaaaagcaatgcggtattctgatttatttttttatgcagaggttagtgggaactcacatgatgtgtctgtcctgttttcaggcgggattcagagtgaggtatcggcgctgttgtaacggaattatttttttctctgtatactgcataagagaacaaaaagatgaatcagagtaacggtatgaaaggaagatttgatgattaaaattgcacttgcaggaaatccgaactgcggtaaaacgacgctgttcaacgctttgaccggtgcaaatcagtttgtgggaaactggccgggcgttacggtagaaaaaaaagagggaagattaaaaggaagcaaagaagtacatattgtcgacctgccgggaatttattccctttctccttatacgctggaggaagtggtagccagaaactatctgattcaggagagaccggacgcgattcttaatattatcgacggtacgaatcttgaacggaatctgtacctgaccactcagctgctggagttgggaattccgatggtagtcgcagtgaacatgatggatatcgtcaacaagaggggcgataagtttaacgcgaaaaagctgtccgctgagctgggatgcccggtgatagaaatttccgcactgaagggcaccggtgtaaaacaggtgacggaagaagtggtgaatgcggcaaacagcaaaaaatacaccattccgatgcacacctttacgggaagcgtagaacatgccatcgctcacatcgaggaagcggtgctccatgatcttccggaggaacagcagagatggtatgcggtgaaactgttcgagcgagatgaaaaagtcaaggaaatgctgaagatcgatcagatgacattatcgcatatcgaaaatgacattctgaattgtgaaacagaatacgacgatgatgcggagagcattatcacaaacgaaaggtatacttatatcacatcgattatcggaaagtgtctgtcgaaagcaaaaacgaaagataatctgacgacatcggacaaaatcgacaaaatcgttaccaacagatgggcggcgctgccgattttcgcaattgtaatgtttatcgtctattatatttccgtaactacagtaggtacttgggctacggactggatgaatgacggtgtcttcggtgagggatggagtttcttcggtctaagcattccaggcattcctgtggtgctggaacagttcctcaatttcatcggatgtgctgactggctgcagggattgcttctggacggtatcgtagccggcgtgggcgccgttttgggattcgttccgcagatgctggtgctctttatcttcctggcatttctggaaggatgcggatatatggcgagggttgcgtttatcatggaccgtatcttccgtaagttcggtctttcaggcaagtccttcatcccgatgctcatcggaaccggctgcggcgtacctggagtaatggcttccagaaccattgaaaacgagcgggatcgccgtatgacgattatgacgaccacgtttatcccctgcggtgcaaaactcccgattatcgctctcattgcaggtgcaattttcaatgaagcggcttgggtcgctccggcggcatacttcctcggtgtagccgctatcatcgtttcgggtattttcctcaagaagacaaaaatgtttgcaggggatccggctccatttgtcatggaacttccgtcttatcaccttcctacagtgggaagtgtgctcagaagtatgtgggaacgcggctggtctttcattaagaaagcgggtacgatcatcctgctgtccacaatcttcgtttggtttacgtcgttcttcggtttcgtagacggtcagtttatgatgctggatgaatcgcagatggatcagagtatcctggcttatatcggaaaggcgatctgctggatctttattcctctgggatggggcaagtggcagtctgcagtggcagcgatcacaggcctggtagccaaggagaacgtagtaggtactttcggaattctctacggatttgcagaggtttctgaaaacggttccgaaatctggagcaatctcgcggatacctttactccggcggcagctctgtccttcctggcgttcaacctgctctgcgcaccgtgcttcgccgctatgggcgccatcaagcgcgagatgaacaataagaagtggttctggttcgctatcggttatcagacggtatttgcctatgtggcggctctggtgatctactgggttgcaaaactcatcgtaggctgataagataaaataacgaaaacagaataaggaaaaatggaatgtacacgacggataatgcggaagatctatcaaggctgccgcattatctgccgctggaaagctatttgcaatattcagagaaacgttcaggaggtgcatagagatgacaagtattttatcgacgattatcgtggggctggcagtgctgggtctcgcggctctcgcagtcagaacgatccgtaaagaccgcagagaaggcaaatcctgtacgggctgtggaggaagctgcggaggctgttccgcctgcggcgactctctgtacagcgagttgaattctcttcatctgaaaaagtaagaaagatgaaataagacgcaagctttcagggaggaaaaaagaaatattttgacaagagagtgtcccgcagtgacgagtttcgcctcgtcactgcggg

SEQ ID NO: 3406 - DNA, 5014 bp, Unknown
  16S sequences of unknown bacteria
ccgaaggcagtaccgggacaggaagtagaagtggtgctgaccctggctgtgaaccgggaatatcttcccagcgaaaaatacgtccttcgcaatatcacgatccagccggacatccccaaggattccaccaaggatacctggccctttgacatcattgatgccagcaaggtgagacatctggatgacatgagctacaacagcactgcggaagtatggtacaagttctccgtctcccagttcgcaaaagaaggcgtctatcccatcaacttcaaagtcaatgccaccgtctggagagaggacagtgtcaatggtactgccatcacagaggatgtgaccttcacgttgaatgtatttctgacagtgacggagaacggagatatgtccggggttgtcagcaatatcggaccgctcaatgtagcaggcagagagaacaccgcaatcgcgtctcctaccggcagcccgggtgagactgttgtcatgagcatgcccatcgtcaacaaaggcggtactctggaaaatgttaccgtatctccggtagtgactggtgatctggagaccttcccgttcgtggcagaggatatcaactacggaagagagctgggacgcatggaaaatggcacacgccagcaggtggactggatcttcaagatctccccgtacgcgaccaccggaaataagatcgtcaccttccgtgctacctatgaggaaaatggtgtctacggcgagtgtacctttactggatacatctatgtcaagaacggatatacccccaatactgccgcttccctgatggtagaaggatatgcactgtatatggatgacacacaggtggacaacctgacggctggcagtgatgcactcctgaaagtaactcttaaaaataatgcggcgaagaatgcaatctacaagaccgtggcaacactgaagcttgctgatgccaacagcctgatattgaccagcggatattctgacgcggcatatgtgcggagcatccctgcaggacagaccacagagatcgaataccacatcacagcgagagcatccgcttccgtaggaccaagtactgcaaccatcgcactgacctatgagacatcggaaaatgaaggagccgtagctggaagtgccacttccacgatccagatccccatcaaacaggagatgaatctgcagatcgatactccggtgatctatggcactccggtacaggatgagcctctggctgtctccctgaatatcgtgaaccttggccgttcccgtgcttataatgtgcgcatcgtgggaatggacggcgtttccatgcaggattcttattttggaggagacattctggcagcaggcacactgaatgcagatttccaggtgatcccgaataaatccggcagctacagcggcaatctgatcgttcagtatgaagatgccgacggtgagcagttcaccgagagtgtaccgctggagctggaggcagcagcggcagatgatgtgatgacagaagcactcagcaccgacacagaaaatggtaacaaaggcagctccagctggtggatatggatcctgattctgttactccttctgctggcagcattgcttggatggtatttccttgtatacaagaagagagagcaggctggagatgaggaaggaaatgatgaaaacggtgaaaacagcgatgagcatgagaatctctgatctgctgcggacaggctgtgtcaatctgtggagaagaaagacccggaccattctgacagcattgtccatgaccatcggtgtcatgtgtatcgttgtgctgatctccatcggaatcggctacggacaggcttatcaggagacggtggaagccatgggaagtctgacgaagatcgatgtgaccccggttcagaaggtagatgacaagcagaagaccgctctgttaaatgacaaagcggtggagagcctgaagcatctggaaggcgtggaagcggtgacaccggtagagcagttgaccggttatctgaagagcggcagttacatagccatggtcaagctctacggcattgatcttgacaccgcacagagcttccagatcacacccacagagggcgaagcacccacagaaggactcaggctccacccggaagtaatggtgaccgatgatctggcggcctcatttgcagatcccaataacaactggtcagatgccgtggatgctgatggcaatccgctggtagatgtgatgtcctcccccatcaagctgacctttgattatgatctgctgaacggcaaccagaaagcggacaaagaaggaagagcctctgctatcggaaccttctacaacctggatgtatccggtatctgcaccagtcagaattatacctatgcgacttctggtttcctggatatcacaagacttcaggaatggcagaagatccagaaggagcaggcagagcagaagagtaagagcaatacggacagcagctcttcatcgggcagcagtactaccacaggaaataacggcagtaccgaaacgaacagtaccggtaataataccaccaccggtaacaacgcgacgaacaatactggaaataccaccactggcagcacggataccagtgccacgaacaataacaataatgcgtccaacggaaataatacatccacgacgactgcatccaacagtaaggacacagaacgtgccccggtgggaagcagtaccagcggcagttcggcaaatgcacagagcggaaacaacagcccggctgcagatacatatgatctggtgtgggtcaaggcagagaaagtcagcgaagtacagcggatctccaacctgatcaaacaggcaggattcgagacctattccctgaacgatatgctggagacggtcaagaagcagtcccgtcagatccaggggatgctgggagccatcggtctggtggctatgctggtatccggcatctgtgtggcaaataccatgatgatgtccatcaatgagcgtacccgcgaggtaggtatccttaaagtactgggaaccgagttctccgacattgcccgtatcttcctgacagaagcctttctggtaggactggcaggcggcgtggcagggttgatactgagtgcgttgatggggcagttgatccctaggctctttgcggatatggatatccgctgcgtcttcccatggtggctggtactgggcggtatcctgttcgcaggtgtggtagccctgatcgcagcctggatcccggcgcgtaaggccatgaacatcagcccgaatgaagctatccgaagtgagtaaggaggcggctgatatggaaaataagaaaaagaagcagacaaaacagacagaccggagaatccgtggcgtgattgcggttctggtgatcctgatccttggtgtggtcatatatgggatcagcagccaagtacaaaaatcacaggagttaagtgaaaatgatccgttggcaattttagagttgacgcttaatggaaatacaaccgagatagagaaatgcggaaaaggaaaagaggctgcctattatataaaagtgacagtaccggaagactttgagtttagcaaagtgccaatagaactaaagttggcagatggtgcagtgctttcagaggaaagcaactgtctggtgaccgatctggcaggacggatcattataagtcttcaggttgaacatccaatattgacggtagaaaacggagatcaaaaaagagattatcagtttttgatttccgtagattcataaggactacagaaaggagttggtcggaaaagcagggggaataatatctaagggaacccgaaaacaatactctcaagagaaaaggagaaaaacatgaaaagaatgaaaaaaattctttccacaattcttgcattgacaatggttatgtcaatgaatctgatggtgtctgctgctggaagcacacctaccgtagcaacacatagtactacagaagctggtatcacagatattactgtgaacggaacagaagcctattatgaaacggacagcaatggaagtacctcttatattcgtgcaaaacttccagatggttctaaatggtctgatctgcagaatgctgagatcgttgttaatgtagcagacagcgcaacaaaggtaagcggaacagatattacttttacacagtctggaacaaaagctacagctaccgcagatcttctgaacaaagcatataatgtgacgatcggaagcaaagactatgtacttgcagcaggatttgatggaaagatcgcacttgagacagatgatgctgcaggcgtaacctcttttgcactttctcagtatgtagtaagtgatgtggacatttacggaactgttgtacaggctgactgcatgggcaatgcatattatgacagtcagacaacaaagtggacagatccgaatgtaagttactatattacaggaacagttgagggaagtattgcttctaaaaatgcggttaaagcaactcttggcctgaaatctggcgcaagtgtatccggttgtgcaagtgcatctggatcttcttatatcctgaatcttacatcttctgatccagtgatgaaggtcaccaatggaagcacagaaaaaagttatcatatcttccttacagagacaggtgtagaaacaattacagtagattatggttttgattttggagagttagaagattataaagataaagacttttatagtggtgtaaaagcaaaagcagatgaaatagcagcagatgcaaccatatattttaacggagcagatgaatcacatggaactattgaagttccgaagggaagcactgttatggatgtgctggagatgtttaccaatcagatgggatatgaagatgcaacagagggatctacttacattgagtcaatcaatggacttgcagcctttgatggcggatctatgtccggatggatgtactcagattcagcagagggctggtcaaaaagctgcaatattccgatggtaggcggtgctgactatgtactgacagatggagcaagaattacctggttctatacctg

SEQ ID NO: 3407 - DNA, 6459 bp, Unknown
  16S sequences of unknown bacteria
gtcggtcgtcaccacaatcatcagcgtgctcctcatgtcgcttctcaccgggtgtatgcacggaatcaacctgatgctcgtgtcgaggattccgtcgtacttcatgaaattcggcaggatctcgaccatttccggcgtcgtcaacgcctttacatatgtcggaagcgcgatctcgagcttctggttcgccgcgctgaccgagagagccgggtggggcgtcaccgtctcgagctggcttatcatcgcgctcgccggatgcgtcgtctgtatagtgatacgtcctgtgtgggagaaatacaagcgggaaaagctcagttaaaaaaaaccgccgtgtcggggtgacacggcgtttttttacagcaatttctttcgctcttcaagtatggagatgtaatttttcagcatgaaaccgagatcttccggcacgccgttctttatgtcgccgctgcccgacaggtcgagaatgttttctctcgccacctcgccggcgaagaacatattcagcctctgttcatctatccactgtttcaggtcgtcatttccgcggaaataacggctgaaggcgccgtcgaagcagtcgttcagaaaatgcggcatatagtcatagtacggcgcgagacccctcgactgcattccgcggtcgcgcaaaatcatcacgttgcaacgctcctgaccgagctcaaacaggcgctcgagcagaatcaccgtgtcgtcgtcctccgggaggagaaatctcagtattatttcgtccgatatcgcgctcagaaacgacgctttatcgttgatgttcccgtaccggttcagcttcccgtagccgttcagccgcacgagcgcgaaacgcagggggagccacagggaaaatatcgtgtccgcgcgcaggtcgccgttcgtcaggatacagtcaaggtcgttcatccgcctgaacccgtcgtgcgcggacgggtcggcggaataggcggttttcgggcgggctttttcgtagtagatccatgagttgatttttcttgatatcgcgcgcattttttctcctttcacagctgcttgtccggcttcactatgttcctcgtcagctcgaacttctcgttgccgaggcggaccgagagaagggaatagagcatatctatcacggtcagctgaccctgtatcagcggcagctacgcgtccggcgggtcgggggacgtgcgcgtcgttgtcgtcagaagcaggtccgcgcacctcgccagcggtgagacgcggtagtcggacagcacgataacgctcgcgccgcccctcgacgcgagagacgccgactcagtcacgaccttcgtacagccggacgacgaaaccgcgatcagcgtgctcccgcggcgcatcagcgcgcacttcatcttcattattattccgtccgaactgaacgaacaggaaagcccgaggcggaacagcttcgtgaacgcgtactgcgctgtcaccgccgacgttcccgcgccgattatacagacctcggacgagcgcgacaggatcgacgccgcctcgtcgagctgctcggcggttatcgtgctccggcagctctcgacgctgcgcttcacgacgccgcagaccgtcgtcatcgccgcagccgcgtccgagaccggcagagagctgtccggaaggtcgccggtcagctcggacaactcacgccgcagctccgcgaagcacagcatcccggcggaacgcagcatccgcgacaccgacgccgtactcacgccggacgcctcggcaagctcctcggcagacatcacggcggatttctccggctcggaaaggaggtacgccgcgagcttccgctcggtcgaacggcggcttgagagcatacggtggagggtttcggggaaattattttttgacatggggaattcctttttttattttattatagcatgattgatgtgaattgtcaatatgtgacgatatttttgagttctgatattgttttgaaaacgcaaatgtggtataatctttacataagcaaaacaacacacacgaaagggactcaggaaaacatgaaaagatcaatcgcagtaatgcttctcgcttcaatcatacttttctcctgcggaaatcaagagactgtcggcggcaacggcagctcgtcagtcgataatccgacgtccgattccacagatgtagtcgaaaccactcctgcggtatcggtacgtgaccttggcgggaaaaccttcacgttctatatccgttacggcgcggacggctgggactggaacgtcaacgacttcgtctcggacggcgaagacggagaaccggtcaatgacgccgtttacaagcgcaactcaaaaattgaggaaaagtacaactgtaaaatcgaacaggtcaagacaaatgacgaatggggcgcgggtaatatcaagacctccattgtcgccggcgacagcgcgtatgacggaacgctcatgtcgagccgtatgctcgtcagcctcgggctcgaaggactactcaccgatctcacaacgctgccagacatcgacctcacgaaggaatactggaacccgaagctatgtagcgagttgtccctcggaggaaagatatggtacgctatgggtgatctgtccgctaccgacaaccgcgcggtcagatgcctctatttcaacaaggatctctttaaacaatacggactcgacaatccgtatgagcttgtaaagagcggagactggacaattgaccgattccttgagatggtatccaccgggctcgtcgacctcgacggcgacgggaaatacacagacgacgaccaatggggactcttcgtccagcccaacatcggtcagaacctctactactcgtccggcacgcgtatcgtcaacaaagatgacaacgaccatctggtcctctcgctcggcactgaagccgctctcgaaagaatgcaggatattgccgaaaaggtcaagacaaacaaggacgccatgaacatctcctacgattatcagacgatgatcccgctcttcgcggaagggcacagcctcttctactccgaggtctcgctgttcatcgaaagattcagacagtacgagttcgacgtcggaatgctcccgatgccgaaatatgacagtaatcagacggattactgccagtatgccgacggcggctgtagcaacctcgccgcgattccgattgactcggggacgccgaacgacacggcacttctccttgaggcgctttctgaagcgtcggtagacactctgacgaaggcttactacgacatctgcgtcaccggaaaatctgtgcgcgacgaggaatcgatagagatgctcgacatcattttcaaaaattacacgatagattacgcagaccttctcggtgacaacttcacgagtccgataatagacgcgctcaccgggaaaaaggaagttgcctccaccatcgcctcgtcaagcaaaataatacagaaaaaaattgatcaagtcaacgaattcatttcacagtaaggaatcagcatgaaaaacacagcaattctcacctccgccggctctctcggcaaaatctacatcagcgccatcgacgcgctcatctggaagatcggaccgcaggcacacgcggatgcctacgtcggcgaccacgacggcgggttcgccgagagcgagttcgccgggaaatacctcgacacctgcgtgcgtctcgccgccaccgaccacgacccggagcgcgccgcgaaagcctttcaggacgcgaaaaccgtcgcgagaagcataatttcgaatcaatacgcggacggatacatcggcggaatggttcgcggcaaggaaaaatgcgccttcgccgtctggaaccaagcgttcactatgatcgggctctgctcgtttgccgccgccttcccgcgagacccgctcgccgaagccgcaaaagaagccgcgagaaaaatcgcgcactacaacgcgaaaatcttcatgaacgacaaatccatcctcgacggcggcaacaacggcagccagcacctctcgctcctgctcgggctgacgagactctacaagctctcgcccgacgagctcacgcgcgatttcattgtgcatattgtcgggtgcatggaatcgtcagacaacaacttcttctcgttcgactccatcctcgatctcaggtcgaaaaaaggtatcgaaaacttcgtcatcctcatcggaatgctcgagtacggcgacctcttcgacgacctatccgcgctcgccgcctgcgaaaaatactgggacgaactcgccgaaacccagatcagaaagaacggaaacggcaccgtccacgaagtctggaccgacggcggaaacaaaccgcgcctcgtcgggctcgatgaaaaccccgacgaaaactgcgtcgcggtcggctggatcgagctctcgctcgcgctctaccagagaaaaggcgggaaaaaatacatcgacgccgtcgagagaagcgtcttcaaccacctcctcggcgcgctctccgaggacggaaccgacttcgcgtactatcagccgaacttcggacggagaatcacaaagactatcgacgggtactaccagtgctgccgctaccgcgggttctccgctgtcagcctgctgccgctgctcacgttcagacgcgccggggacacgctcgagtcgatgctctacaccggctgcgaatactcggacaacgacgtgaaaatatgcgaaaagtccatatacccgtacgggaacagagcggaaataaaagtcgagaaaaccggcatttcgctgaagacgctcaggctcaggacgccggaaaacgccggaatgtctgtgcatattgacggacagattttcactgatattcaggacggatatattgttctcgaccttgaaaagctgccggagaagttcactgtagatatagatttcgacataaagcctgtgctgaacctcgtcgacatcgacggaaaaaagtacgcttacggcgagtacgggtgtctcctcctcgccgaagagttcgactgccccgactgcacggtcgacgccggacgcgacgcggaaaacaaaaagctcgtcaccggattctatctcgacattgtacgaaacaacagcaatatacgactttgcggggacgaaaagctctcaaagaccgatagcttcgagctttacagaaccgacttcaccgccggggacaaacgcttcaccgacttcgcgtcggcgggcagggaagacgggaaggcgttcaccgttttcgttccggtcgcggaatgaaaattcttacaaatttctgacatttttccataacccttgaaattgccgcacggctttgatataatattatcagagccgggcggttcttttttgccgccatcccgcgggggtctgtgatccgccgcgtcggtacacgctctgctcgcgggttcgaatcccgccggattgacaaatcgtcaatgcgccagcggtttggtttatttattggtcgcaagaccggctatgattcgtccgaaaggacgcaaacaatccgtgatgatggctttttccgggcgaccgggaatcgtcattctttcttatcgccttgccacgcggggataccgcgcaggtttccgccgccctctctccgctcccgcgctcgccggacggtcacgacgttgcagaaccggcgctcaaccaagtgccgcgaagggaagagcttcaccgcgtcacggacgcttttttcccggttcaaccggttcagatatatcacagttcaggagggatattaatgaaaaatgtaattatcaacgaaaatcagcgcggactcctcttcgtcgacgggaaattccgcggacttttagcgcccggaaaacacatcgccgggagcacaatcttcagtcgccgcgaaatcgaagtcctcggtatctgcgacgaaatctcgccgtcaatgaccaccctccgcgaactcatgcgcgacaaaaacaccgcggacaaagcggtcctcgtcaaagtcccggacgggcacgccgcgctccacttcatcgacggttgcctcgacaaaatgatagattccggccgccacgccttctggaaggacgcaggcgagcacaatttcaaactcgtcgacctatctgttcccgaaatcgacaagtcgtttgacaaatacctcgacaaaatccccgccgaccggtacatgaccttcagtgtacaaaacaacgaactcggcaaactcttcatcgacaactcccccgtccgcacgctgaaccccggcgtctaccgcttctgggtaactccaaagcaaatcagagtcgaaaccgccgacctccgcgtcaccgaacaagtcgtctccggtcaggaactcctcaccgccgacaaaatcggcatccgcgtcaccttcgtctacaacaccaaaatcaccgacttcgaaaaattctccgcgtccggaaactcactcgacccgctctacacgcacgcccagctcgccctccgcgccttcatcagcgaaaaaaccctcgacgaaatcctcgacgaccgctccgccctcgccgacgccaccgccaaa

SEQ ID NO: 3408 - DNA, 12456 bp, Unknown
  16S sequences of unknown bacteria
aaaagcgaactgctccgctgccggggttccccccaaagccccggaaaaaccggcggacagttttggcgaacccggttctgcgaaaacatcttcctcctccgaagaattttctgtccttatggaagcgcctccggaagacttcgccatcttccggaggaaagaattgaattccagccgtttgtacagctcgatgaggcgctgactgtccggttcctcgtatctgagctcctcgaaatcgatattcagaggcacattggtattgatcgtggcaagacgcttgctcatcaccgccatctgtgcattttcctcgattttttctttcagcttgctctttttcatagaacctacggaagcgatgatattttccacggagccgtattccagcagcaatttcgtggccgtcttctctccgacgccggggatgcccggaatattgtcggaagcgtctcccatcaggcccttgagatcgataaattgctgcggagtcagaccgtatctgtcgatcatggcctgacggtcatatacttcgaattccgtgatcccgcgcttcgtaaagatgatcttcgtcacgtcggtggccagctgcagagcgtcccggtctcctgtgataatcagcggaaaaagtccctctcgctccgccgttaccgctacagtcccgataatatcatccgcctcaaatccatcgatttcgatcctgtcgattttcatcgccgacaggatctccttcagcacaggaaactgcatcgccagttccggcggcatttttttccggccggctttatacgctttatactctaaatgccggaaagtgggcgctttccgatcgaaagccacggagatatactccggttcataatcggtcagtattttattcagcatgttgagaaatccgaaaattccctgggtatacatgccgtctcccgtaatcatcggccgctggatggcataatacgcccgattcatgagactgttgccgtctatgatgacaagtgctttttccataggatctccttttatttctgttctgtttcttccgccggacgaacctctcccgtcaccggatccataatcagagagaaaactctcagctccctcggcatcagcggatgattccgtatgatccgggccgtctccagtacggcttcgtttacatctccaaatccccggagccattcttcgattccgccggtagcgccgtcgcttctggcgatatccacatcggtgatgccgcgctggtgcatatgtccgatcagcgcttcacagtccacattctgcatgccgcagtcatcgtgaccgatgacccagacttcttccacgcccagttcgtacaccgcgatcaccagactgtgcatcacactgccgtaagggtgggaaataatgcctcccgcatttttaatcagctttacgtctccgtttctgatgcccagcgccgcgggaagcaattctgtgagccgggtgtccatacaggttaatatggccgtcttctttacaggatatttgtccgcctgatatttttcgtattcttttttgtcgacaaattctcggttgaatttcatcatatcttctaaatgcatctctcttcccgtcctttctccgcttttttaccgctctgcgcccgttatactcatttcttccatcgatatctttcgaaaaagtctcgttttccttctctgcgttctgaaaaatccgtattttctttcactccggccgtcctctttattcctctgtattttccagttcaaaattccggtaaaaacaggtgaaatttccggtatgacacgccgctccgatctgctgcgccaccaccagaatcgtatcgcagtcgcagtcgtagctgactctttttaccatctgaaaatgtccggaggtctctcctttgttccacatcgcctgacggcttctgctgtaaaaccaggtcgttccggaagtcagcgtgcgcttcagcgcctcttcattcatgtacgccagcatgagaacctcttttgtctccgcatcctgaacgacagcgggtaccaacccccggctgtcgtaacggatctggctcagaatttcttcattcattttatcctccgtccggcttttccggctccttttttctttgaccgcgcgtttttcacccggcgatcgaaaaatcttttgcaacagaaacagacggacggttcgatgccgtccgccgattgtccctgattcagtttatcacagaacagcgctcatgagaattttaaatcctcatgtttacgccgttttctttcagatattttttcagttcccggatgtcgatttccccgaagtggaatacactggcggccagccccgcgtcagcctttccctcccggaatacttcgagaaaatgttctttcgtgccggcccctccggaagcgataaccggcagagtgacagattcggaaatcacccggttcagttccagatcaaatcccgtctttactccgtcggcgtcgatagaattgagaaccagctcgccggctcccgccttttctccgcggacagcccactccactgcgtcgatgccggtaggagttcttccgccgttgacatagacctcccaggaatccccgctgcgctttgcatcaatggataagacgacgcactggctgccgaatttcagcgccgcttccgtgatcagctgcggatttttcaccgccgccgaattgacagaaaccttgtccgcaccggctctcagcactttattgaaatcgtcgatggtacggatcccgcctcccaccgtaaaaggaatatatacattgtaagctgtcttttccaccacatccagaaaaatctcccgttcttcattggaagcggtgatatcgtaaaataccagctcgtcggcgccgatatcgctgtaatgcttcgccagttccaccggatcatctacgtcctgcagaccctgaaattttacacctttcaccacacggccgtgatccacatcgagacacggcacgattctcttagtcagcaatctcttcaccttctttcaggaaattcgtcagcagacgcatccccgtctcagaactcttttccggatgaaactgcattccgatgacactgccctttctcactacgccgggaacttttacattatagtcggcatagtacactacgtcgctccagtcttcgggaaccgcatagtaagaatggacgaaataagcatagtcgtcagaaccgatccctgctccgatggaatcctctctgttttttatcagcagattccagcccatatgagggatcttacttctctcatcccaatcctcgtcgttctcttttccgaaacggaccacccggcctttgatcaggccgagaccttcccactctccatcttcaaaactcctgtcgaaaagcatctgcattcccagacagatacccagcagccgtctgccttccgctacggcctttaaaagataccggtccagacccgtctttctcagattctccgcagccttaccgaaagaacctacccccggaaggatcagagaagaacactgatccagcaccgccggatcggcggtgagaacagcttcaccgcccagtttttccacgactttcatgacgctcttcacattgcctgcgtcgtaatcgattactcctaccattttttgtatttccttttcttttctcatgtcccgcgcctgttccgtccctgcggaatctccttccgcctcagaaaagccgcccttcggccatatctctttccctatggttcagatcttctgatttccgttctgcatttgaaccgtttaccgctcacggaattttacaaaaaaacgcctttcctgcgccttaccgctttttctgccggaccggcagacgtctccgccttccggattccggtatgacataccgcggtttgcgcacagccctctctccgctttttacagttctccgaaacggattttaatggcgtttccgtgagcagtcagtccctctttatcggaaatccgtacgatttcatctttgacgcctttcagatcttcataagaatagcggatgatgctggttctcgtcagaaaatcatagacgccgagaggagaagcgaatttcgccgctccgctggtaggcagcgtatggttaggtcccgccacataatcgcccagcggttccggcgcgtattttccgaggaataccgcaccggcgctcttcacctggtccagataggattccggttcttccaccatcagttccagatgctccggcgcgatgtcgtttgcgatgatcatagcgctgtcgatatcttccgtgataaaaatcgccgcattattggcgatggcttctgacgcgatttctacgcggtccagtgcggctaactgtcttttcagctctttcgctgtcttctccgcgatctccttcgaatcggtgatcagtatggaagaagccattttgtcgtgttccgcctgagagagcatatccgccgcgataaacgccggatctccggaagcgtcggccacgatacagatttcgctggggccggcgatcatatcgatgtccaccgtgccgtagacatacttttttgctctggctacgaaagcgctgcccgggccggtaatcttattgaccggacggatgctctccgtgccgtaggccagcgccgcgatcccctgagcgcctcccgtcttgtagatttcgtcagcgccggtgatcttcgccgcggcgagaatatatttgctgatcttgccgtcttttcccgcgggagagcacatgacgatccgcggacatcctgcgattttcgccggaatgacgttcatcagcacagacgaaggataggccgccgtaccgccgggcacatagacgcccacgttttgaatcggcacgatcagctgacccagcatgatattatcacccttcgtataactccaggtcttctgaagctgtttttcgtggaaagaacggatattttccgccgctaactccagtgccgcggtgacctccggttccacgctgcggtaagcctcctccagctcttcctccgtgactctcagaggaccggtttccgtctttcccggaccgccgaacttttcgctgtaataatagagcgcgtcgtccccctccgcccggactctggcgatcacctcttttaccgtagcgtccaccgcgtcgaaatcgtcgtccgttcggttgctgagaatgcgggccgcttttaattcttcacctttttttacgattaatgtcttcatgattctttcctttttctattgttccagcgcccggacaatctccgctacgctgtcctgtttcgtcttcagactggctctgtttacgataaaccgggcgctgatgtccgcgattttttctatgacctcaagaccgttttctctcagagtattacccgtttccacgatatccacgatgacgtcggaaagacccacgataggagccagttccacagaaccgttgatcttcgtcacctcgatggaacggccgaatttcgcaaagtaatttttcgccacattcggatatttcgaagccacccgcagttttttcttcggatcgtaacggaaacccttcagcccggctacggcgaaaatacattttccgtagcccagatccatcatctcaaatacatccgagccgctctccagcagcgtatccttgccgatgacgcccacgtcgcaggctcctttttccacgtaaatgcccacgtctaccgccttgacgaaaataatgcggaatctgccagtttcatcgtcgaagatcagcttccgactttctttggaataatcaggaaaatggattcccgcctcttcgaacttctggaatgtgatatccgccagacgacccttgcccagtgcgatggtgagaacatcactgccccgttcgctttccatcgtcgcctgcgcttccatcagagtattgacattgaggccgaagcccaccgcaggaatatctctgccgaactttttcatcagtttgtcataacggccgccgcttcccacgatgacgccggtctttttcagatagacttgaaagatcataccggaataatattccagcgtgttgatcagccccatatcgatggagacacagtctttctcaccgatccgtccgtagatctcccggacatttgccacggcggctctcatcgtatcgttgagcgtcagccgttccgcttttgcaagggtttcctccggcgccccgaagagcagaggcagcgacagcagagcttctctgatatcctgcggaatctgatgctcttttgcaaagaggtggagtcccgggatattcttgctttcgaccagctttctcacttcagactgcacatccctcgaatcgaatcccgggcagacggacaacgcttcgagcagaccgttaaaataacccgcatcgccgatctccgtcttcatatcgtcgcccgcggtctttttcagagcggaaatggctgtctcgatcacgccggcgtcggcatccgcacagtccgaaccgaaaaactcgatgcccgcctgagtgaattctctcttttcgccctttcggaaatccgccgtacgaaacacatttgtcacatacatcagcttcatctgcgcatcgctgtctttataatgggtcgccgccattctggcgatcggaattgtagcgtcaggacgaaggaccatcagctgaccgtttttatccacaagtttatacatatcctccgtgccggcaaagatggaatcgtcggcaaagaggtcataatactcgaaagtcggcgtcatgatctgacggtaaccgttctcccgaaagacggaaagcagcgactcctccaccgctttcatcttttcgaattcatcgtaattaagatcggaaacaccttccggtataaaatgattcatcatattttcgttctcctgtcttctcaagacgcgctgtttcgcctgtttttctccgtctctcgccatccggagggatctcctcctgcatcggggggggcaggacagcggcgctgcggttttttagcgacagcacgataacacttttgcctctttactttatcacgctatcactttatcgctttatcatagtaaatattataacatcagaaaggacgatgtcaacagatttgcgtatgcaatatcccgtttcctgtgctatactcgacacatggaggtacagacaacatgttttacgattatcatacgcattcttttttctccgacgactccgaaacacctctgactctgatgctggacgccggcgtaaaaaacggcctgatccagatggcggtgaccgatcatttcgatcccggctatcccgatccggactatccttttgaactgaatttcccgctttatcacgaagaactcgaaaaaaagcaggaacagtaccggaatcggctaaaagtcgtcaaaggcatcgaaatcggtattcagcacgatcagctcgaccgctgccgcgaagcagcgcgggcatatgattatgattatatcataggttcctttcactgtgcatgtgcggaacccctttacaacggtaattttttcgacggaaaatctccccgcagagtctacgaagattactatacttatgtctacaataatctgaaaaaatacgacgacttctgcaatctgggccatctgaacatcatcgaccgctacgcgcctgaaatcgctccttttgacacgtacagcgatatcatcgaggccattttaaagcatctgatcgaaacgggacacggtatcgaactgaacacctcttctttccgatatgacatgaaagaaacctgtccttccgaagcgatcctgcggctctatcgaacgctcggcggagaaattatcactaccggttcggatgcgcactgtccggaacatgtagcatatcacttcaagtatgcctacgcctatctgaaatcgctgggattcgactacatcacttctttctctcagcgaaaaccgtcttttcaccggatcgacgaataatccagaaacagttcttccggacggaaataaaatcatccgacggaatccgcactgtcccagcggctgacggagcgacaaaaacatacaaaaacggcggatctccgccgttttttatttttcttaaataacatcaaacgccccgtattgtgataaaatccacaatatacaaaattaggaaattcttccttatttttggtttttttccataaatatctttcacctgattctttcttgtaatataatgtttttgttgcagccggcagcttactcgctaaatcctgatggataactactctttttatctgctgccggctgcagcgaacaaaaaacaaaccggccgggctgcgtattcgacacgcagcccggccggtttgtttcatccaaaagaaaaaagaccggaaataatttttatcaaaagcaggagcaataccagaatgatgctcggacggacgattttcgtccccttttccatcatcattccggccccgatatagccgcccagcatattgcatacagcggcggccagccctagatacacggccacctggccgctgacgagaaatattacgagagatgtgacatttgtagtcagattgatgattttcgtctgcccgttggcttttcgaacatccatccccgcaaagatattgaaagctatgatcagaaatgttcccgtacccgggccgtaaaatccatcatacacgccgatgatcagcgccgccgcgatggaaaccgcgtacagacgccgccggctcaccgccttttcggaaggtctgtcgcgaaacagattcttattgagaacgagaaaagcacagaccggcaaaatgatcaccatgagcgacatcattatcttctcactgatgagcagggagagccgggctcccgccgcagaaccggcaactccggccgcaatcgaaggcgccgccagacgaaaatccacaaaacgatttcggatcagacgaaaggcagccactgccgtaccgcaggtagacgacattttatttgtggcgatcgccgtatgaggaggcagccccgcaagaagatacgccggaagggagatcagacctcctccgcctccgatagcgtccaccagacctgccagaaacagcagcggacacaccagaagaaatgtttcaaaacctaattccatctcgaatgcttactctctttcaaaacatcttttacaaactgctacaacgattggatgcagagcattctttctctatgcaaaaaacggacgactggaaacaatccactccccttctgccttcagagaagctcagatgctccctgcgccgcgggtctccgcctgaaagaaaaggatataaaagcaggtatcacttttcttccggagaggattccgctttctgcctgttccgctttctctgctctttgcgttcttccattctgctgaccgccagagtacaggccgcgtcgcccgtaatgtttaccgtcgtccttcccatatcgaagatccgatctacaccggctaccagcgcgattccctccaccggaaggccgacgctctcaagcaccatcgccagcatgatcatgccggagcccggaactcccgcggtgccgatggatgccagcgtagctgtgagaacgatcgtgagcatctgcggcaccgtcagatccacgccgaaacaggatgcgataaacaccgaacagacgccctggtaaatcgcggtaccgtccatattgatcgtcgcacccagaggcaggacgaaactggcgatatctctcttcgcccccaatttttccgtacactccagattcagcggaagagttcccacagaagaagcgctggagaacgccatcgccatagcaggcgccatacctttaaagaaagcgatcgggctaatcttcgccagtgttttgacagagagggaatagaccaccgccatatgtatgacataacagatataagcggccagcagtaccatcgccagagaccctaaaaccgcagagccgttttctgccaccaccggcgtgatcagacagaatacgccgatcggagacaatttgagaatgagctccataaccaccatgctgacgtccgccagactcgtcaccacactggccagcggcgcagctttttcaccggccagaatgatgccgaagccgaagaaaagagcgatgacaataacctgcagcatcgtcgcttccgccataggctgaatgatattcgaagggaaaatattcaccagagtatccatgaaattgacaggatccgccgcttcatattccagtccgctggtctgcagaacactgaaagaacctttaaagatattggcgaatatgagaccgataactacggcacaggccgtcgtcgccatgtagaagacgatagtcttccagccgatagaccccaccttccggatatctctcatagagataacgccggagataatcgacgtcagcacgatgggcacgacgataaatttgatcaggttcaggaaaatcgtaccgaacggtttgatataatttaccgtccattccgtctgacctccggccataaaaagcagccccgcgataataccgagtccgagtccgataaaaatctgggccgcaagagacaattttctgcgttttttcataaaactcctcctataactaatataaattcagctgataagaccgctgccgctctttctctctgcatgcggaacagaaaaacaccgcaccgtttcctatcatgtaaaatacattaaaatattataaagggaacagaggtctctgtcattctttttctttacataaattttacatcttatgaattttagaaatgacagacagcggagtaccgtcagcggctgaaagaacaattcttctgttttcggggtgcagcggacgcagaggacaaaaagagatccggaccaaaggttccgtaaaatacttcttcctccgtccggatatattctataatatattatagtaaactatatcattttctgtgaacaaataatttttgaaatgctttcatcagccgggcgcgccgcaccagtatatcttccggcgattcctcgatttgcgaaccggtgtgcagacttttttccataaagaccgtctgactgtccaccggaagtccgccgccggccttgcgctgataagttccgtcggaaagcataaagctggcttttacattatctttctgctgcgtttcgacgatttttctcaccatttttcgaagttccggatcctgtaccgggcacgcgatctccactctccgtttcagatttctcgacatcatatccgcagaggaaagaaaaatccgagcttcttcgccctttccgaaccagtagatacgggcatgctccagatatcgtcctacgatactggtgacgtgcacgttctcagtatgtcctggaattcccggcagcagacagcagataccgcggagcatcagatccacccggacccctgcccgggaggcttccgccagtttatcgatgatactccgctctgtcatcgcgtttgcttttatgaaaatgtatccgtcgcttcccttctggatctcccgatcgatgagctccaggagtttcggacgaatgccggaaggcgctgtcagcagttttttgtagtttcctcccaggtttcccagcagcatattctgaaaaaataccgtgccgtccaggccgatctgaggatcggctgtcatcatgctcagatccgtatacattcgatttgtcttttcattgtaatttccggtgccgatctgggtgatatagctgagcgtctctccttttttcacggtgatcaggcagattttgctgtggcatttgtatccttccacgccgtaaataatctgacagccggaatcttccaggaccttagaccagctgatgttattctcctcgtcaaaacgcgcccgcagttccatgagcaccgtcacttccttgccgttttccgcggcgcggcagagcgcatgagcgactttggacgtagaagccagacgatagatcgttattttcaccgaaatgacgtccggatcttccgccgcctcttccagcagacgcaaaaacggacttactttatcgaaaggaaaaaagagcagccggtccttttcctgaatctgccgtatgagacttctcttctcatccagatcctcaggccagcgaggctggaaaggagtataacacagctccggatggagttctttcggaagcagttcctccagcgcaaagacatatttcatgttgagcggtgcccgatcgacgcagatctggtaatcttccacgcgaatgcgctttttcagcaatttaagaaattcctcactgagttcgttgctgagttccagacgaataatcgacagccgcctgcgctttttcagaagcttgctcatgtgacttcggaaatcctctccgtcaaaatcgtcaaatttctcttcgtcaaaactgatgtccgcatttcgtgtaacgctgagaatacagcagtcttccgccctgaactctccaaacaactggtcgatgcgtcctcggatgatgcgttcgatgcggacaaaccgtctctcatcccccggcatcggaacaaaaggcctcagaaaagaagggacggg

SEQ ID NO: 3409 - DNA, 28945 bp, Unknown
  16S sequences of unknown bacteria
ccggatctgcggcggcgattttgccgacaagatgcacctgctgatggactttaccgaccgccccggcgaggtagccgatccgtggtataccgacgatttcgacacgacctggcgggatgtggaggaaggctgccggggacttctgcagaaaattatcaagaaggcagtggtgtaatttatgaacgataactgttggggaaatccggatgctttttcaatggtgttgcgctgtacaaaaatgcgatatgcgcgcacatttttgaactgcggccagatcaaatttagtacaccgagttcatgggttgagtatgaagaaaaatacggtgatggcagaggcgatcgccttgaaggaacaatggcaactttcaatatttgggattttgagaattcacttcctattttaagaaaatacagccattacactgatcttttaaagattcagaatggcaataggatctatttaaaaagaagacgggatatgcacttgccctgcttttgcttatattatttaaaaaacagtatgttcatatgtccgaaagaaccaggtattcaaaagttgaaaacatctattccatactcatattttagagactttgctgataatatgtctccagaagaagttcaaaagttgcccgaagatgagagaccagtcctcattgttattgaagactacccggagtttaagcgaagattagtccataaacttatagaaatcggtttgcttgaccgcgaaattatagaaactaaagttagttattttgattttgatcagtatggtgaatttggttggtgggactttgggcagaaaagccctatggaattagctgtaaaacatattcggttcaaagaccagaacgaaggacgttttatcattaatacagataaccagagaatccttcaattattggacaaaccaattgagattgggcccttagatgatatatgtattttgtgtgaccactatttgtatgatggcatggatattgttatgacagcaaaagtagaacaaatagaggaataaataattgaattatgatttgtgttctggcacatgcttaaagaaaagcggcatctatagtgttgcgatgttccaaaaaagaaggacacggttttcgtgtccttctttttttatcctgggaaacataccactagttcaaatgttcccttttgcacgctggcattcaaagtgccgccatatcgttctgcaatctcccgcatgccgggaaggccaaacccatgggaggagcggtccgccttggtagtggcgaaatcgggattgatttcaccgcttaccgggttctccagccgcagcataaaaagccctttattcacccggcagcgaagggtgatttttttattttctgcattctgcacaccttcgatggcgttgtccaaagcgtttcccaacagcgcggccagatcgatatcggccactgaaagatcccgggggagagatacggcaaaatccatctcaattcccatccgttccatggtttccgctttggaggaaagaaccacattggcggtctcattatcgcaaaatcgcctgcggccctgcagggccggagagccagccatttgctccaggtagtcaatggcgccttgggtatcgcttttttccaacaggccctgaatgacggtgagatgattgcgcaggtcatggcgaagctgacgcacctggctttcctgctgacgcagcccctggtaatagacttcccgcaatccggatagctgattggcccgctccaaacgctggtgatcggccaaaatcagaacggcgaacagcagcacgatggatgtcagcaatacaaagggcagcaccacaagcccttgattcatggccagcgtattgacagcatcggagtgatacttttgaaaggtcagcagtaccacggccactagggcacagagtggcatggccgccagggccagcaccatttgccatagccgacgggagagtcgtacctgctctgctgcaaacctcctacggcaccacctccatagagcaggacaatggagccttgggcaccacctacaccatggagtatcgggagattgtctccagtgccacctttttctcggaatcggcctggaatgcccttacgggccagaacattgatttgctccccggcacctgtgccaatgtgctggacgacgaggggggcagcgaatatctctccggtggtgatgtgaccgtcgtcaccaatatggtcaccggagaaagcctgtctgtggatccagtggagccgctgcgatacaccatgctgctgggatgctatgtgctggacgatgccgattacgacgcagtggctgagggactcaccgatctttggcaggagacctgggtattttttgatgtggcggatgtggagcatagttatccttttgccaaggcactatttgaccagattgtggattgctctggcgatgaagtgatgcagatggatgcctatgacccggtggtgaagatgctggaggaagaggtcggtgggacctatgagtttgatcgggaaaacattgcggcctatggttttccggtgatggatcgtgaggaccgggacagcacggaattccgcaactactggctttatatgccccagttccgtgtactggatcagaacgactttgtcaccaccatggcggtgtttctgatgctgtttatcttcattgcgttgatttgctttgcggccgtggtggtgattgcattcactcgctgcatgaccattgccatcaccaatgccagggtttacgatgacctgcggcatctgggggcctcccatgcttatttgttccagtctgtgaaagggcaggtgtccagagtgtttctggtgcctgccatcgtggggacagcggtcatttctgctttttatctgatgattatgtatttcaatgacaatcgcttcacgccgggggaagtggccggcatgggcacctgcgccggtgtggtggttgtgttgtcgtcggcgctctatggtgtataccgtttcacccggagaagggtctgccgcagcctggacattggataaaatgagattcagaatagaaaaagagtgggatttccatgatgaaatcccactcttttgtttgatcgggtgatggacagtttaggccttccagctgatatcctggaagcggatgttgccgccggcgttgatgtctacgccttccaggtttgcgttataagcccgcagatacatatcctgatacagggagacctgggggcacagctcgttcagctgaacggtgacttccttcagaataacctctctggcttcggggtccacggtagcggcggcctcatcgatgagggcgtcgatttccgggttgttcagacgggtcttgttggaagcgccaatggacttactgtggtacacgcccaccaggtaggagaccatgtcgctggaagaatagccgccgatggaagcggtgtagttgccttccgcagtggtggacaggtaagtggccaggtccatgctttcaatctcgcagttgatgccgatctcggtcaggttggactggatcacttcagcagcccgcttcttggtgtcgttggagcagatgatgctcatcttcacagacttggggtccacaccggaggcgtccatatattcctgggccttcttcacatcgtaggtgtcggcaccttcgtcagtggagcccagcatgctaaggggagtggaggaataggccggagcagccatgccgttcatggcaacggtcaccaggtcatcacggttgatggccgagttgatggcgtgacgcacattctggttgtccaggccgggcttctcgttgttgagcatcagccagttgatagcagtggattcgtgcttcagcagagtcaggtcgctgttgctttcgatacgctcagcgtccatggcttccacttcgatgatcatatccacttcgccggcttccagagcaatggtgcgggaggagccttcggggatgatcttccaggtcatgttcttgatggagggagcgccctcgtagaagtcctcaaaagcttcgaactggatgctgtcgccccgcttccagctgacaaacttgtaggggccggaaccgatggggttctcgttgaagtcgttgccgctgtccagcagctccttgggcacgatggagttgccgtgatggcacagatcgtacagcagagtagcggaggggccgtcggtggtcatcttgacggtgtagtcatccactgcttccacagagaggatggagccgttgtacaggttgatttccgggcaagtcttggcataagtgatggaggccaccacatcttccgaagtcaggtcgctgccgtcatggaacttgacgccctgcttcagatggaagagccactcggtgtcgctggtgttttcataagtgtccaccagttcaggaaccggattcaggtcggcatctgtttcaaacaggctgctgtaaaccagctggttcatatagtctccggccacggcgttgtggtcatagggccccatggaaggagtttcgctcatggtggctaccaccaagctgtcctttcccttgccgctgttaccagaggaactgcctgtatctttgctgcagccggacagcagagccagggtcatcaccgaggccagcagcaggctgagcaaacgagtcttgcggtttgtcatggtttcacctcatttgttgatttggtttcccccgtggggaaataccttttgcagattaaattatattttgcaagaaatatttttgcaatatttattttatcaaatcgtaatatttcgtaagaaccatggagctttgtggaaaagtgggggagaatcttatctattttgtacataaataatcgttatatttttcacattataaacaaataacagtggacctgtaaagaggagaaaacagcaaaggggatgaataaatataagtaaatagaccataatagccggtcgattccgggatttgttgaataatattactaaaaaatgaaaaaactgttgcaaaatgagaaaagggaaaatataatgggagagcaaaatgcaaaatgttcataattttgcaaaatttgcaggagaagaaaagagagagtaagaggtgtaaacaatgaacaagggaaagaaacatctgatcagccttgtgacggtgctttccatgagtctgtccatgctggccggatgcagtcagcaggatggaagcacagacaagggaggatcggccgacaccggtaaggatagcctggtggtggccaccatgagcgagacccccaccctgggagcctatgaccacaactcggtggccggagactatatgaacaagctgacttacagcacactcttccgcaccgatgccgatctgaacccggaacccagcttggtggatacttatgagaatgtcagcgataccgagtggctcttccacctgaagcagggcgtcaagttccacgacggcagcgaactgaccgctcaggatgtggcggcttccatcacctattccaagacctgcccggaagtcaatctgtataatcggtgcattctcaccgtggaggctgtggacaattataccgtcaagatcgtcaccgacggcccgtctgcaaccctgctgtatgatctgtgccaccatgccaatgccatcctgcccaagaagctgctggacaatggcaacgacttcaacgaaaaccccatcggctccggccccttccagtttgtagagtggaagcggggcgatagcgtggagttcaaggcctttgaggactacttcggcggcgcgccggccatcaagagcatgacctggaagatcatccccgaaggttcctcccgcaccattgccctggaggccggggaagtggatatgatcatcgaagtggaagccatggatgtggagcgcatcgaaagcagcgatgaatttactctgctgaagcacgattccaccaacatcaactggctgatgctcaacaacgaaaagcccggcctggacaaccagaatgtgcgccatgccatcaattcggccatcaaccgtgacgatatcatcgccgcagctctcaacggcattgccaccccggtatattcggccagccccatgggaatgctgggctccactgacgaaggcgccgatacctatgatgtgaagaaggccaaggagtatatggacgcttccggtgtggacccggcttcggtggaaatgagcatcatctgctccaatgacaccaaaaagcgggcagccgaagtgatccaggccaacctgagcgagatcggcatcaactgcgagatcgaaagcatggacctggccacctatctttccgccacagcggacggcaactacaccgcttccatcggcggttattcccccagcgacatggtctcctatttggtgggcgtgtatcacagcaagtccatcggcggagccaataccacccggctgaacgatcccgaggtggatgccctcatcgatcaggcggcggccactgtggatcccgaggccagagaagtggttctgaagcaggccactgtgcggctcaatgagctgtgctcccaggccactttgtaccagagcgtgctgctgcgggcctatgacagcgacctgcagggcgtggccatcaatgccggcggtcatatccggtttgaggatatcagctggaaggcctgattccaaacaccataatgacaaaaaccctccccgaaaactggttttcggggagggtttgttttttattccggtacggagttttgcacctgaatggggatctccggcatcagctcccgggagatcacctggagcatttcctccagctttttcacatcttccggaggaaagcgtttttccacccgctggagaacggtggacagataggtgtagctcacattgtaatagtccatgtatttctgggtgggaacgatgtggtattcccgccggtcgctttgggactggacttttttcagatagcctttttggatcaggctgttcaccttataggcggcattgggaggagaaatgtgcacaaaactggcaaactcgttgacggtgggagaacccatggcctggatgatctccatgcagaaggtctccaccgtggtgagagtggcttcccggctgccgaatttgctgaagaccttctgataaaaatgaagcttgaatttggtatacacttcggaaaaactttgctgcagcatgccctatgcccctttcttgtgaaccttttttaactatatcagatttggggcgaggcatcaatgggccttattccacagcgaagagaagttctgctgtggcggccagctggccgtccaccttggccgtggcctggccgatgcccaccgagccccggatctgggtgagaacgcactctagctccagcacatcccccggcactacctggcgcttgaagcgggcttttttgatgccgccgaacagggcgatgcggcctttgtactcctcttcgcacaaaaggatgacggcgcccacctgggccatggcctcgatgatgagaacgccgggcatcaccggtttctggggaaagtggccctggaaaaaggcttcattgccgctgacgcatttgcggcccacggcccgcacccctggttccagatgggtgatccggtccaccaggagaaaggggtagcggtggggcagaatttctttgatctgattgatatccagttccattattgttgttcctcctcaaaggcgtgaaaaaccagactggcgttgtgaccgccaaagcccagagagttggacatggcataggaaatgctttggctccgtcctgtgttgggcacgatgtccagatcgcactgttcatcgggtacctgatagtggatggtggggggcaggaagccctctttcagagccatcagggtgaagatggcctccaccgcgccggaagcccccagcagatggccggtcatggacttggtggagctcatggccagcttgtaggcgtgatcgccaaaggcctttttcaccgccagggtctcaccggcgtcattaaggggggtggaggtgccgtgggcgttgatgtagccgatctgttccggtgtgatgcccgcatcttccagggccatggtcatggcctgggcggcgccccgaccatcggggcagggggcggtgatgtggtgggcatcgcaggtggcgccatatcctgccacctcgcccagaatgacggcgcctcgggctttggcgtgttcatagctttccagcatcagcataccggcgccttcgcccatgacaaaaccgctgcgctctttgtcaaagggaatggaggcccgggcggggtcgggattggtacacagggccttgagggaggtgaaaccacccatgcccagaggggtgatgctggcttcggtgccgccgcagagcatcacatcggcatagccatggcggatgtagcgcatggcgtcgccgatggcattggtacccgaggcgcaggccgtgaccgaacaggagcacatcccctggaagcccagctggatggcgatatgcccggcgctcatgttggcgatggacatggggataaagtagggggatacccggtcccagcccttttcattgcctttgaggcattcgttctggatggtggtcagtccgccgatgccgctggagaccagcacaccgcaacggagagggtcttctttctccatatccagaccgctcatctgaaaggcctcctgggcggcggcaatggccagctggttgcaccggtccattttccgggcttcccgtttgtccatgtagttttctgcgtcaaagccgtgggcctcaccggccagcttgaccttctggccctcggtgtcgtacaaggtgatggggccgatgccgcattttccctctttggcgccctgccaggaggctgtaaggccgcagcccagggggctgatgatgcccatgccggtgacgaccactcttctgttctgatccatggtgttttcctcctttaaacggccatgccgccgtcgacgcacagcacctgaccggtgatgtacccggcttccggctgagcaaagaagacagccgcctgggccacatcctccggctggcccagcttgcccatgggaatggaggacagcaggccttcccggaccttttccggcaaaacggcggtcatatcggtttcgataaagccaggggctaccagattgacggtgatgccccgggcggccagttctttggcaaaggacttgctcatgccgatgagtcccgccttgctggcggcgtagttggcctggccggcgttgccccgcaggccaacgatgctggacaggcagatgatccggccaaagcgctgtttcatcatgggacggcaggcggctttcatgcacagaaaggcccctttcaggttggtgtccagcacagcgtcaaaatcctcttcgctcatgcgcatggccagattgtcccgggtgatgccggcgttgcacaccaggatgtccagcgtgccccaggtcttgagcactttgtccaccatggcctgcacatcaggggccttggatacatcgccctggatggcttcggcttccacgcccttttcccggcaaagacggacggtctccaaagcggcatcttctctcccggcgtagcctaccagcacattggcgccccgggcggccagctccaggcagatggcccggccgattccccggctgccgccggtgaccagggcattttttcccttgagatccatgtcaattctcctttttcaacagtgtcacggcgtcctccagctgctgggctgtttccaccgggatggttctgatctggggggcggtctttttcacaaaacccgacagggctttgcccggccccacttccacaatggtatcgatgcctgcatcggccatatggcggatggtgtcttccatatagacgctggtctgcacctggcgcaccagaagttggggaatggtttcctctgctgttttgggccgtcccaggcagttgaaatagacggggaaggccatttcaccaaaagtcagaccggcaaaatgttcttccagagcctttccggcaggagccatgaggggggtgtggaaggggccgctcaccttcagaggcaggcagcggcgggccccggcttccagcgccagacggcaggcttcttccgccccttccctgctgccgccgatgacgatctggccggggcagttgtagttggccagatacaccgggcctttctcagaggctttccggcatacttcttccagcgtgttccgatccaggttcaaaacagcatacatggcgctttccatgccctgggcggcctcttccatggcctttccacggaaggcggccagggcgatggcctcacggggagtaaagaccccggcggcctggagagcggagtattctcccagactcagtccggcggcggcctggggaacgatgccccgttctttcaaaagggcggtgattccggcggcaaaggccaccatgcagggctgggtataccgggtctgggacaactgttcctccggcccttcaaaacacagttttttcaaatcaaaatccaccggcgcatcgtccaggatctggcggaacaggggataggcctcatagagatcctgccccattccggcgtgctggctgccttgcccagcgtataaaaaagccagtttcattcttcgttcctccaatcccgcatcagatgttccatcaactgacggacagtggtcattttgttgatctgccctaccttgccgccgcagaaaaacagaccgttttcccggtcgccctgcacggcccggatcagcgcccgggagatgcagtagggggcggttttgggattgcagggggtgagacaggagatgcatttttccggcttcagccgtttttccttttccagacgctggagcaggggtgtccgtaccgcccggccaggcatgcccaccggactggggatgatgcacacatcctcatcccgggcttccagaatcacatccttgaaaccctggctggcgtcacattcctcggtggcgataaagggggtagccagctggacgccgtcggctccggcctggcgcaatccggccatcttttcccggccccacacccctccggcggcaaacaccggaatggcttttttgtatttttcacggaagggagccagggcattgctcacttccttcacgatggtttccaaagagggagcggtgtgctcccgcatttgctcatgagaaaagcctagatgccctcctgcctggctgccttccaccaccaccagatcgggagcacggtggaaccgtttgtcccaggcccggcagatgagggacgcagcccgtccggaggagacgatgggccccagggccaccttttcctcgggaacgatgccgggcagatccatgggcaggccagcgccggagatcactgcctgcacaccggcttccacggcggcgcggatgctgtcggcatattgccgggtggccaccatggcgttgatggccaccaccccggctcctttggccagggaaagggcctgctgcacatggtttttcagcgcccgcagattggctccatcgggatcggtttcaaaatccggctcctgaaagccggtgacggcggtgctgatggtgcccagcccgcccaaggcggccacatggcccgccagccgccccagagaaacccccactcccataccgccctgggcgatgggaagggagagggtgtgtccggcaagagaaagggtgctcattttgtttcctccgtcaaagcctggagctggctggtgtatccggccatcagttcttcaaaaatctgacgcagggggcggatttcgtgaagctggcccaccacttgtccggccatcaggctgccataatcggtatcgccttcaaagaccgcccggcgcagactgcccagggtgtacttttccagctccatcttgtcggcgccggctttttcctgggtgacatattcccgggccatcttgtttttcaggatgcgcaccggtgttccggcaatgcgtccggtgaccacggtatcgctgcctttggctcccagcacggcttccttgtagttttggtggatggggcattcctggctggccagcaggcaggtgcccacctgcacgccgcaggcccccagggcaaaagcggccagcagctgacggccgtcggcaatgcctccggcggcgatcacagggatgtttacggcgtccaccacctggggaaccagggccatggtggtcatttcgcccacatggccgccgctttcggtgccttcggccacgatggcatcggcgccgtagctttctaggcgcttggccagcaggggagcggccaccaccgggatgaccttgatgcccgcttttttccaggcgtccatatagggagccgggcttccggcgccggtggtcaccacaggcacctgctcttccaccaccacctgggccatttccggggcggcggggttcatcagcatgatgttgacgccgaagggcttgtcggtgagctcacggcactggcggatgtgctggcgcagggtgtcggcgtccatgccgcctgcgccgatgagccccagggccccggcgctcgagacggcggcggcaaagggagcggtggcgatgttggccataccgccctgaatgatggggaactcagttcccagaagtgcattgagtttcatggtgtgatcctttctctgtgtttaaaaggtgaggagacaggcgccccaggtcagcccggcgccaaagcccacgcagagcacccgtttgcccggggagagcagcccgtcacgggccatttcgtccagacagatggggatgctggcggcgctggtgttgccgtagcggccgatgttctgataaaaaagcccttccggagcctgaagttttttggcggcgtaatccagaatgcggctgttggcctgatggcacaccacatggtggatctgggaaagggaaaggccggttttctccaaaagctcatggacggcccggggaatgatgtccacagcgaagcggaacaccgctttgccgtccatctgaagatggctgggatcagggccggggccctgggcccagatgcagctctgggccccgtcggaacccagcagactggcatagggatgctgtggggaaagtgtgaccaccgccgcaccggccccatccccgaagagcacgcaggtgctccggtcggagaaatccagcacctggctgatctgctcggcgccgatgaccagggcgtatttggtctcgtgggctgtcagcagagcccgggcggtatccaaagcgtataaaaagccgctgcaggcggcgtttaagtcaaagcaggggatgccatagggaagtcccagttccttctgcaccagacaggccacagagggggtggcccactggggagtgaaggtggctacaatacaaaggccgatgtctttgggggaaagccccgcggcttccagggccttttgccccgcctgggcggccagagtggtacaggtttcctcttggcacagatgccgggtgtggatgccggtacggcttgtgatccactcgtcactggtgtccacaaactggcgcatatcgtcgttggtgagcacctttcggggaaggctccggccggtgcccaaaatctgaagtccggtcattggctgtccctcccggcatcatataagaatccattgcccatagcccggtatttgccgaaccggtggcgctgcaggtctttgatcttggaaagacgctccagctgctctgtcagagcggcgtccaggcggcggtatatctgcttggggttttggtgggcgccgcccaagggctcggggatgatctcgtcaatcacacccaggttcagaagatcctgagccgtcaggcccatcacctgagcggcctcgttgctgcgggaggaatccttccatagaatggaggcgaaaccctcgggggagagcaccgaataaatagcgtgctccagcatgagcacactgttgcccatacccagggccaaagcgccgccgctgcccccttcgccggtgaccaccgcaatgacgggaacggtcagacggctcatggcggccagacagtgggcaatggcgctgccttggcccttttcctcggcggccatgcccggataggctcccggagtgtcgataaaggtgatgatggggcggcggaatttttccgccccttccatcaggcgcagagccttccggtagccctccgggttgggcataccgaaattgcatcgcaggttttcctgcaggtcttttcctttccggtggcccatcaccgtcaccggcttgccgtgaaacagagcaatgcccccataaatactgccgtcctcggcggacagacggtctccctgctgttcaaaaaaatcggtgaacagagcagagatgtagtcggccgttccggggcgggaggggtgccgggccagatagaccttgtcggcgggagaaagagtacggcaggcttccagcagctccttcatatcccgccgcagctgctcccggcggatctggctggcggcatcgtcccccagctgaccgatctgggcacggagggactggagctgacgctcggtttgttccatcatacagttcgtcgttttctccttccccggtgcaggtcaagcagtctgatgagggtggggcgcatctgggatctgggcaccacctgatccacaaagccgtgctcctgcaaaaattccgcctgctgaaagccctggggcaggctttggccgatggtttgctgaatgacccggggtccggcaaagccgatgagggccccgggctcggccagggtgatatctcccagggaggcaaagctggcggtgacacccccggtggtggggtgggtgaggcagacgatcagaagcccgccggcctgggagaatcgctctatggcggcgctggttttggccatctgcatcaaagacagaatgccctcctgcatccgggccccgccgctggcggtgaagaggatgaggggcaatttatacttctgggctttttcggcacaccgggcgactttctctcccaaagccacacccatgctgcccataaagaagcggctgtccatcacgcccacaatgaccccatggccgccgatgcggcctttggcggtgacgacgccttccacaaggccggtgctttgctgcttgctcagcagctttttgccatagccgggaaaatggagagggtcccgggcggtgagatcccgatccagttcccggaagctgtgatcgtctagaatggttttcaggcggtaataggcatccatgggaaaatgatggccgcaggaagggcagacccacatggtttcggccagctgccgccgggtgagggcgctgccgcagccggggcactggacaaagggctgggactcattcaccggctgggagctggtgttttgaggggcggcgctgtcccgcatggccttcagctgaaacagccgttggcgctgggaagaaaaaaagtttgtcatgggtcaatcacagctccttctctccacagggttcccactggagaagagtgtcaagattctgttccaggaagccggtgtcataatggccgcggatgtagtcggggtgatacaggatcagatgggccagaggggcggtggtggaatagccttcgatcaccagttcctccaaggcccggcgcatccgccggatggctcccagacgggtgggggcgtggacgatgactttggcggccagagagtcataataggggctcagttcatagccggtgtaaagggcggtgtccactcgcacgccagggccgccgggcaggtggagaaactccgtttttcccgggcaggggagaaagccccggcggaaatcctctgcattgatgcggcattcgatggagtggccctccagatggatgtcctcctgggagtaggacaggggaagtccggcagcaatgcggatctgctcctgtaccaggtccaccccggtgaccatttcggttaccggatgctccacctggatgcgggtgttcatttcgatgaaataataatggccttcctggtccataacgaactcaatggtgccggctcccacatagcctgcggcctcagcggccagcacggcgtcccggcccatttgctcccgcagagcgggggtcagaccacgggcgggggattcttccatcagcttctggtttttccgctggatggagcagtcccgctctcccagatggatcacatgaccctgggagtcggccaggatctgcacttcaatatgccggggatggaggatcagcttttccacatacatttcatcggaaccgaaacaggccatggattcggcctgggcggcctggaaagcgctttccagctcttccggagtgttcacccggcgcatgccccggccgccccctccggcgctggctttgatgagcaccgggtagccggccttctctgccgcctggcgggcttcctccacatcggccaccgggccgggggagccgggcaccaccggcacgcctttctgggagaccagctttcgggcggcagctttgttgcccatctggcggatcacatggcccgaagggccgatgaactggatgccgcagtcccggcacagatcggaaaactcggcgttttccgacagaaagccatagccggggtggatggcctgacagccggtgagctgggcggcggtgagcagggcgcaggggttgagatagctgtctgcggccttggccggtcccacgcacaccgcccgggtagccagttgagtgggcaggctgccttcgtcggcctgggaataggcggccaccgtttcgatgcccatctcccggcaggcccggatgatgcgaagggcgatctctccccggttgcaaatcaaaatacgcttgaacatatcagcactccttgaggcggaacagggtctggccaaaggaaaccagctggccgttttctcccagaacctccagcacttcgcagtcgaagggagcggggacctggttgatcattttcatggcctcgatgaggcaaagggtatcgcctttttgcaaatgttttcccaccggggcgaagggctcttctcccggggcgggagccacataaaaagtgcccaccagcggggcggtgacttccttgccctccttttcaggagcgggggccggggctgcgggggcggcgttctggacagcgggagcggcaggagccataggggccgctgccgggggaaccgggggcaggggagccgccggacccttccgcagggtgattttttcttcccctgttcggtaacaaagctcccaaagaccgctttgatcaaagcggtccatgagagcgaacaattcagcttgggtcatgggtgttccctcccgggagatttagtgattggcttccaggtagctgacgatatcgcccaccgtcttcatctgggtgagagcgtcatcggggatggaaacacccagggaatcctccagggccagctgcagttccacagcgtccaggctgtcggcgcccaaggtctcggtgagggaggcctccatggtcacatcgtcggcgctgcaatccagggtgtccacaatgatctctttcactttgtcaaacatgataaaatcctcatttcttttcataaattggttcaaatattttagttaaaaaattttaaataaaatattttaagcaatattctaacagaaggcggcaaaatgtcaaggggaaaaaagaaaaaaccgcctctcccgaaggagggcggcgtcggtattatataaggaagaaaaaatcagattttttcttctctgcggcataggttcaggtattgattgcgggcatctttcaggctggccagcagagcccgctgggtcagggcaaaataccggctgcggatgattttttccaattcttccatgtcttccaccaggcgtttgtccacgataagggagtggacaaaccggtcggtcatgggcagaatggtgttgcactgggcgtcttcgatgcgccctgttttccggtccacgataagccccaggtaaaagacgccgtggaccagggagatggcgtcctccttggcggggcgggcctggccggtgatgaaaacggtatcgggggaatagtccatacaaaatgccctccaaaccccggcagagccgggaaaaatcagatatagtataccaccatctttccctccttgacaaaggtcttttacgggggctataataacggcagaatcaaatagagttttaccgctggggcgggcctttgccggcttggcccaacggcggtgagatccgttggaagcgtctgggagaccaggcgtttttggcggatcttttttatgaaatatgggggatattggtatggaaaagagcgaagaactggcgcagattctcacctgggatccgggagaacgagggcttttgggaaaattgcctctggccgatctgaacgccatggtagacgagatgatagacgcccaaaaggtgatgatcctcaccggatttcccgtggcggcagctgaggtgggggagaccgacggcccggtgggagcggcccatattgcccatggcctgacccagctgggcaaagaagtgacggtggtcaccgaccggtggagtatgcctttggtggaagcggcctgccgccacagagcgcccggggcctcctgccgctgtgtagagcaggagcgggccagagaggactgtgaaaagctcctttcggaaaagcccgatctggtcattgccatcgagcgccctggcaagggagaggacggccactaccacaatatgcggggccaggtgattgaccatctggtggccgacaccgatcttctgctggaaaaggctccccgctccatcgccattggcgatggaggcaatgaactgggcatgggcacattttcccggcagatccgggagggcgtgccccatggggaaacgatctgcgccaaggtgggggccgatcatgctctggcctccggcgtgtccaactggtggggatggggtgtggaagcccttctcagccgccgcaccggccggtggctgctccctgatgacgagcaggaaaagcagctgctctctcaagtggtagaggccgggggcgtggacggcgtcactggaaaacggcagagcagtgtggacgggctgagtctggatgaaaatctccaggtgcttcgccggctgcgccaggcaatccagccggttcaggcggcactgtaaccgaaagagggaaggagcgggacagatgaaactggaagaaatgggcggcctgacgcctcaggaagtacgccaggtcattcggcgaggggagtatgacggtcccacagcagggctgtgcatgggatatgcccagtgcaatctggtggtgctgcccaaagagcacgcctacgactttttgctttttgcccagcggaacagccgggcctgcccggtactggaagtcagcgaggtgggaagccgcagcttatcctttttggcacaggatgtggatatcgcccgggattttccccggtaccggctgtatcggaatggggaactggccggggaatacacccaggtggaggaactttggcgggatgatctggtgagttttctcattggatgcagcttttcctttgaagcggccttgctggaggccggagtgccggtacgccacattgagcaagggaggaatgtgcccatgtaccgcaccaacatcccttgtcatagcgccggggtttttcatgggaatatggtggtgagtatgcgccccatgcccccgtcccaggtggtgcgggcggtgaccgtcaccgccgccatgccccgggtccacggtgcgccggttcacatcggttctccggcggagatcggcattgcggatattacccggcctgattacggccaggcggtggatatcgcccctggggaagtgccggtgttctggccctgcggcgtcacccctcagaatgttctgacagaggccagactgccctttgccatcacccatgccccagggcatatgctcatcaccgacatcaaaaacagccagctgaaagactgaatcaaaaaaagagcgccgaaaattcccgatgctctcagactgttgggaaatttatttggtcagggagaagaagcagccctacccctcaccaatccgcaaaaagttgtgaccagtgcgcaactttttgcatttctcaaggggccagtgtgcgccaagggcgtgcatgcagccccttgcaaaaattcgaaaaagtgatttgagccactttttcgacgcagcaatagcgccgaaaatcctcggcgctcttgctttttggtaagggttcggagtacactgattgtaatcagaaaaggaggaatgcgccatgctgttcggatacgacaaggaacattttatcacacttcccacacccatccagcatctgcctgccatttcggctatgaccggctgtgagtttttcatcaagcgggacgatatgaccgatctggggatgggcggcaataagctgcggaagctggaataccttttgtgggacgccaaaaggcagggggccactttgctgctcacctatggcggcgcccagaccaatcacggccggctcacagcggcggtggccgccaaatatggcatgaaatgcgccattctttgcctggacgatcatccggaaggcatcaatgccaatattttgctggaccggatcatgggggccgaggtatgggtcaagcccagcgatggctccgacgaaggagaacagaacagactctttggccagcaggtgagggagtactatgaagagcagggagaaaaggtctatgagatcccagtgggcggttccaacaccgtgggactgcggggatattttgagtgcgccctggagatgaaggatcagctggcggagatggatctttctccggactatatcgcctgcgccgccggaagcctgggcacctatcttggacttttcatgggggcacggtatgcagggctttcttctaaagtgctgggggtggccatctctccctttggcgaggccaaggagaagcggctgatggaatattaccgggaagcctgccaggagttcggtttgccggaagatgccaaacgggaagatttcctcattgaaaagggctatgtgggagaagggtataactcagtggacgagagggcccgccaggccatttacaccatgggtcagaaggaagccattttgctggacccctgttataccggcaaagccttcggcggccttctggatatggcggagacgggaaagatccccaagggcagcaaggtgctcttcctccacaccggcggcacgccggccctttacaatcccaagcaccgcagggctatggagcaggagctgaaagagggcctccacctgctgtaagaaaggggaaaacagatggagttggggctctgtttgaccctgtgcgccttgggaggtgccttttggattcccgctttggtattgacttttattgcggcaaaaagaaggagaaactgcactgcgttggcccggggcgtagtggtggatatcaaaggcagaagcacttccgacggactgaccttttatccggtgtatcaatatgaagcggaagggacggtgtgtcaggggaaaggggcgggaagatcccccatgcctttgaaaaagggggacgcgatcacggtttgttacgatccccgccgccctcagcgatcctatatcaaagggtatgatagcagagtatatcgcgtactcagtatctgctttttggtgatgggggccatacctattctgatctgcctgggcattgcattgctgaactagaaaaccccggccagatcagtgtgaagaaagaagagaaaagggaaaacttttgctttatttttcaccaatccgcaaaaagccgcgacctgtgcgtggctttttgcactgatcaaggggccagtgtacgccaagggcgtgcatgcagacccttgcaaaaactcgaaacagtggctttggccactgtttcgatgcaaaaccccggccggaattttccggccggggttttttgtatgagagaggggaagagggcatacacttcttttgaggtgatgggatgaaaatgctgtgggcaatgctctttgtgtgggtggtgggaagcgcctcccatttcttttacgggtggtcgggagaaaatcccctggtgggactgctgtttgccagcagcgaaagcgtgtgggagcacagcaagctgggattctggccactgtgcctggcgattctgtggctgggaaagggagcgggggcaaattggagtacattggcctgggccatggcctgcggcactttgttttatctggtgcatcagatcggggctttttatgcctataccagcgccctgggcatcacaagctgcctgccggtggatatcctgatctatctgctggcttcggccggaggtctgtggatgggatatcggctcctgagccggccccggcctttgtggcagggggccttgggagtggggattctgtgctttctggccctttctcttctggtgttcaccagggaaagccccgctctgcccttgttctgggacccggcaaaaaaataaaggcccccatgggcctttatttttttggttccagcagtccccacagggccaggagcaagccgatagcggccagagcgatggacagataaaaaaatggcatcagccccacataagaaagccgccaaagagccagggagcgggcggaatcattggtcaattcggtagacagcgtcccggccagaagcaaagcgacgctgagaaaaccggaagcaaacaacgccgaaccgaagatcacttttttcatccaaggcacctcctgaaagaatggagagtcaatcgctgtgtttttgctcttctttttccttttccagctgttccaggccccggcggatcagttcctgggtggcggcggaacggctggggtagcggttttcaaaacggaaatcgtcgatccggcgcaaaagctcctgatccacgatgacggtatagcggggtttttctgtgggcatggcattccctccttgagttttatgatacaaaggttcataggttctgtcaagcagagggttgacaagttcagaactatagagaagggattgccatgaagaaagagaaaaagaaattggtcttttccctgtctcccgatttgcagcagcaggtctggcagatcaaagaaaaacagtttccacagcattctcaggcagaggtctttcgcagtctgattcgcctgggcctgggggagtcttcccagaagaaggagggagaaggcggcaaggaattgacttaatactgtaaaacagcgtataatgtctctgattatggaggaaatgctatggcagagatcacagtcaatcaactgaacaaatattacagcgattttcaccttttggaggacatttcctttgagttgtactccggccagcgggtgggcatcgtaggccccaatggctgcggcaaaaccaccctgttcaacattctcatgggcaaagagggctacgacaccggcgaagtgaacatccgggatggggcccggatcgcccttttggatcagctgccggaatattcgcccgaggtcaccgtgcgtcaggtgctcatgcaggcctttgaggatatcctgaatatgggggaaaagctgcggcagctggaagggcgcatggccgaaggcacagccactcctcaggagctggatcagtatgcccggctgcaaaccgcctttgagaccgccgggggctatgagctggaggtcaaatacaaccggatgacaaatggcctggacattcctcccgaaatgcaggaacggtccttcatgagtctgtccggcggggaaaagacaagagtcaacctggcccgggtcattttgatggaaaccgatatcctgcttttggacgagcccaccaatcacctggatctccattccattgagtggctggaggaatacctcaattccttcaagggggccgtgctcatcatctcccacgaccggtatttcctcgaccgggtggcccagaagatttttgagatccaggagggaaagctgacggtttattccggcaattatagctattatgtggataaaaagcaggagctgatggagcagctggaagccgccaaacgccgccaggacaaggagattgcccgtctcagctttaccgtggagcggatgaagggctggggcatgggcaatgccaagctgatgaagcgggcctttgccatggagcgccgtctccagcggatcgagcgggtcaagaccattcgccaggaacacaagatgaaaaaccgcttcaaagaagcgggccgttcgggggacgaggtctatcagctctccggcctgcaggcgggttatgaccatcccttccaccagcccttggacaagatcatcctccggggcgaacgggtggcggtgatcggggacaatggctgcggtaaaaccactttggtcagcacccttctgggcaagctgcctccctttgccggccggatctatgaaggggccgggctgcgggtggggtacctgccccaggtggtggagtttgcccatccggagcggaacatcctggataccatgctctatgagaccaacctggatgtgcaggacagccgggatcggctggcggcctatggctttcagggggagacggtgttcaaggaagtgtcggtgctctccggcggggaaaaggcccggctgaagctgtgcatctttatgaacagcgagatcaataccctgtttctggacgaaccgaccaaccatctggatatcctcacaaaggaatggattgaggatgccatcgacgacttcagcgagaccatgattttcgtttcccatgaccggtattttatcaaccggtttgccacccggatctgggcctttgaaaatggagagattcaggattatatcggcacctatgaggaataccagcaggccaagaagcggcagcaggcccagatgcagagcatgatcccggaaaaaacagaaaagccggagaaggcggagaaaaaggaaaagagccgcagcggaggaaaagagacccgggaaagccggaaaatgcgccgggaagtggaaaagcgcatcggggccttggaaaaacggctggaagagctggaaggggaaatggaagagtgcggcagcgatcatgtgcgcctggccgctttgtatgaggaaaaggaagaggcggaaaacgagcttctggagctttatgaaaagcaggaggagcttgcgcttttggcggaggaataaaccatgttgcagattgagcattttaccaaagaatatggaaacaaaatcgcggtgaacgatttgtccctggagatccgctccggggagatcttcgggttcatcggccacaacggagccggaaaaaccaccaccatcaaggcggtggccggcattttgccctttcagaagggagagatccgggtggacggcatttcggtgcgggaaaaccctctggaatgcaaaaaacggatggcctatattccggacaatccggatctgtatgagtttttgtcagggattcagtatctgaattttatcgctgacattttccaggttcccaaacgggagcgggaagagcggatcggcaaatacggggatctgttcggtctcaccggggatctgggcagcacagtgagcacctattcccacggcatgaagcagaagctggccctgatcggtgcgctgattcatgagcccaagctgcttttgatggatgagccctttgtggggctggaccccaaggccgcccacgatctgaagatgatcatggcggatatctgccaaaagggcggcgccatcttcttttccacccatgttctggaagtggcggaaaagctgtgtcacaaggtggccatcatcaaggaaggcaagctggccgcctgcggtaccatggaagaagtgaaaggggacgaatccctggaacaggtatttttggagctggtggacgatgagaaatcttaaaatattgctggccatcaagctgagaggggcgctgcatgcccccgggcgtcggggaaagaaagcctctttggggcggaagatcctcatgggcttcttgttcctttatgtggtgggagtgatgatggccctattcggcgccatgaccgccgggctggtgtccagcctggagcctttgggcttgtcctggatggcgctggccgtgggggctttttcttccgctgctctttgctttattctcacggtgttcagcatgcagtctcagatcttccaggccaaagacggggatctgctgctgtctttgccggtgacgccgctgcagattgccgccagccgtctgctcagtctgctggtgctggaatatgcctataacgccttggtgatgatccccaccgtgggcgtctattgttatcttgtgcggccgggactggccttttatcccatgctgttggtgcttcttctggcactgccgctgctgcctttgtccctggctggggctgtggggtatctgctggctcagatcgggcggcttttgggccagggcaaaaatatcatcatgctggtgctcaccactgctgcatttctggtctatctttatttctgcatgaatctcaacagctatatcaccctgctgattcagcggggagaggagttgtcccatgtgttccgcaaggccatgccgcctttctatcattttgccattgccttggagcaggggtctctttcttccttcctatgggcggtgctgtggggaatcctgccagccggagcatttctgtggctggtgcaaaagggatttttggatctgcggagtacatccggcgtcaaggcggtttatcggaagaagcctttgcgggtcagccgcccctggatggcggtgtgccgcaaagagggcgcccggcttttgtccatgcccacctatctgtttaactgcggcatcggcgctttgctgatggtggccatggcggcgatggtggcctggaagggcaccgatgctttgcaggctttgggggcagtccctcagattcaggagctgattgcaccggcgctgatggcggcgatgtgcttctgtgccgccactacctgcaccacatcccccagcatttctctggaaggagaccggctgtgggtgctgcgcagcagccctctgtctccccgggatgtgttcttagggaagctggcagttaacatgatcctgcttctgcctgctgtggcgatcagcgtgatcattctggccttttccgcagggctttcgcccttggatctggtgctgcttttcctgctgcccagtttgctggggctgctgattgccttgtttggcctgtatgccaatctgctgtggccccggttggattacaccagcgaaaacgccgtggtcaagcagagcgccagcgtgatggcggccagctttggcggtatgggggccatactggcgttgggtctttgctattggttcctggcccggaaggtgatgagctaccacatttattgtttttgtgctttggcgctgctggcattgggatgcatcctgctttggcggctgcttctgacaaaaggcgcgaaagagtacgaacagctttgaaaaatagatctctttttgagttgacaaagcgggaaaacaggattatgctgaaaaagaaaacaaaataacgaaaccgttgaagcggagataacggcaatgatgcctttacagagagcctggggagctgagagccgggtgagaaacaagttgtcaaatggaccgctgagggcgcagtcaaatggagcagatctgctccagagtattctgcgacgggaaggcatccgtcagttgccggggatatgttggtatcctgcaaagtgcatagggtctcctatgaatcaaggtggcaccgcggataagatttttattcgcccttgacagaacatcactctgtcaagggcgttttttcgttcctttggcagaaaacacagaaaaaaggagcgatggaaatgagcaaaatcattttgacaggggacagacccactggccggctgcatttgggtcattatgtaggctctctgcaccggcgggtgatccttcaggattccggggagtatgacaagatttttattatgatcgccgacgcccaggcgctgacagacaattttgacgatccggaaaaaatccggcagaacatcattgaggtggcgctggactatttgtctgctggactagacccccgggtttccactttgttcgtgcagtcccagatcccggaactgaccgagctgactttttactatctgaatctggtcaccgtttcccgcctttatcggaatcccacggtgaaggccgagattcagctgcggaattttgaagccaatattccggcaggttttctttgttacccggtgagtcaggcagcggatatcaccgctttccatgccaccgatgtgccggtggggcaggatcagctgcccatgttggagcagacccgggaaatcgtgcgccggttcaatgccatataccagcccattcttacagagccggaggctcttttggaagaaaacagcgtttatcagcggctgccgggcaccgatggcaagaccaaaatgagcaaatctctgggcaactgcatctacctggccgatccgccccaggtggtggaggaaaaaatcatgaatatgtacaccgatcccttgcatgtgaaagtatcggacccgggacatattgagggcaatacggtctttacctatctggatgctttttgccgcccagagcattttccggagtttctgccggagtatgagagcctggagcagctgaaagcccattatcagaaaggcgggctgggcgatgtgaagatcaaacggttcctcaaccggatcttgcagcaggagctggagcctatccgccggcggcggaaggaatacgaaaaggatatcggggcagtgtatcagattctgaaggagggcagccagaaagcccggaacaccgccggggccacggtggatcaggtgaaacgggccatgcggattgactattttcaggatgagggactgatcaaagcccatatggataaatatgagaacggaaaccgctgataaaaaagaaagagccgcccctgtgatgaacaggtccagtaaaaacggacagtgacaaaagaccccctgatgtaggaaaat

SEQ ID NO: 3410 - DNA, 32759 bp, Unknown
  16S sequences of unknown bacteria
tggcaaagaaggtggtaaacagcgcataatcccagaaggagcggaagtaccccgcctttccccggctgtgatcccagaggtagccgatcagcgtggcagtatagacaaacccgcccagtgaggctccggggctccagtgggaataggccatcacgaggatctggaccaccactgctttggcagcgaaggccagataccccaccggcttatccggacagcgggcaagatagagctccagaaagctcagcagcacaaaatccagcaggcagttcgccgccaggatcagtgccgccggaacacttgccagcagataatagcaccaggagagcagcgtcaggcaggccacccggcgatgggcaggcgtcagccggaatataatgatcgccagcggcagatacagatagataaagctgatgctgctgaatgtcatgccctgctctcctttcttaatcgttttttatgatagttcagcgggccggatcggctgcggactcgtcctccgcacggatctccgccgcaagtttcagaaactcctcatagctgagaatacatcccagcactcctaccagggcgttggtgcccaggtgttccgggagccccagtttcttcttgagccgttcccggagccgggagctgtttgccccgcccgaaaatccctgctccatcaggtcggtcttggtgatgcggcgggtctgttcctctgccggctccgcaaatacaccggcctgttccagcgccttgcggatcacctcggcgggcaccccttccacccccagctttccctcggcagagggcttgtccttgcgcttttccttgccgaaaatatccgggatataggcgttgatgatctgctccttcggaatgctgccgcccaggtaccgtctgatccggaatccggctgtatcggaatcggtgaggatcaccaagccctgccgccgggcgatttcccggagcattgccagcttctccttatccttgaagatccggaacccgccggtttctataatcactgcatccagtatggacgccagctttgccttgtcataccgtccttccaccacgacggcctgcctgagatggatcatgctctctcctccccgagcagcaggaacagctcggtaatggttttctgcagaacgattttctcatcgtttccggagctcttcagctcaaagtctgcccgggccagtacctccagcgcccggcgcaggaactgctggggcagcttccggcaatcccggaaggcgttgcgcatggcaaactccctgcccttgtagccgaaatccgctgcggctttggaggtttccaccccggcggaaatagcagctctggcccggctgagatccacaaaggacatactcagcacatagaggatattcactgccggctcccgcagatagagcagcgccgacagaatcccctgggctttggcataatcccgtgccaggatcgctttggacagactgaacacctcagcctccacagtggcgctcaccaggcggtctatggcctcccgggatacctctccggactgtgtaaaggcaatgagcttgtcagtctcattctgcaccgcgatcagctcaccggtggtcttggataccagccaatcggcgttttcacgggaaatggtacagcctgccgcagcgcagcgcttcatcacgaaggctgccagatccgccgcactgcgctcccccagctctgccgcaatgcccagacggtccactgcctccagcagcttgcggcagcggctggacttcttgggcaggaactcattctgcttgatggcaatgatgaacaccgtcggctccacagcatcattcagaatctggagcagcttgtccagatccccggcagacagcttatcgatgtccggatcgtccagcatcactgcccggcgctctgccatcatcggcagggtcaggatgctgtcatacagatggtcgaagtcgatcttggctccgtccacccgctcatagttgaaggtcttatcccctttaaccgcacggtccacaatcagggacgcataccgctccaccaagtaacggtcacttccgtagagcaggaaaacccccgatggcagaccggtgcgcagggcacgattcagttccttttcattcatctgcgccacacgcagtccctcctatgtccagaacagcagttctgtgcgctcggctgtgttttcccggacccggatgcctcccgcccggtagacctgtgccttctgctccggcaaaagcagaacatccggctcatactgttttattatatcataaacatcctgaaactttaagagcaaaatatcgctgcaggaaacttccacgcccactccccgctgatagcgaagctgaaggtcccccggcagcaccgcttcgatctgttcccggctggtgattggcgcgtcacagaccgcttcgagatagctggtcactgcaccgctgtccggagccgcaatctgcagcggaggatattcccgcagcaattccagcgttccctcggcctgcagcggcgcatagctctccacaatgagcagatcgatctgctctgccccattccggcggagctcctccagcatttcactgtcccggtctgccagcagcacaaccgcatggccatcctgcagcagcataagatcctcgccccgggagatcacctgcacggaaccggcgagttcccactgctcccaggtgatcagcaggcagcagatggaggcgcctgccagcatagccggacggaagaaccgccgggccaccggcaaagctgttattaccaccagcagcagggtcataagcaggacaaccgtcctggaaaccggagtatccagcgggaaaatgaacggcagcccggagaaccaaccggcaatccgcaggaacaagctgcccagcagtctggcgggaagcaccagcagacctgcgccctccgggaacagccagagtgccggaatcagcagataccccagcaggagcatgggcgtcatcatcggcaggatcagcatacccgccacaatgccgttgagaaccaggcgggaatccatatccgccaggatcgggagagtcagacactgagctgcaacagcacaggcaagcagatgaaccaggctgctgccgactcgtccggtgagctgcgccggaaggtggctcttgagaaattcggcgaggggacgctcatagagcaggattcccagggtcgccagcaccgagagcaggaacccataggaaagcacggcaaacgggtccatcagaatcagcaggatcacagcgagtccgagactgttaaggctatcagctttacgcccgattacacgaccaaacagcagaactgagtacatcactgccgcccggagcactgcatggttgccgccggagagcagcaccggacaccacaggcacagcagtgccagactgttgcgcagccggcggcgcagcgggagcacccttgtaagcgccaggatcagatggcagaacacagcgatatgcagaccggagatcgccagcacatgatagacaccggcgtccttcatcatctgcaccgagtcatcaaatcccgggcgcagtccggtggtgatggcgctgaacagattgccggtttcggctcccagggcatggatcagccggtcacttgtttccgcccgcagtctggctgtcacagcacggaccgggtaaagcgacttatccagcagttcgatctcttcgccggtggcacagaacaggaatcggctctccccggcagaggagcggtactccgatgtatagggatcatcgtaggtcacacgggctgtgcagcggaaactgtcccctgcttccagttcatcggacagtgcgttccagagcgtgaatttaatatgctccgcactcccggcttcggtggatacagagccgtatgcttcatacagatttccgcttttcttctctgtgacaacgccggtcacctctgcggtctttccatccagcggtttgagttctgattccagggaaaggctgactgacagcatcagaaggatcgaagcggcagcactcagggcacagaccgcagcctttctccagcggggatttgctgcccggtccgcacagaacatcgctgccgcaagcagcaccggaagcagcagatagcagtatatatttccatacaaaacgaccgctgatccgagcagaacagcaattcctacatcgaacagcggtcgtttcatgacagtatttcccctttagctcacagattcacagcttacttgaagaagagcgggagttcacccaggaaggtgacatcggtacgctctctggcatcgccttcagccaggacagcgcacttgccggcaatcacaccgccggacttctccaccaggcactccagagcgtgcatcgactcaccagtggatacaacatcatccacgatgaggatgcgcttgccgcggatctgctccatatcggtgctgtccaggtacagggtctgcacctgagcagtggtgatcgacttcaccgaaacggacacggggtcatgcatatagagcttgatgctcttgcgggcaaggatatacttcttgccggactgacgggacatttcgtaagccagcggaatacccttggactctgcagtgatcagcagatcgaagtcacccacacgcttgagcagttcctccgcgctgcggattgtcatctccacatcaccaaacattacaaagccggcaatggacagattgtcgttcagcgggcagatgggcaggtcacgttccagaccagctacatgcagcttataagtttccatcttttacttctcctttttattaaagcagaaagctgcccatgcgaatccttgcacaggcagttgctgcttttctgtatggtttttactgcgccggagcctgatcagcaggcaggccaggccagttcctttccgcccaggatatggaagtgcagatgcggtacgctctgaccgccgtccgctccgatattggatacaacccggtatccattggtgagcccctgctcctttgccaccttggcgatgacagtgaagatatagcctaccagttcacagttggaagcatccactgcatccaccgactggatatgctccttgggaatcgccagcagatgcaccggttaatatccttgaataccagaacccggtcatcctcgtatacctttgcggacgggatctcccctgccgcaatcttacagaacagacaatccataattcttgctcctttccggaaaactgtatctatacagtctgtattacgaacggcgcttgtgagaacccagcatcttctctaccaggctgggaatctgtacaaaggcctcatcgatcttgaagatgtcgctggcaccgcccattgcgctgtccggacgaccgccgccgctgccgcctaccagcgaacagatctccttcaccagctgaccggcatgaacgccatcttccactgcgctcttaccgcagcttgcagcgatggaagccttgccgtccagagtggtggagaatactgctacgatgctgggatcggtatcacggaaccggtcggtgatcttacgcagaatatccggcttgatgccgttgaggcttgcataaaccagctttacagaacctacttccacagcagtgtttgccagagcctgggtctgcatcgaagccagcttgccgttgatctcctcgatctccttgtccttggccttgagctcagcggcaacagcagcagccttgccgggcagttccgcatggctgcccaccttcagggcctcacaggccatgtccatgagatggcggtctgcgtcgatcagaccgagtacgccacgaccggttacagcctcgatgcggcgtacgccagcggcaatggaggactccttcacgatcttgaacaggccaacccgggaggtattgtccacatgggtaccgccgcacagctcgatggagcgtccgcccatatccacaacccgtacagcatcgccgtacttctcgccgaacagagccattgcgcccttggccttggcctcgtcctgggacatggtctctacggtaacaggcagagctgccaggatcatatcgtttacaatgttttcaacacgggcaatctcatcggaagtcatgtgcgagaagtcgaaccggcagaggttctcatccacataggagccggactggtgtacatgggtacccagtacttcccgcagagctgcctgcagcagatggcaggccgaatggttacgcatgatggaatcccgacgcaggctgtcgatttcagcagtgagctcatcgcctacccggatcataccggccttcatctcaccgatgtgcatgaagtggctgttgaccgacttcttggtatccagtacctggaaggtgctgttggcgccaaagaggataccgctgtcgcctacctgaccgccgccttcgccatagaagcaggtgcggtccagaacgatgatgccgctctcgccctcatcgatctcatcagccagagcgccgtccttgatgatggcagctaccttggcagtgcaggtcttatcggtgtagcctacgaactctgtgttgccggggataccctgcagcacatcgccttcccagcccaggtcacccatggctgcacgggcagcacgggcacgctcccgctggtcgttcatgaacttggcaaactgatcctcatccaccgatacaccacgctcaccggcgatctccatggtgagatccagcgggaagccaaaggtatcgtacagcttgaaggcctcagcgcccgagagaaccttgccgccggcaatctcctggctggcgatccggtcgatcaggtcgttgagcatgctcataccctggtcgatggtcttggcaaagcgctcctcttctgccttgatgatactgatgatgtagtccttgttctccagcagttccggataagcgggctggttctcctggattacagtttcagctacctgatacaggaagggctccttgatgcccagcagacggccatgacgggcagcacggcgcagcagacggcgcagtacatagccgcggccttcattctggggtacgatgccatcgccgatcatgaaggtggtgctgcggatgtggtcggtgataacgcgcagcgatacatcgctcttttcgtttgtcttgtactcaacgccagcaattcggctgatgtgcttcatgatgttctgaacggtatctacctcgaagaggttgtctacaccctgcataacgcaggccagacgctccagacccataccggtatcgatgttgggatgctccagaggagtgtagttgccgttgccatccgagtcgaactgggagaataccaggttccagatctccatgtagcggtcgcagtcacaaccaggagcgcagtccggcttgccgcagccatattcctcgccgcggtcgaagtagatctccgagcaggggccgcagggaccggagccgatctcccagaagttgtcgtcccggcccagacgaaccatgtgggacggatcaatgccgatctccttggtccagatgtcataagcctcgtcatcgctctcaaagatggagatgtaaagacggtccttcggaatctccagaacctgagtcaggaattcccaggcccaggcagttgcctcatgcttgaagtagtcgccgaaggagaagttgcccagcatctcaaagtaggtgccgtgacgggcagtcttacccacacgctcaatatccggggtacggatgcacttctggcaggtggttacacgctttctgggcggagtcttgatgcccaggaagtagttcttcatcggcgccatgccggagttgatgagcagcaggctgttgtcatccttggggatcagcccgaaggacggcaggatcagatgtcccttgctctcatagaatttgagaaaagcctcacgcaggtcatttacgcctgtccatttcataatcgtttgtccctcctaaagactctttgcgaacagaaaataaaaaaagctcccgtcccagtctgggacgaaagctgtcggtttcacagttccgcggtaccacccaaattgcaccggagatcttcctccgctgcctcttgaagccgatctaacgcatcggatacgccagtattcctcataccggagctcggggccggcccattgccatcgcttccaggtccctttcagccaggaggaccctctctgaagcagcggtcagcaaattctgcccgtcaacgctgtgactctattcgcattacaagattcagtatagacagtctgacggaagttgtcaagatttttctgcgattttgccggaaaagaagccctctttttcttcggtactccgccattgtgcgtccgctctctttatgttacaataaaaccggatatgaccccgcttatttttgcgaaagaggtgctttggatatgaagaaaaatctgcttgtggcacagtccggcggccctaccgctgtcatcaatgccagcctgtgcggcgtgatccgggaaggaatgcgccatccggaggaaatcggtatggtctacggtgcggtgaacggcatccagggaatcctggaaggaaccatcatccgggtggacgaccagtttgagactgccgcggactttgagctgctctgccacaccccctcctctgccctgggctcctgccggtacaagatgccctcgctggacaagggcccggaacagtatgccaagattctggagatgttccgcaagtacaacatcggctactttgcctacatcggcggcaacgattccatggacaccgccaacaagatcgctgactactgctatgggcacggcgaggaagtgcgggttgtaggcgtgcccaagaccatcgacaatgacctgcccatcaccgaccactgccccggcttcggttcggcagccaagtacattgccaccaccctgatggaggtggcagcggatgccgaagtctaccccatgaagtcagtggtgatcgccgagatcatgggccgcaatgccggctggctcaccgccgccgcttcgctgacccgggaagtgggcggcagctatgcgccccagctcatctacctgcccgaggcagtctttgacccggaacagtttgtagaggatgtgcgccgggaactggacaagcgtgacactgttgtgatcgctgtatccgagggtgtgcgtctggcagacggcagctatgccgccgagagcatgcagagcggtcaggtggatgcctttggtcacaagtacctggctggcgtcggcaagtacctggagcgcctcactgccgaccgcatcggctgcaaggtgcgttcgctggagctgagcgtcatgcagcgggcagcggctcatctgcagtccgccaccgacctggaggaagcagtccgggccggtgaaaaggcggtggaagccatgctccggggcgacacccgcattatgatcgcctaccgccgcatcagcgacgccccctaccgcatcgcctatgagaccgctccgctgggagaggttgccaatgtggagcacaagatcccccgggagtggatcaatgaggccggaaacgatgtccgggaagaactggtgcgctatcttgcgccgctgatccagggcgaggtgtcggcacccatgaaaaatggcgttcccatgcacttttcctttgacaagacccggctggctgactgaggttctgcaggatttctgaaaacttttttcaaaaaatcccttgacaaatccaaaaagccggagtatactggcaaccaagttgataaacaccaaagacggtgatgaggagagtactcctgccgtagcagttacagagaacctcgggagctgagaagaggcgctgcgaatcaggacgaaaatggcctcggagttgcgtaccgaactggcatcagtaaggctacgacgggtttgcccgttacagcaatagagtataatccgggatttcccggccgtacttgatgaggttccggatgcgagtccggaacgaaaaaaggtggtaccacgaagcgatttgcctcgtcctttgatcgaacgatcagaggacggggctttttatttccccgcgaaatctttcagaggtgacagctgctatgataaccattcaaaacctgaccaagacctatcatacaaaatccggtgaagtggaagccctccggggcatctccgccgagatccgggacggagatattttcgggatcatcggactttccggcgccggcaaatccaccctcctgcggtgcatcgccctgctggaaacccccacttccggttccatctccattgacggacgggacctctcctccctccggggccggcagctcactgaacaccgccggcagatcggcgtcatcttccagggctacaacctgctgatgcagcgcaccgtttccggcaacatcgctttcccgctggaaattgccggtgtgcccaaagcggagatccgccggcgcaccgaggagttgatccatctggtggggctggacggcaaggctgatgcctatccctcccagctctcaggcggacagtgccagcgggtcgccatcgcccgggccctcgccaacaatcccaaagtgctgctctgcgatgagcccacttcggcactggattccttcacaaccaaggcgatcctggacctgctttcggacatcaaccagaagctgggcgtcactattatcatcatcacccacgagatcggcgtggtaaagcagatctgcagccaggtggctgtgatcgaatccggtcgcttcgcggaatatggcgttgctgctgaagtgctggctgctcccagaagcgtagccgcccggcagcttatcggagttggaggtgcattgtaatgaacgaactgattgccagatatgctcccctgctgctgcagggccttgaggaaaccctctacatgaccgtcttttccacggtgcttgcctatgtattcggtctgccgctgggtgtgctggtctatgtcaccaaagacggcggcatccatcccaaccgcccgctcaaccgggtgctgagctggttcatcaacctgatccgctctgtccccttcctgatcctgattgttgcactcaatcccatttccaagctcatcgccggtacttccatcggccccaagtcctccatctttgccctggtagtagctgctgctccctttgtggcccggatggtggaatcctccctggaagaactggacaccggcgtgatcgaagccgccaaaaccatgggcgcttcggatctgcagatcatcacaaaggttctgctgccggaaagtgtcccctccctggtacggggactttccatctctgccatcactctgattggctattcggctatggccggtgttgtaggcgccggcggccttggcgatatagcaattcgttacggtgtgcaccgctacgaagactccgtgatgtatattacggtgatcctgattgtcgttgtggttcaggtgattcagtccacctttaacctcaccgccattcagatcgacaaacgaaaccggtaggaacttccggatctttcccacaacacggaaatccggtcctgcttccccggactgcaaagctgtaactaaaaaagaaaagaggaattttccatgaacaacaccaagaagatcattgcactggctgctgccgcagctctcaccctttccctggctgcctgctcgggcaacaactccagctccaccgccgacaattccagctccgatgcctccagcaccgtgatccgtgtgggcgcttccccctctccccatgccgagatcctggaattcgccaaggatcagctcgctgccaagggctatgaactggagatcgtagagttcactgactatgtaatgcccaatgtcgccctgtatgaaggcgatctggacgcaaacttcttccagcacaccccctacctcgataactacaacgagcagaacggcaccgatctggtttccgcctgcaaggttcacttcgagcccatgggcctctactccgagaccctgaccagtgtttcggatgtggcagagggttccaaggtcggcgttcccaatgaccccaccaatgaagcccgtgccctgaacctgctggaagcccagggtctcatcaagctccgggaaggcgctggcctgaacgccactcccctggacattgaggaaaatcccctgaacctggaattcgtagagctggaagctgctcagctccccagaaacctgagcgagtttgccattgctgccatcaacggcaactatgccattgaagccggtatcctggacaaggtcatcgtcaacgaagccgctgattccgaaagcgcccaggaatatgccaatatcctggctgtacagagcggcgagctggagaccgacaagaccaaggctctggtggaagccctcacttcggatgaaacccgtgagttcatcaatacccagtatgaggatcagttcattcccgtattctgattccccgaaataccaaaaagcccggacagattgtccgggcttacttattatatataataggaagcggtcagcggtttccggcgatatactcagcccggaacttggaatagagaatcttctgggcgccgtacagactgcagtaccccgacagcatataggagaccgcacagcacagtgcatagagcggcagccccgctccgccgaacagctcataggccagcagaatggaggtgagcgggcagttggtcacgccgcagaacacccctgccagccccagacccgccccaaaggaggcgggcagtccgcagaccggcgccaggacacagcccagcgtagcaccggtgaagaaggccggtgcaatatcccctcccttgtacccggctccaagagttacggaggtaaagaggatcttcagcaggaaggcctccgggcgggcttctccggcaaaggcctggatcacgacatcggtgccggcgccgttatatgcctgggagcctgccagaagggtcagcaaaatcagcagtccgccgcctgcgaggatgcggaaatagggattcggcagcaatctgccgtaagcatagcgtgcaaagcgcagtccggaacagaacagccgggcagccagggcacaggcggcgcccatcagagccacctgcccgatagaaaccagcgacaaagctggcaccgccgcaacctggtaggcatcagccggaagccccatggcgctggtcaccaggaaagagcagaaggcggagagcagacagggaaagaacgccgcatagtacatctcccctacgctgatcacctccatggcaaagacagcagccgtcaggggcgtgccaaacagcgccgaaaaacctgccgccatgccgcacatggtcataatgtggcagtccttctcgtccattcttgcccactgtcccagcgccccggaaatggagccgcccatctgcagagctgcccccatccgtcctgccgagccgccgcacagatgggtcagcaccgtggatacggcaatcagcggcaccatgcgtagctgtacgccgggattggtccggacagacagcagcatatagtccgtgcccggatcggtactgaggccgcaggagcggtacagccatacaatgagaagccccgccagcggaaccgcaaacaacagcgccggatgctgggcccgggactgcaccgcccaggaaacagccatgcggaacagtccgatcaccgttccgacgctgcctccgatcagcagtgcggctattgcccaccggataaacttcccgacctctccggctcctgtatgtactgtttccactgcctgatgcttcagctttgccatttctgtcctcttgtccgacatgtgccgtcctcctgtcgcagcagcctgcgggccgctgtgcattctcggctattattctaccattccgaacccccggtttcaacggatttctgagaatcccgccccggctttgttcccacaaaaaagccccccgcacaggcggagggatcagggttgctgctatcgcttcaggatgcggatgtcgttgcccaggaacgggatcgtataatacccgcccatgatccgggaaacaacacggggagaataccgggcttccagctccttggcggtcaggttgctggaaataatggtgggctttccttcgaccagccgggagttgatgatattgtagatcaccgacaccgagaagttggtggagaactctgcccccagatcgtccaggatcagcagatcgcagtccagcacaaagttgagggaatagctctcctctccccggcggaaccgctcccgctccagggtttccagcagggtctgagctggtgtgtagaggacattgtaccccttgcggatcacctctttggcaatggacagggacatatgggttttgcccagacctgtcttgccctggaagaacatgctccggctggacggcgtgaaggtgtcggcatagttccggcactcctccaatgcccgccgcatcacgtcccgggcagaggatttcgatccgggcagcggctgtgcaggatagtagtccagcgaaaagctcgcaaaggagatgttatcggtattggcagtgtgggagagccgctccagcatcagccccgccagaagatccttcaggcagtggcacatcttcccgtccgtatagccggtatccttgcagtcttcacaggtgaagtgcatctcgtcataatcctccggcagaccagcctcccggagcagctcccgcttatgctgctgcatatacagattggtgtcccgcagacgggccagcttctgctccacatccactccggacagcacagtccgggcaatggcggcactggtaccggtcagctcccggcgcagttcctccactgccggagccttctcccggatcacctgcagccggtactgatagtcgttccgggcctggctgcgtcgttctgccagggtttcaaacgccttgtccattatctccttgggatatgccatgagtcatctcctcctcaccggttcataaaatctgcaagcacccggtcctcaatctcctggatgttgtaagaggtttcgcctccctgcaccggcgcacggcgggccgacgcattggccgcgtctgccgcagtccgcactccctcccggtgccagttctgaagcactttattgatataggcaaaactgagctttccggtgttctccacggcacgctcataggccagccggatcacatcgatcccatagcccagctctccgtaccaggaggcgatcatctccttttcccgggtggtcaggctgcgatcgttgatgccgaatgccgcccggacctgcccctcattggagtgcctccggctgagatagtcaatgtaccgctctgcctccggaaccgtgtcgattcccttctcctgccagctggcggcggttttctccacatagcgcatgctcagcttatcgatggatttgcagtagcccatcaccgtgaggataaattccggcgacagcccataataggcatagagcgccgtcaggcactgcatatccatggaagtaagcgtgctgccgatgatctcctgcgccttgtgcagcaggctcatcagtgtattgtcccgggcagccaactctgcgcactccgcccgggtgaaccggcgggaatccgccgcgatcacagtacggcggggctcctcccgggccatttcccgggctggagcagcaaccactgacgccggttccggattgggggcagcggcatgttccccgtccccctcggaccggagcaggccgcagttctcccagtagagcgccgcatcccggatgtccgccgggtcctgccgcagaaaggccgcaatctcctggtcggacatagcccggccctggcgcagcaagaggagcagcaccttgagctggagcaccccgcagagccgcagatgctgatccacaacggctgccggcaccgcaaacgccgcccccatattttcaaaattgacactgtatttcaagatccaaccgttcctttccggcacaaacactatgtaaagtcagtttcctttacacttaaaaagtggcctgttttccggctattcacacataaatcaaccggcggccctttttactctcttttatcaggcagggatattatagcacattctgacgggttagtaaattgcagaacggtgtccggaacagttggtgactcagtcacagttccgggtatattcaaacttctctatattgaaaaatttccggaagtatactataataatcttcgtcacaaatcttagctgtgttctttcaggggaatacagctgtcactggtaatccaaaggaggaactttttatggtatatgtttacaagaccaagggcgtatgctcccgtgaaatgactgtggatgtagatgaaaacggcatcattcagagctgtgtcatcaagggcggctgccccggcaacctgctgggtatctcccggatcgtgatcggcatgaaggccgaggatgtcatcgagcggttccgtggtacccgctgcggcttcaagtccacttcctgccccgaccagctctcctatgcgctggaggaggctctggctgctgctgccaaataaatcctttgctttgaatggctcctgtcccttccccggacaggagttttttgtatatcccggaaaaatcctgctccgctctggtaatttccgcctgcttccgatataatgaaagcaagaaaccgcagcggatctgcggaactttgcaggaaagaggcgatatttatgaaaacaatcggatttatcggcgtcggcgttatgggcaagcccatggtgcgcaacctgatgaaaaaaggctttcccgtttccatttatacccggaccaaatccaaggttctggatgtgatcgaagagggcgccgtctggtgcgatgatgtgaaaacctgcgtccaggacaaggatgtcatcatcaccatcgtgggctatcccaaggatgtggaggaagtctacttcggggaaaacggcatcattgccaatgccaagcccggtgcagtgctcatcgatatgaccaccaccagccccaagctctctgaacgcatctatgcagaggccaagccccggggcatttccgccctggatgccccggtatccggcggtgacagcggcgccaaggccggtaccctctccatcatggtgggcggtgaccgggaagcctttgacgcctgccaggatgtgttcgctgccatgggcaccaacatcatctatgagggcggcgcgggcaagggtcagcacaccaagatggcaaaccagatcgccctggctggcgctgttgccagtgtgagtgaagccatcgcctatgcccgccggaccggtctggatgtggaaaccatgctggcaagcatcagcaagggtgccgcaggcagctggcagatgatcaacaacgcccccaagatggttgccggtgatatggcaccgggcttctttatcaagcatttcatcaaggatatggccattgccgacgaagaagccaaggccgccggtctgaccatgccggtactggaagaagtgctggagatgtaccgggaactggatcgccgaggcgaaggtgatctgggcacccaggctgtgatccactacttcgatgaaaagtaactgaccttataaaacaagccgtccgctgctgcacttgcaggcggacggctgttttgttattctgccaaggctccggaggccatcttctccagctcctctgccgcacgctccagacaggcatcccgtcctgtccggaatgcctccagcgaaaccggcacttcaattctgggctggacaccattgttctggatgtcggtaccatcactggcgatctgccgtgagccggaaaaagtgacagcatacccggtgcagagcggcaccaccatgagattccccgtagcgccggcagtatgggtgccgatggtggtcagaccccaggcattggcatagtcagctgtggtatccactgccgaaccgctgaagtgcgaaaacagcaccgtcaccggcgtactgcacttgggaagcccctggaaggggtagtccccctcatccagctcaagcagagcggaaaagtcgctctcttccacacagtaccgtccctccagcatctggctgccggtatcaaacacctcgtccgggaagagctcccgcatattctggagggtctgcccgtcaagccccagccggtacagggtatcggaatccatggactggaaccaggccagcgtcatcaggcgggaatcctgcaactggtaaagcgaactgccccctccggcagtccggatggtttcgtccggcacaaagggcgccagcactgtcataccgttgagagagttcccgcctccgcttgtgcggaaatcaagaatgcaccccttcaccccggacagccggggcaggatctcctgctcatattcctcccggaaggctgtcgggtctgcggttagtgtctttacctgcactaccagaatgctctcctctgtgggcgtgccgctttccagccggtagagcccgaaggcatccgaatcatagagctgctcctccccgcactggaacaccagctgggattcatggcctcccatgtcaaacagtcccagctccttgtaggtatagatgagctctttttctgtgccgtccggcagctcaaattccagtgtcacttcactcccccgctcgccctgggtacagaggaagttcgcccagcgctcctcctgggtatccggtgtctgcacgcctacatagggcgcaacatgtccctggaaataggcatggatatcgctgccgttcaccttggtaagccggctcagcagcggcagttcttcagcatccagcgtctcccggacatagtactccccttcgatatggcagagcgccagcggcagattgcccagcaggtcgcttcctttgggcggaatcaccgtggtatgtccatcctggagctgggcagtcagccggcagagctccaggtaataatcatactccgaccctgccttggctgcctggtaataggactcccgacaggctgcctcccagtcaaagtcctccgggagcaatccgaacccgctgtacagatcatcagcggcagactggatctcggtaatggaataggcacggtccaggttattctctgcggcgctgggccgggtcagacgatcccagacctgggttttcagcaaaatggcagctgccagcactgccagcaaaattcccgcttttttcatgcgtttccctccctgcctaccattgtaacacaaaagctcccccggagccgatccggaggagccatttttttgtataaatccaaggcgaaggtcaggcggattcagaggattcctgtttctcccgcctgcggcgcccataggctgccagaatccgggtcatcgaggacaccagcacaatgcccatggcaatggcacccgctacaaacagggtatggattccggtttccatggcaagctgagtctctccgcccacgagatattccatggtataataggcaccgccgccgggtaccagcggaatataggagatcaccagataaactgtcaccggggagtggtgtttccgggccatatactcggaatagagagagactgccaccattgaaaggaagaactgcggcacatcgctggaaaagcagccggcaaagagcaggtagacaaaccagctgagccctccgcccagcgctgcatagaacatattcttgccccggaggttgaagacatagctgaacccgaaggaggcaaagaacgcatagatgcagggcaggatcatatcaggggtgaggttcagtttcataccagcagcacctccaggaagggagtgaagattgccagcgataccactaccccgatggcaatgccaatggcagtgaccactgcttccgcaaacttgatcatgccggagatcagatccgcggcgatgaactcccgcatggcgttggtcagcgcaatacccggaaccaggttcatcagcatgccgatgatcatcttatcctggctgagggcaaatcccgccttcaccgccagatagcagccgcaggctgtgaacgcgcctcccacaatattgacaaagaaggacgaagcctccagcttttccagctgatggatcaccactttgagcagtacgcccagcacaaaagccgcagccgcatccaccaggacaccaccataaaagagggtgaaaaaggcagagatcataccgaacccgaagtactgcatgggcatgctgtataccgggccctgctcgatctcctgaagccgggccatgatctccccgtattccggggtctgttcacagatctggcggcagagggcattgagcttatccaccttgtccagatcggtatcccggctcagaatccggcgggtccgggtgagataggcaccggtatcatcggtgctggtcaccacgatactcgaggggatcacaaacacatcggtattctgatacccataagccgcgcacatccgggtaatactctcctccacacggtaggtttccgctccgtggctgagtatgtcaaatcccaatgcagtcgaagctgccaggatttccttcatttccaaatcatatcacctgctgttatcttgatcagtcgggctgttccattccgattatatcgggcaaatgggagaaatacaaggcttccgcccaatttccgggaaattttcccactggtatcctgctgcatggacagctgtactccgcccatacttccagtatcaccaaacgaagtaaggacggtaacaacagatgaacaaagtggagatcacaggcgtcaatacctcccggctgaaaaccctgccggaaagtgaaaagacacggctcctgctcctggcacggcagggtgacccggctgcccgggaacagctggtaagcgggaatctccggctggtgctgagtgtggtgcagaagtttgccggacgcagtgaaaatcccgatgacctgttccaggtgggctgtatcgggctcatcaaggccatcgaccactttgacccggcctttgatgtacgcttttccacctatgctgtccccatgatcgtcggggagatccgccgatacctccgggataacaatgcggtgcgggtctcccgttccctgcgggacaccgcctacaaggccatgcagtcccgggaagccctgacagccgagctgcaccgggagccctcctcggcggagatcgcccaggacatcggcctggacgaacgggcggtcaatgaggcgctcggcgccattgtggagccggtttccctctatgagcccatctactcggacggcggcgatcccatctatgtgatggaccagatcggcagcggcgtcactgaccatgactggatcgatgagatggcgatcaaggaatccatcggcctgctgagtgaccgggagaaaaagattctctcgctgcggttcctggcgggacggacccagaccgaagttgctgaggagatcggcatctcccaggcacagatcagccgtctggagaaaaacgccatccgtaaaatcaaggagagcctctgatctcccctgccccaatataccaaaaaacaccctgtcttgcctttatagggccaggacagggtgttttgcttttatcagcaatccgatggcttctgcgccatggcaatatcctccggacgaaccggcagagtgtggaacgccacgccggtggcattcagaatcgcacccaggatcgccggagccggagtattgatcaccagctcgccgatgctcttggcaccgaaggggccggtgggctcatagctgctctcaaactccacccggattctccctgcttccagccgggtgggaatcttgtactgcatcagcgaatcactcaccatgcgtccgtccgcattgtaccagacatcctcatagagcgccatgccgatgccctgtacaataccgccctcggtctgcacccgggccagagccgggttgataaccgtaccacagtccacagcagcggcataatccaccacctggacctcaccggtttcggggtcgaggtcgatctccgcggcacccaccataaagggtggcggcgataccggcgacgaatgggactcgctcgccgacaggcagcggttgtgtccctcaaagctggcatagccgatctccgagaggctgacctcccgtccgtctgctgtccagacccgcttgccgtcaaactcggcctcctcctcggaaactcccagcatggaggcaccctgccgcaggatcttttcccggagcacctcacaggtcttgaccaccgccataccggtgacataggtggtggacgaagcataggaaccggtgtcgtagggggactggtcagtgtccacgccccgcaccgaaatatcggtatagtcacagtccaaacagtccgctgccatctgggccagaatggtatcacagccagtacccatatcggtacagcccaccagcagagtgtagaatccatcgtcattcagacggatttccacgctggcaatgtccacgccggaaatgccgcttccctgcatcgccatcgccagacccacactgcggatgtgtccgttgggcagcacccggcggggatatttctcgtcccagccgatcatctccttggcccgggccaggcagcggtccagggtacagcttccgcacagctcattgtagtaagccggcatgatctggccttcccgcaccatgttcttttcccggattaccgaggggtcgatgcccagctctgccgccagctcgttgacagcgctttccacggcaaaaatgccctgggtggcgccgtaaccgcggtaagcacccgcacccatggtgttggtgtagactacatcgcagctgaaccgggacgcccgcagtccgccatagagcggaatggacttgtgtcccgccaggccgatggtagtggggccatggtcgccgtaagcgcccgcattggacagcacatagagatcgatggcccggagcgtgccgtcccggtcagcaccgatgcgtaccgtaagctgcatctcatgccggggcgaaccgttggtcaggctctcctgccgggtgtattccaggtaggccggtctgccggtcatgcgggtgacaaaagccgggaatacttcgctcaccgagctctgcttggcgccgaagccgccgccgatccggggcttgatgacccggatatccgctttcttcatctccagggcattggagaggatgcggcgcacatggaacggcacctgggtagagctgaccacacacaggcggctgtactcgtccaggtagcagaaggtgcggaaggtctccatcatcgactggctgttggccttggtatgataggtacgggtgagcaccacctcactggcagccagctccgcttccacatcgcccacctcactctgctcagtgctgcagaggttgcggctggcgtcggtccccacatcgcagagggtccggaagttctcctccggatgcaccacaatggggttatccttggccttggtgaagtccagcagcggctcctgcacctgatagcgcaccttgatgcggtccagggctttgcgggctgcttcgggggtttccgctgccacgatcgccaccggatctccggcgcagcggatctgccggtcgagaatcagacggtcataggggctgggctcaggataggtctgtccggcggtggtgaaccggctctggggcacatcctgccaggtatagatctccactacgcccgggatcttcatcgctgcggtacagtcgatctcctcgatccaggcccgtgcatggggactgcgcagcagtttgacggtcagggcgcctgccggcaccagatcgcctgtatataccggcttgccggtcaccagtgcctgggcgtcctttttgcggactgcccggctgacaaattttgcttcgctcatgcccggctggcctcctttcgctcggtcaggtaccggcggatggcccgcagctgaccctggtatccggtgcaccggcagaggttgcctgccagatagtgccggatctcatcatcggtggggttctgaagttcccgggccattgccagtaccgacagaatcaggccggggctgcagaaaccgcactgctccgcgccctcgtctgccagacaggcaccgaaggcagccgcctcttcctgaagtccctccagggtatcgatggtatgaccatctgcccggactgccagcacactgcaggagagcatcggatgtccgtccagatggacggtgcagagtccacagttggaagtctcgcatccgcatttcaccgagtaacagccctgctcccgcaggaaatcaaacaaagtcgtatcgggacgcacctcggcagtgcgcaccgtaccattcagtgtcacagtaatattcatgcctgttccccctccagttcccggatgccccggtttgccagaaccgatgccaggtgccggcgataggcggctcccgcccggagattggtgccaaaggataccgcatccagggcagcttccagcgtatccggtgtaacctccagcgataccgccttcatgggacgggcaccgatgctcaggcgataagcagtctccccttccccgcgggaaacagcacaggccagcaccgggaagtcggtaccggcattgcgcacagtatggtacactgccttccgtccgtccagccgtacccataccgccgccagaatatcccggtctgctttccgggcagcgaagtcccggagcggaatccgtccggcctctgccagttccacttcacagtccagcgccaggagcccggtgagaatatccgaaaaaccgaaccgtccccagacacttccgccgaatgtggcgcactcccggaactgcaccccgacaatatgaccggtcatatcggcaaacaggcttccgaaccgctctttgagcagcgcactggtctccagctgacgcagggataccattgcgccgatacgcacccagccatcccgttcctcgatctgatccaggcccaggccgctcagatcaatgagcgtgccgatgcgcttcctgcccagacgcagccagcagcctccgcccaggatcgtgctgctgcgtttccggttgagttccaatgcctcctgcagtgtggcaggacgcacatatcgctctgctgtaaacaaagctccatctctcctctattctgattttgccggcaaccctgcaccggctgagaacccttttcgattattgtaccagaagtcgggaaacttgtcgatgtccgacggattcccgcacacacaaaacaaagccctgtcattccgaagaacagcagggcctgttttggccgcaccgtccgattgtccgggctgtgcggatcagttgtcaaaaaaccatgattgacgaagtacactataccatttttccgtgaaaaaagccatcctttccggacgctttttcacaaaaaagccaaaaactgtacactcctgacagatgcacaacacgaaaagcacaaaaaaacaccaatacgcacaaggcgcctgttttcctccatgcggttatggaatcggtgccctgtatgtggaaaactcccctgcttcaggctccatgccagcttgcacaccgccgccgctgcccagccaggcagcaaaaaagagctgccagcaactctgacagctctcgggatattttggggtaatcagccctgctgggaacgggaattgttctgctgggcaaactgacgctgagcgcccttgagtgcctgccgggtctgacgcacttctgccagcgagccagccaggctttcctctgccttgcgcagcacctcgtccgaaaattcctgggaagcctgccggatctccttggacttggtctgggcctgggttacgatttcagtagccttggcctgggcctgcttcatcacttcgtcctgggcgatcatcacccgggcacgctcttctgccttgcggacaatagcctctgcctcactcttggcagaggagagaatctcggtgcggtccttgacaatggccttggcctgcttgatctcatccggaagattcaggcggatgtcatccaccatctcccgtaccttttctgcatcgatcacgcaccgtcccccgctcagcggaagattccaggcgcggtccagaagttcatccagcatatccagaatttcttcgatattcacatcaaggcctccttcccaagttttgccatatccgcattgcccagacgggctactacttcatcatggatcgcacggggcaccagatcactgatgtcgccgccgaatgttgccacattctttaccaggctggagctcaggtactgatagttcgccgctgtggtgaggaagatagtctcggcatagggcagcatcttcttattgatcagcgccatctggaattcgtactcgaaatccgacatggcccgcagtcccttgacaatggcaacagcgcccttgctgcgtacataatccaccagcagccccatatagagatccacttccacattggggattccctccaccgatttgcggatcagttccacccgctcttccggtgtaaagctggtattctttacagggttcacaaccaccagcacaattactttatcgaacagcaccgatgcccggcggataatatccagatgtcccatggtgaccgggtcaaagctgcccggacaaattgcgattctctcattcatcggaatccctccgacggtataccgtcagcttgctctttccataccggtattcccgataaatcccaaagggaccggcctgagcaggcagttcttctttcttatcggtttcacagacgatcacgcccgattcggacatcttctccgccaggagcggcagcgcctgatcgatcatgcccttggcatagggcgggtcaagcagggcgatgtcaaaggtctcccgggtgctctgtagaaaggccagataatccatcggcatcacccgggcattggcgcccaggccggtggaagtgaggttctgccgcaccagatcctgagaagcccgtgccgaatccacaaaggtacagaatccggcgccccggctcagtgcttcaattccaagctgtcccgaaccggcgaacagatccagcacccgggcgccttccagctcaaactgcagaatgctgaacagcgcttccttggtgatttcggtggtgggacgcacatcatatccatcaggcgaacgcagctttctgccgcgtgcaattcctgtaattactctcataaggttctttcctccgtcctgtcggaacgatactgattcatcatctattatgatggttttggcggctcttgtcaatagccgtgccggacccttccgacattcactccggagtactttccgccggatggaaatacccgtacaccgcttccgcggcgggacgggtcatacccggagctgccagcagatcctcctcgctggcggcagagatggccttcactgtcttgaaatgccggtacagcgccgccgcacgggtcttgccgatgccggggattccggtgagaaccgattccagaccgctcttgcggtgcttggaccgggaataggtgatggaaaaccggtggacttcatcctgaatggcggtcaccagattgaaggcccgcttatgggcggaaatggagatctcgccgccgtcactggcaatggcccgggtacggtgacggtcatccttgaccatgccatacattgggattttaagcccgaaggcttccaggatgggctgtaccgcattcaggtgcccctgtccgccgtccagcaggatcaggtcgggcagccgtccgaatccgcgtccggtgtccttctcctgctcataccgtgccagacgccgtccgattacctcctgcatggaggcgtagtcatcggtaccctccaccgtcttgatggtgaacttcttgtaggcggaccgcagcggcttgccgttttcaaacaccaccatgcccgctaccttggtcgccgctccgaagttggaaatatcgtatgcctcaatataggagggcggtgtctccatgcccagggtctttgccagctcatccagcgccgcaatctcccgcccggtcttgtctgtttcgtgggagagagtctgggcacagttcttcagtgccatctccaccagtcgggcctgttcgccgcgctgtggaatgtgaatggtcaccttgcggcccagacggtcactgagcagccctgccagcagctcctggtccgccacttccccatccactgttaccagcggcggaatgcggtccggcgtggtgtagtactgggcaatgaactcccggcgcatctcatccagcgcacccggctcgcccagcagatagtcctgcttgtccaccagccgtccgccccggaagatcagcatcgagcagaccgagttgttatcggtggccacaaagcccagcacatcctggttttccaccttggagaagatcaccttctgcttgtcgccaatcttgcggatggccatgatccggtcccggtaccgggctgccttctcaaattccagcttttcagcgcactcctccattttgcgggtcagctcttcggtgaggtcgccgccgttgtggatgtagttcttggcctgggcgatgatctccgcatactcattctgggggaccttcccctgacagagccccatacagagcttcatgtggtaattcagacaggggcgtcccttgccgaactccgccgggaatttccggctgcaggtgggcagctggaagaccttgttcacctcgtccactgtctggttcaccacaaagccggacatatacggcccgatgtactcgctgccgtcgtccaggtggttcttgtccgacacaatacgcgggaaaggttcattggtgatcttgatatagctgtatcccttatcgtccttgagcaggatattgtacttggggttgtgcagcttgatcaggctgcactccagcaccagcgcttcaaattcgctgtcggtgacgatgtagtcaaaatccactacattctgcaccatcttgtagaccttgggcagatgatgatcgatggcccggaagtagctggatacccggttcttgagcttcttggccttgcccacatagataacggtattgtttttatccttcataatataaactcccggctgcatggggagcttatgaactttttccttgagtgatttcagaatctgtgcgtccaatgggatcaacacctcctgatttcagatttgtctttacatattataatgtaaaagctccgggttgaaaagggctgatcagtcctttccggtaaaatgccggaccatcgcccggatcagatcgttctcctgatactgccggtgcaccagaaaactgatgccatacaggtcaaacagcgccatgggcactatctcgcagttccggtactgctccgggacatgtcctccctccagcacaaaggctacgctgcggtcgtccatggggttctccccctcctggggcagatataactccacctgcatatccacctggctgatgagatgcacaacggtggaaaacgcctgtttgtccgtgccggtgagcagcagccgctgaccggaaagatcccgcagacccagagtggaacgctgattgagcggattctccggggaaatcaatgcataaatccgatacggaagatcccaccgctcaaatccggcgatgccttcagtgtgctcgggaagcaggaacgcaccgtccagttccccggacaggagcatctgacggagctccacactgtcctgataagacagggataatgcgattttcgggaactgggactggagtacagaaatatcgtggatcgtatagcgatgcgcagacgctctttcccggcatatcgagaacatttcatgtccgatttaatttgttcaaaactcaaaattgcctgtttagcatctttgataaaattttcgcccacttttgttaaaattaccgtattgccattccgctcaaacaaccgcactccaagctcttttcccagcttgataatctgctgagaaagcgatggctgcatgataaacagctcttttgccgcctgggaaaagctatgggtctcgctgattttcactgcataacgcaattgattatattgtataaatccaccttccggtttatcatcagatttacaatcataggcaaaacctataagtctattataataagatactggacatattttaagaagaattccataataaacataacagattcctctatcattgaaagattttatactatttctacaaactatttcttcagtgtgtgttgttcaaaatcttcatctccagctgtatccgaatgagaggcggcctgtatactcagttcagtatccccgttggtgaacgctggtccggttactacggcatcatctacaccgtcatcaagatgaccctgactatgtacccgctctcctttgcacagcacttcattgcactggttctcggcgctcctgaaaaggccgtcgccccgggcgttgcaaccttcttcatcgtcctggccttcttcggcgttgaccctggctgccaaggttcagaacctgctggttatcgccctgatcgctgctctggtagtattcgctgtattcggcttcccctatgcggacctcggcaactacttcagcaatgcggacagcatgttcctgtccgatggtatcggcggcttcctgaccgcagttgcttacctaggcttcgctaccggcggtgcaactgttattctggcctcctcgaacgagtgtaagaactccgcaaaggatattccctttgttatcgtagtctccacctgcgacgctgctcttctgtacggcctggctgctaccgtagcttccgatattctgcctgttcctgaagttgctaaccagcctctgaccctggttgccaacatcgttctgcccggccctgtctacatcttcttcatcgcctgcggcgcgttgttcgctctgaccactcccctgaacttccagatgctctcggcttcctaaccgctgatgcggatctgcgaggacggctggctgcccaggagcttcgctcagttttccaggtacaagacccattaaaaggtgcgcatgtgcctcatgtagacgccaaaagaacccacttcggtgtgtcctttttgttttcctttctatcccctgtcccagcggacgctcctcctgcccaggctaaagcacccccttcggaactgaccccggcctgctcttcctccctcctggactgcatatcgcaaccgggattgcccctgggctgtcctctctgccgccgatgcccgctgcggactgccctcccccatgcggtcatcgctcgctgtgccgcaaagctggagcttcccacaggcggcagtccatcgcagcaatcaaagtccaaacaggctgctcctccgggagcaagcgggaaaaccaggcaatcaaaaaggcacccgctgtccggcggatgccttgttttgtttcttgggaatttcctgtcacctgcggatttattccaggttcaggcggttttccagaatgtagcgcacagcatagaacagtccgacgcagagcagcagcgaagtcagcagctgaggaagcagctcatcgccggagtaagtggcggtgcccagaccaggcaggaatgccgtctgtgcggtggcaatggctgtgcggagcaggtcattgacaaactcagtgacctcaccgagcacagctgtcatcacaacataggagaacacagcgatcacggctcttccccggtagaacaggtgtccgatgcaggccgcggtgtagaccatcaggattccgcatgcggatttggacagggacagcagaatcagctccagtcccacgatcagaccattctgtccgaacagatcatagaggaagagaatgaactcctcccagaatgagcggagcagcaggaagaaagaggagtccgctgcgatgatcagcatggaaatggtacccaccaggaagcctgccaccacaatcaccatggcagtgatcagcttggagaagatatgtacagttgcggataccggcagggtatgcatcaggtaaccttccgggcccagcatggtcttggaaaagcgctggataatggtaatgcaggacatgaccattacagcgacgatcagcgcggcatagacaaagacggtgatccctgtcagcgagccggaaagattgtagagatagaatgggcgcagcagagaggcaatgcccagcagcgcgatatacagggtaatcagttcccggaacgccgcccggaactcgtatttcagcagtttgatcagcatcggaacacctcccggaacaatgcgtccacgctcttgcccttctcttcccggatgtaatccaccgaagcggtcagggcaatatgaccccggtcgatgaaaataacatcatccagcaccggttccacatcagcgatcagatgggtggagatcagcacagcggcatcgggattgtagttgccgatgatggtgcgcaggatatattcccgtgctgccgggtccacccctccgatgggctcatctagcagatacagcttcgcctcccggctcattaccaggatcagctgtaccttttccttgttgcccttggagaggtttttcagcttgtcgcctgtggagatattcagatgggtaagcatttccagcgctcgctgctcccggaaatcgctgtaaaactcgctgaagaactccaccaggtccccgacccgcatccagttgttgagatactccttatccgggagataggatacaatccgtttggtttcgatccctggacggtacccgttgatccggatctcgccggaagtgggcgccagcagtccgtttgccagtttgatgagggtggtcttgccgctgccattgggtcccagaagtcctacgatccgcccggaaaatacctccaggttcacatggtccagcgccattttgccgccgtaactcttactgagatccctgcactgcaggatgatattctgcataatcctcactcctttccgctt

SEQ ID NO: 3411 - DNA, 24797 bp, Unknown
  16S sequences of unknown bacteria
gcacccacccggcgcccgcctttttctctctaaactgccgcagcgcatagccgccgcaatacccgatcaaccccaaaccgaccaataccgcaatcatcgttcctctcctaacgccggacggtacagggacacatatacgctgggcgttaccgtcacctgcagctgttttcttttctccggccattgataatccgcccaatcccgctgcgttttgaaatttttcgcagctgccttcccaacgctgtacccatccacgccccatgctgcaaattcccggctgatctcttccagatcctcttgcagccgctgttgcacataggcggcaatctcctcctttttggccagcgtttcgtagttttccgttcctgcataggccaccaaaaacgcattgagcggcacctctatctgggcgctgggatatgcaccgtctgtgtttaccgttgtctttacaggccccgcctgttttaatttcagcgtcagcatcccttcgccgaagggattcggcaggctgatttcgccatggccaaactgcccggtagccatacaccacacgcgggtctgctcgccggtcagcgtgcctaccatgcggtcgtcgtaaaatacagcggacccaattagctcgcttttgatgctgctttccaccatggtatagcctggcagctcggatatggcagagccgctgtttggcttttttgcctcgtcgctttgcatgcccagcgccacaacggcagcccctctctgctcatagagagaatcgtaaaacatatccaacgtgaaattaggaaagatgccgctggtgcccgcctcgctgatgatgctctgctggagatgcatgaggtttaggttttcatcgctttgcagcgattgtacaaattttttcgccgtatcctgcgccacaatgaccatggcccctttccgcacctgaggcatgcgcatcaacggatcgatgatctggccaacgccttcttccgccagcgtccggccgatgaccaaaaaattcaaatgcgtaaaatccacacggtacggcgtgttggcattgagcagggccaccgcgtccgacagcccctccgcctggcatacgatggtgcggaaggagggggaatcctcctctgccaaaactggaagctgaaaggaaatttcataggttttttccgttcctttgtccacgcccagcgaaaggataaacgacgtatcatcgatttccttggcgtctgcacagccggatagcatgcccgcagccaacagcaggcatagcaatagtgccatcccttttttcatggtttcaacctccgaatcttggacaccgcccatacaacggccagcagccccggcgtcacaatggcgccaaaggccaccagataattggccaccagcgccatggccccatggatcattaagatcgacacgaccaagatcagggcagacagccctgcaatgatggggcgctgatcctttgtgcccagcacctgcccaatgccttgcgaagcgatttgcagcgcaaaggcgcccgatacaaaagtactgatagaccaacagaagaaaaacagtgggcccatcctttgcaaaaaacggcccaggtctatgttagaggcgatggtatacagcggcgataccgagttttggtacgcgctggtacccatggacgccgtcatacaaagcatgatggtgctgagcagcaccgagctgaacaccagtgcccagcagctggcccgcaccgtgggcttttgcatatgtgtttcatggctccaaaaccatacgcacagcaccgtccaaaacgcagtggaaaacatcagccccgcccgcatcgtaggccacagcccggcgcccatgacagggcttacgttgctccagtccatattcggcaaattggccgccaccagcaccagcagcgccacaaagggaatacaccaaaccagtcgggccgaacgcgcaatgcaaaccgcgccgccaaaggcgatcagacacatcggcaccacatacaacagcgctgtctgcgaaatatttgtcagcgggaaaaaataataccgtgttaccgaaatcatcttgcctaccgaaattgccatcagcaatgtcagccaaacagcccataatacgatgacggcgcggcccaggcccgcccccaggacgcgctgtgcgcaggcgacggggccgccgtacgcgctgagttttttggccagcagcagcataaaaaggccgatgggcagggcgatcagcggcatcatccaggcgctctgtcccggttgattgacaaacgtgacagggtctaaaaataccagccgcccaatcaggctgaccaatacgctggcccatatttccttggctccaattcttcctttcatcgccgccgccccatattcacagcatccggcgcatcgtgctgctttttcctgcccttgaagatcaggtcggtagcgtgcttggtggccggcgcaaaggcggcgaaaaatggaacgccaaaggaatccagcgtacataggtaggccatcaagaccgcccagcccgccgcaatgccgatgagccctgccacagcgcccagcgccaaaaacgcaaagcgcaggatatatagcgccatctgcaagccgtaatcgggaatggcaaagctgctcagcaccgtcagcgcgatgacgatgagcaccacagggctcacgatattgctcataacaagcgcctcgcccaaaacaatgccgcctacaatgcccagctgctggttgattccgccctgcacgcgaatcgaagcttcgcgcaccagctcgaataggatggtggttagcacgatttctgataccaccggcagccctaccatcttgcgaagcgtcagggtagagatcataaacgccgtcggcaagacctcttgatgaaaggtgaccaaggcgatatacagccccggcatcagcaccgtgatcatcatcgccaggatgcgcaccaggcgctccgtcgttgccaccgcggggcgcaggtagtgatcttcgctggtgtgcatcaggccgaaaaacgtgatgggcactaccaacgcatacggcgcgccgtcgcagatcagcgcaatatgcccctgcataacaaaggcagctgtccggtccggccgttcggtttgcagcgcttgtggaaataagctgtattttcttcgttcaaaaatgcgcgctaccgagtattctcccaatacaaaccccttttgcctttgcgcttccaacagtttttgctttaccttggccagcagctttgggtccaccatgccctcgcggtacaaaagagcgccgcgcagcccgttgtcgccgccgatgggaatgaatttggtacaaagatccggcgtgcgcgcaatgttgcgtaccaggtttacattggcgcggatatcctctacaaagccctggtgcgggccgtgcaccaccttttcgttttgcggggtggatacgctgcggcgctctgtcatacgcacatccagcatggcaaatttcttttctccctctacgatgaaaaagaccagcccgttgacaatgccgtccaccaccacagaagggtccgtctcctctttgacgccgttgagcggcaccacctcctccaacgcctgcgtcagcgatgtgcagccgttggtcatcaggggtttcatgatgatctctcccgtcatatccttattggtcagcccatccagcagcgccaaaaacacgcgcttttccccagccttaaaaatgcgcaggatcaggtcgtcgttttccccgtttccaaaaatacggcggagctgcgtatacatatcctccagctttttggatagcgtaaaagccggatactgcgccttttgctctttggcccggatgtgggattcctgcggcgcctcgtgctgctcatccgggctttcccccagcacaaacggctccggcggatcgtacgacaatatctttttcaaataggataacatgcaaccgctcctgacattgacaatttctacatgctagtatgtccggcggccgcagcctttactcaaaaaacatttcgttgggccaagcccttgcgcatggtataataaaaaaacagttgagaaatttcttgcgagaaagaaggtatctgtatgctgaaaaacattccccccattctttcccccgaccttttatatgtattggccaatatggggcatggggatgaaatcatcattgccgacggcaacttccctgccgactcctccaccgaccgtctcatccgctgcgacggccacggcgtgccagaggtgctggaggccgtactgcaacttctgcccttggatgattttgtcgatcatcctgccacgctgatgaaggtggtgcccggcaagtttgaccaaacgccgccgatctgggcggaataccgccgcattttggatgcaagcggcgaaccgtacaacgattttgaatacatggagcggtttgatttttatgaacgcgccaaacacgcctatgccatcgtagcaaccagcgagacctcgctgtttgccaacatcatcctgaaaaaaggcaccgttcgcctataagcgatggcaaagcccgccgaacgcgggcttttttcctgttttgcgtcggtttggcagggcgcccctaggcccgatccttcgccgtagcaatcaactttcaacatgggaggcatggaatgcaaaaaatcttcttttttgatatagacggtaccttggccatgcatgggcagatcccgcccggcaacttggaagcgttgcgccgattaaagcaggccgggcaccttacctttgtctgtactggccgtccggtcttttatgccgaagcgctgttcggttcccttgtcagcgggtatatcgcctgcaatgggcggtatctttgctatcaggggcataggctgcatacccggacgctttccgccaaagcgctggcctcttatcgggagaccatcgacgcactttccgccggcgcgctgtttctttccgaacgcgccgcttatgcctaccatctcagccgcgcccagctttgctctgtgcaggcagaatatggacaggagcgcattttcgcattccctgcgcaagaagatctctattcttttgatctgtactatgccgaaccagcgcagcgcgacgccttgtgccgtgcctttgaagggcgtttggtcatcaacgatcatggcggcagcgggtcttgcgactgctctacctccgattgggataagggcagcgccataaattatctgcttgggcattttggcgtgggccgaaacgacgcctatgcctttggcgacggctacaacgaccaagccatgttccgtatagcgggccatggcatcgccatgggcaacgccgtggatgcgctgaaggccaaggcttcgtatatcaccgatacgatggaaaacgacggcattctcaaagcgctgcgccacgagggcgtattgtaggcgctttcctttctttacaaaccttcgccgcctctgtataatagaaaaagattgggcaaaatcgggttaggaggatcgcatatccatgaaaagagcagcggtttgcctgtgcttgctcctctgcttggcgttggtttgtgcctgcggcggagcgcctaccctggtgggtacctggcagcatgaggcagcgccgatcacctatgaattccgtgcggacggcaccttatcgcttacgacggaaagccgcgcgcccatcgaggggacctatacggcggacgaagctactgggcagcttaccattgaatacgatggctttgaaacgattgcctcctacgtgctggagggcaatacgctgacctgtacagacgtaaacggcgccgttgtcaccttgacccgcgtacaataaactgcgaatcattactggaggataccgatgagatctgtgaagaaattttttctagcctttaccgtgctgtttaccctggcgctgtgcgtaggctgcggcggcggcaatgaattggttggccggtaccaggacaacctggaccccaacgtggtgtatgaattccaaaaaggcaatatgcttgccatcgaaacagccggcgattccatcgccacaggctctacctataccatcgacgaggaggccaagcgcctgcatttcgagacccaggcaccgggcggccagcccgttacccgcgatgcgtcgtactcctatgataaggacagcaaggtgctgaccatcaccggcgacgatggcacgcagcaggtgatgaccaaaatcgactaagcgaataaaaaaggacgtaccgtgtacgtcctttttttatgccttgtatcgatgggcgcggtagacgcggtacatcagcaccgcaacgctcttgcaggcttctgtcgtgcgcctgcgccagcccaaatgcaaaaaataatcatccggcgcgggcgccgccgcccaggccggccggtattgctccaacgggccgcgataatacagatactctgcaaacgcctcagcaaaatctttgggcagcaccacgcttttggcgcacagccccttgggcagcacgccggccgttcgcaggcactgggctacaaactgagagcagatctccgccttatacgcatttacctcccgcccaaacggcgccaacaacggcgcaaaggcgttgtaaatatattcctcctcatcggcttgcatgcgccagatcctgtgcgctaccgcacggtactgcatccaggaaaccgggatgcggtagatatgcacatatgtttcctcctcgcccagcaaggtaaggcggcccggcgtttcctgcacaaatccgccctttaacgggctttgcagccggtaacgtgcaaacgagtacatctgggttaggtccgccgtaaggctgatagagctatggctaaacgggctttttgttaccttgcgaatgaccttgccgatgcgcgtatgcgtttggctgaccaccacatacagatagggatgcagctcgttttcccgcaggctattaacgtacatcttcccagaaaatgccaaacgccccggggccgatatgcgtacccaccacgcagcctatatccgcaatatcgatgcgctttggctttaccttggcctgcaacagcgcaatgaaccgctgggccgggcgaatgtccgaggaatagccgatgccgatactctgctcgctgagcggccggccgcagttttccatcacataatcccggatccactgcatgcccttttgaaggctgcgcgctttatggagcacttcgttggagccatccttcatcacatggatgatgggctttatattcagcacgccggccatcctggcggccagcgggctgatgcgcccgcccttttttaaatattctacggtatccagcaagatcagcgtgcttagccgggacaccctgctgcggcaggcggcagcgatctcctcatgcgttttcccagcctggatcatctccagcgcatccatcaccggcatcccgctgcccagggcggcagtgcgcgtatcgatgatgtcgatctttccctccaccatatccttggcgatcagggcgctttggtaagatgcgctcagcttggaagaacaggtaaagcacagcaccgaatcgccgttggcgcaaaacgtctcaaagacgcgccggtattgttccggcgaaggggcggccgtcaccggcagctgctcgctttgcggcaacagctcaaaaaactgctgattggaaagctccagcttatcatcgtaattcattccgttgatcgttaccttcagcggaatgatggtaatcttttcttctatatgcagctcctgcggataatcgcaggttgtatctgccacgatgcggatcattctatgtccctctttcccaaggataacagcataccagccgggttttatctttttattttactagaggccctgccaaaagtaaagccgctgggctgcaatttccagttatctttatggcattggctttcaatttccgtgcgttttcccgctgctttgtcaagccgccctacatcctatgggctttgctcttcttgtatgaatacggtacaagcggacggtttgtatccgcactgctctctccgcttgcaaacctggaaacagccggcattctctaaacgctgtgccaggtttgcacagcgtttgaaagcggcccggttttcccagggcatagtttcggcttttgtttacagctccatcatacgcgcttgaagccgcggtgccgccttgatcatcaccacatagatcacaacggacagcaccagcgaaatgcccattgccgcgacgataaacatcgtcaaatcgttgattaggaataccaagccgatcatcgccgccagatagaccagctccaacagcatgccgtagacggtgttggtattgctcttcatggcgcggcgttcgctgtcccaatgcagccggggccttgccagatcaatgtagatgccaaccagcaccaccggcgtgcttaatagcgtaataccaataaacatcaccacgcaaatccaccaagcggcatgccaggcaaagaagaacgcaatgctcatcaacagcgccgccagcatcgttacgctcatggaaaacaggatcttgccgcgcagctgtgtagccgccgtgacgggcagcaccatcatcagccagctcgactccccttcacgggaatataccgtcatcccgcagatattcatggctgcaaagaaatatccgaagcctacgactatcagcatcaaaatcatcataacatcctgcggcaggctggaaagcagctcggaggcggaagcgccgctcataccgatttccgacgccacttcctgtatcgggatggcaatcatcatcataaccaccatcaatggcgccatgatgacggagatcagcccattcatcacataggtaggagagcgcagcacgctcttccattccttgcggaaaatggcccaaagcgggctgccttcctttttgccggccgtcttgatatccacttttttgttgcgtaccgccgtttcctcctgggccgcggcgccgcgctgatacagatgcccggccaccaaatagcacaatacaaagcatactgcgcagaccgccgcaaacaaaagcagattggtcagccctgtgctgccgccgtataccaacgcgctagaggcccatttcgccggcggaaacacagacgtaacggtatccagcaggccgccggataaaaaggccatgatctgctcggaagaaacattctgcatggatctgctcagcatctgcacgccgatgatatacagcagcaaaaatacaatgcccgctgcggtggcaaatttatctctgtgtttggtaaagacgctgacatgcatcaaaagcgccaccaccaggttgaccagcgcaaaggggatcatagcgcccagcagcacgatgacaacggcagacaatacatattggatcgtcaccggcacatgcagcgcatagatgatggccgccggcaccacaaacagcgcgtagctggccacttcgccgatgagcgaggcggtaaatttgctggcaaataccgtgctctgcttgatgggcagcgacgccaaaaacgccgtgtcctttgcataatagagggaaaacgcataggggatgccaaagataaataccaccagcatgcccgccatgatgctgatggccagcagcgtgtcgtggatcacattgagcatcacaacatcaaacagccaattcagcagcagcatgtagcccaccagcaggccgccgcctaccagcagcagcaccaaaagcgaagcgatcgcctttcttttctcctttgcgctgcccttgagctgtgctttgagcgtggcaatgccaaacgtcagctttaattgcagcgccgtcagccgccaaaactgcttcataccgtcggcgctccttccgtatccgtcagctccaggaacagcgtttccagcgattcgtccttgccgtttcgcagctcctccagcgtgcccaccgcaatgatcctgccatggttgatgatggcgatgcgatcgcacagcttttccgcgacctccagcacgtgcgtagagaagaataccgtattgccccgttcgcagtgcgcccgcatctcctgttttagcagatgcgcgcttttgggatccagccccaccatcggctcatccatgatccacagctgcggatcgggcagcagcgcgcccgttaccgccagcttttggcgcatgccgtgggaatagcttttgatctgcgaacccgccgccttggtcaagtcaaacatcgttaaatacttttcaatctgcgcctgccgcttttccttagaaatgccgtacatatcgccgatgaaattcaggtattccaggccggtcagcctatcgtacacctgatgggaatccggcgcataaccaaagcagcgcttggcctctaccggttgagactgtatatcatagccgttgattttgatctgcccttgatcgggctgcaaaatgccggtcagcattttgatggtcgtcgttttgcctgcgccgttagggccgataaagccaaatacctcgccgcgctttacgtgcaggttgatatcgtctaccgccttcacagagcttttggcatagcttttgctcacatgttcgatggagatcatatccatactcctttccttttccaaggcccttttaatttaattggattagattatatcaacaccccctcccgaatacaagcgagactctgttaacttttcctctcgtttgtttccctgccgttatccgttttctctgtgccccggcacggctagggacatttttgggtttacggcacaggcaaagcgtcgtacaataaaagcagagctctgaaagggcgccaatttcaagcaaagcgaggcaaattcaatggcgatcgttgcgttagatcaagggacaaccagctcccgcaccgtaattttcgatgcccacggcatccccatcagccagcaaaaccgcacctatactcaaattttccctcagccgggctgggtggagcatgaccccagcgaaatccttatgagccagctttccacgctgcggcaggcgctggccagcgcccagatgcgcgcacaggatgtttcggtgctgggcattaccaaccaacgggaaaccgtcatcgtctgggaccgcgaaaccggccggcccatctacaacgccatcgtatggcagtgccgccgtacggcggatcgtatgaagcggctgcaagaggatggcctggggccgatgatcgcggaaaagaccggattgccgctggatgcatatttttccgccagcaaattgcaatggatcttagatcatgtgccggatgcgcggcagatggccaaggacggccgcctgttatgcggcacggtggatacctggcttttatggaatttgaccggcggcaaaacgcacgccaccgaccataccaacgcttcgcgcaccatgctgtacaacctgcatacccatgcctgggatccggatctgctggatctatttggcatcccgcaggaaatgctgccccagatcctcccttccagcgctgcctacggcgtaacggacggcgatcttgtcggcagcgaaatccccatcggcggtgtggctggcgatcagcagtccgcgctgttcggccaatgctgctttgcgccgggcgaagcgaagaacacctatggcaccggctgctttttgctaatgaataccggcgaaacgccactgctgtccaaacaggggctcatcaccaccatggccgccacccgcgagggcgagcccttccaatacgtcgtggaaggcagcatctttgtggcgggcgcggctgtgcagtggctgcgggatgagctgcatttgatcgacagcgccgcccaaaccgaagcgctggccctatccgtaccggacagcggcggggtggtgctggtgcccgctttcacggggctgggcgcgccctattgggatatgtacgcacgcggtacgttgctcggcattacgcgcggcaccggccgggctcacatagccagggccacgctggaatccatcgccctgcaaacctacgatgtactggacgttatgcagaaagaaaccggcatcgagctttcctccctgcgggtggatggcggcgcgtctgccaacggctttttgatgcaaacgcaggccgatcttctcaataaaagcgtcatccgccccaaggtgctggaaaccacggcgttgggtgctgcctacttggcaggcttggcggcaggcatctggaaaagcaccgacgaattacgcgagttttgggagctggacgatacctttgtgccgcagatttccgaacaggtacgcgcccgccagatccatctttggcaccgggccgtggaacgcgcgcgcagctgggcggaggaataagtcgatattccccgcctatctaacgcacatcaacgccaggaaagattgccaaatatatcgacaactgcgcttttctgtaatttgcatacttaaaaagggagctgcttttcaaaagcgctcccttttctatgcccgctgtactgtcaacggcggcccggtcagccgtatgatgtgcgcatccatataccgtgcgtcttgctcgtcatgggtcaccataacgatcagccgcccctcggcatacctgacaagcgcatccatcacctgatgcttgctgtccgtatccaagcccttgaaggcttcatccatcaaccaaacatccccgccaaagcataccatgcgcgccaaggccacccgccggcgcatcccgccggacaaggcctccgggcgctttgcaaatgcctctgccggcaagcccatagcccgcagcgcctccgccgcctgcgtctttgcgcccttgggcagcactgcctccacattgcccagggccgtcaaccagggcagcagccggtcttcctgaaaaagatacgcaggggtttccggcctttccaccgtgccgctctgcggggtttccagccccataagcacgcgtagcagcgtcgttttgcccacgccggacgggcccatcagcgccacgaccccgctttgcggcaggcacagcgaaaaatgcgacagcaccgtctgcgtgccgtagcatactgtgatatcatcgatcttcatgcgccttctccccctccagcgcccaccggcgcgtacaccacatcatcagccgctccatacataggctcagcaccaccaccgttactgtgacggcgaacaggtccggcgtttcaaaataaattttcgcataatacaaatcgcggcccaggccggtggccggcacgcacagcacctccgccgccaccccgcttttccacgccatgccgatgccggaggccagcgccgcttgaaaatacggcagcacggagggaatatataccagctttaacagtttccacctggaaaagcgatagcaacgcgccatctccaaaagcgcctggtccgtctggcggatgccctgctccacgttgctccaaaccatcggcagcaccatgataaacgagctgaagaccgggaccgccccggtatccagccacaaaagcgccaacaggataaagctggccaccggcaccgcctttacggtgctaagcagcggctgcatcagcaccgaagccaaacgccagcgcgccgtagctgccgcgatgattacgcctcccacgacggccagcacaaagcccatcaggatacgcccaatggaaaccgccaccgccacccaaaactccgccgtgccggccagcgccaccaaacgctgcaaaacgcgcaaaggcgatgccagcagaaactcctgctgcatcgccatcgctgcaatctgccataccgccagccaaaagcatacggccagtagggtttgcagagcgcgtttatttttcataatagaatgcatcatccggcatattgccgcctacgctctttgcgtttgcctcatacaatacctggaaatagccttcgatggccggcttcatctccgtacccgtgatgcacacgatgttgcatttcggaatggcggatttggctacctccgcactcggcaaaatctcgtatttggccaccagctctgcggcttggtccacgttgttgttcacatagtccacggattccttatattcttttaagaaggtatccacggcgtccttgtgctcttgcaaaaattccgtacgcaccacaaggcagcccatgaccagttcgctgccgccggcggactgtttccaagcttcatttaggtcgacggccacacgcacctcgggatcttttgccatgacgttggtcacatacggctccggcagcactgccagcgtattctgcccgctcaaaagcgcagaggccacctctgcatgctcggatttatattccaccgttgcctgcacattgttctgcttaaacagataatccagcgtatactgcggcgtgctgccctggccggcgctggcgatggtctttccattcaggtcctggatgccgtttaccgtatttcccttttccaccacatacatcgtgcccagggtattcagcgcaatcagcgttaccttgccctgtgttttttggtacagcgtagcagccaggttggtgggcagcgctgcgatgtccacctcgccactggtaattttgcccgtcaattcatccggcgcgccggccagcgtaaaggaatagtcctcgtccgccttgccctggtccatattatccatcagctgcaccatgccaatgccggtagggccgttgagcgccgccacgtttacttttgtcttttccttggcgccgcagcccgtaaagagcgacgcgctcaataccactgccatcagcgccgccagccattttgtccgtttcatgttgttccgtcctcccttatgccctgtgcgccgtcatagtgcagcaggtcgtttggttttagaattgcaatgcatttcccttcccgtgctgcaatgccttttttctccagcgtttccatcgcccggtacagcgatgcgcgcccaatgcccaaaagctccgccagcttattcatgccaaagggcagcgtcaccttgggcggcacgccgtcctgctggttatccagcagatacatggccagcctgcactcggcgctgccgccggtataggcgtcgattctgcggttgagataaaagatccgccccgtcaaaaacgataggtagttggccatggcgcgccggctctgcccaaacagctgcatcagcgcttcctgcggcaaaaacaagatgttgctgcgctttctggcatggatatccgtcacatagaagccatactcttgaaacatcgaggccgccccgaagcattggccggggcccagcacgttcatcaataccgtacccgcctgcccctgcgtcttggtcacctccacttctccggaaagcaccagccccaggctgcgcttggtatgtgtacggtcatagatcacctcgcccttttcatagcgcaccgtttctacgcccggcgctttgagcaaggcctccagcgcctccgtttctacgccctggcccaaaaagcatttttgcagcaaaggatgaatcagttgcattctcccctctcaaaagtgtttcatttgatacacttttcatgtcaattatagaaacccctgccaaattgtcaagcgtattcccgcataaagcacaaaaaaagaggctctcgcctctttttttctatgctttacagcgcaaacaggtcggtggaaaagtatttttctccgccgtccggcagcagcaccacgcaggtccttcccttgttttccggccgcttggcccattgcagccctgcatacagcgccgcgccgccagaaatgcccgccagcagcccctcggttttggccaaagcgcgcgccgactgcttggcctgctctcctgtgacctgcgcaatctcattcagcaaagagacatccagaatctccggcacaaaccccgcgccaatgccctgaagcggatgcggccccgcctgcccgccgctcagcaccggcgaatccgacggttctacggccagaatatgcacctgtgggttctgctctttcaaatagcgcccagtgcccgtgatggtgccgcctgtgcccacgccggctacaaagcagtcgatgcgcccgtccgtctgctgccacagctccgggccagtcgtttcataatgcgcttttacgttggcagggtttacaaactgcccggccagcacggcgcccgggatggcctttaccagctcatccgccttatcaatggccccttgcatgcccgcttcggccggcgtcagcaccagctctgcgcccagcgcagccagcagcatgcgccgctcttggctcatcgacgccggcatggtaagcaccacacggtagccgcggcacgctccaatggcagccaggcccacgcctgtgttgccgctggtgggctccacaatgcacccgcccggggtaaggcgccctgcattttccagttcacggatgatatacagcgctgcccggtcctttacgctgccaaatggattgctcttttccagcttgaccagtacgcaggccagcgcctcttcctgttcacagaaatgggggatggccataagcggcgtatggccgatgcattcaatggctgtcggttgtttcattttgcttcgctccttctttttttcatagtaatcccatcccttcgtgccgtcaagcaaggggcgcatccgcccccgattcttgcacaaaaccgagaaatcggctaagatatagtatgttattgtgtaaccttcctgaggaggtatgtggattgagtaagagatttgagaagattttagttgcgaaccggggagagattgcgattcgtgtgtttcgggcctgttatgacctgggcttgaaaaccgttgcgatatattctaaagaggatatcaacagtttgcatcgtacccgtgcggatgaggcctatatggtaggcatgcaaaaatcgccgctggctgggtatttggatattgaccgcatcatccagattgcgttggatcacgacgtagacgccatccatcccggctatgggtttttgagcgaaaacgccgacttggcccgcgcctgtgaggaaaacggcatcgccttcatcggcccgccgagccatatcctggcccagatgggcgataagctggccgccaagcgcatcgctacgcgcgccggcgtgcgcaccattccaggcacgccggaccccatcaccgatttggaccaggccgcccaaactgcggcagagttcggttatcccgttatcttaaaggcggcggccggcggcggcgggcgcggcatgcgcaagatccaaaacgagcaggagctgcgcgataatttcccgctggtgcagagcgaggcgctcaaggcctttggcaacggggatattttccttgaaaaatacatcgaagagcccaagcacatcgaggtgcaggttttgggcgatacgcatggaaacatcgtgcatctgtatgagcgcgactgctctgtgcagcgccgctatcaaaaggtcgtggaatacgcgccggcatttaccgtgccgcaggaaacgcgcaaccacctgtatgaggatgcgctgaaaatcgcgcgcgaagtgggctatatcaatgccggtaccatcgaatttttggtggataagcacggcgaacactacttcattgaaatgaacccgcgcatccaggtggagcataccgtaacagagcagaccaccggcgtggaccttgtgcaggcacagatcctcattgccgagggcctgccgttggatgatcctcagctatgcctgacacaggacaatatccaccagtatgggtatgccattcagtgccgcgttaccacggaggacccgcgcaacaactttgccccagataccggcaagattaccctgtaccgcagcggcggcggcaacggcgtacgcctggacgccggcaatgcgtttgctggcgctgtcatttcgccgtattacgacagcctgttggtaaagatcaccaccaccgaccgcacgtttgtcggcgcggcccgcaaggcgctgcgttctttggcggagattcgcgtgcgcggcgtcaagaccaatgtgccgtttttgatgaacgtattgaagaacagcacgtttttggccggcaaatgcgatacgtttttcatcgactccaccccgtctttgtttgatatcgaagtgccggaagaccgcgcctccaagatgttatcctatatcggcgaacgcatcctagaagaggatcgcctgccaaagccgcaggtcaccgttgcccttccgccttatatcaagggcgagatcccggaaggcggcttcaaaaagctgttggatgaaaagggccccaaggccgtcgccaaggctgtattggaggaaaaaaagctgctcatatccgataccaccatgcgcgatgcgcaccagtctcttctggcaacgcgcgtgcgcacctttgatatggcgttggcttcctactccacctcgcatatcttatcgcctgcattttcgctggaaatgtgggggggcgccacgtttgatgttgcctatcgtttcctacacgaatccccgtgggaacggctggattccctgcgcagcaaaatcccaaacatcctgttccaaatgctgttccgcggcgccaatgccgttggctataagaattatccggacaatgtcgtgcgcgcttttgtcaaggaaagcgccaagcgcggcatcgacgtattccgcatctttgactcgttaaactggctgcctggcatggaggtggccttggaagaggtgctcaatcaggataagatcgctgaggccaccatctgctataccggcgacattaccgaccccaagcgcgataaatatccgctggaatactatgtaaagcttgccaaagagctggagcatcgcggcgcccatatgcttgccatcaaggatatgagcggccttttaaagccctttgccgcgaaaaagctggtcaaggccttgaaggacgaattgaccatccctgtgcacctgcacacgcacgataccgccggcaaccagattgccgcttacctcatggccgccgaggccggggtggatatcgtggactgcgccattggcagcctttccagctttaccagccagccctccatcaacagcctgtgctatgctctcaagggcacagagcgcgatcccggctttgatttggatgcgttggataagctgagcagctactgggcagatgtgcgccccatgtacgcgcagtttgaagccggcctccagtcgccggataccgaaatctataagctggagatccccggcggccaatattccaacttcaaaccgcaggttacggcattggggctgggccatcggtttgaagaggtcaagcaaatgtattccaccgttaaccagatgctgggcgatatcgtgaaggttacgccttccagcaaaatggtaggcgatttggccatctttatggtgcaaaaccacctgaccccggaaaccatcgtatccgaaggcatgcattataacttcccggacagcgttgtctcttacttctccggcatgatgggccaaccgcaaggcggcttccccgaagatctgcaaagggttgtgctcaagggcgaaaaggccattacctgccgccctggcgagctgctggcgcccgtggattttgaagcggtgcgccaaagcctgccggaatcgcatcgcgacgatgccagcgtgctgtccgcctgcctgtatcccaaggtgtttgaagaatacctggcccatcttgaagaatacggcgatctttccaagctggaaacaccggtctttatgcgtgggatggacccgggcgatctgcatgcggtggtcgttgaaaacggcaaggtgctgaccatcaaattcgtcagcatgggcgaaatgaacgatgacggcacgcgcaacctcatctttgagctcaacggcattcagcgtgtcgtggccatcaaggtgcccaatgccgaggtcgtggccgatcatcagaccattatggccgatcctacggatgaacggcatattgcagcctccatccccggcttggtcagcaaggtgctggtacaggtcggcgatacggtagaggttaacgaaacgctgtgcgtcatcgaggcgatgaagatggaaaccaacatcgtcgccaaaaagccgggccgcgttgtcaccagccgtgtggccgagggcagcgatgtaaaagccggcgaattgctgtttgtcatcgaagaataacgcgctatgtatccaatcttaaggccgctatgcattggcatagcggcccttttctatgcaaaatatggcgtatggacagagattcgctcgtatgccgtctataaatccaaacatcatgattttatgatatttatttgactttgtgctgttcttttgttatactaagttaagaataactctcgtgttatgctcattttgggtaggctggggagggaatgcatgtttcctttgtcccagccctttttctctatgggtctctttttttattgctctattttaaggaggtatgtgtatggagcgttccctttcgctgacagaagggcatgtccacagcaccatgctgcgctttgctctcccctttctcttggccaacttgctacaagcgctgtacggcgctgccgatctgctcatcgtcggccagttttccacgccagcccagctatccgctgtggccacgggcagtcaagtgctgcaaaccgtgacttcacttgtctctggtcttaccaccggcggcaccatcctattggggcaatatataggcatgtcctcagaacgcgacgtaaagcagacggtctccaccatgatgtcgctgtttgccattgtggcgctggggctgatggcgattctatttgccgccaccatcccgctcgtttcgctgctgcaaacgccggaggccgccgtgccctatacgcgggcgtatgtatacatctgctccggcggcgtatttttcatttttggctataatgccatcagcgccatgctgcgcggcatgggcgattccaagcgtccgctgtatttcattgccattgcgtgtgtttgcaatatcgtaggggatcttgtgctggtcggcgtattccatatgggggctgccggcgccgccatcgctacggttgcctcccagggaatcagtatgctgctggccattgtctatctgatccgcaaaaagtttttgtttgatttcaaacccaaaagctttcgtttataccgagagaaggtttctaccctactccgtttggggctgcctgtatccttccaggatacactggtgaatatctcttttttgtttatcaccgccattgtcaaccatatgggggtcatcgcctccgctgcgctgggcgttgtcggtaagatcaatacctttacgatgctgccgcccactgctttttccgctgccctggccgcgatggttgcgcaaaatatgggcgccggcaagcaggaccgcgccaagcagtgcatgaagcacgccatcctcctgtcgctgtgttttggcgttgcctgctttgtgctggtacagctctggcctgccttttttgcacgcatctttaccagcgatgcagccgttatcgctggcagcatggaatacctgcgttccttcagctttgactttatcctggtatgctttatgttctgccttaacggctttttcaatggctgcgggcgcaccgtcttttccatggccaacaacctctcctccacctttttcattcgcgttcccatcgcctttatcgtatccagggtcgcctccgaaagcctgtttgccatcggttttgcagcgccactggcatcgctgttttccatcgtcgtcgcttttctctacttgcgcaccggccgttggcagcacagtgccctgcatactctgaaagcggaggatcaaacgccatgatacaatatcgggcgcttttagaagcagaattgtccccgtccctatttgatgcgtttgtacgcaggcaggtcgtttcccaatgttggcgcaagcgcggcggtgtttggcgcattgagtacgacccatttgtagatgattggaacaaggcggactatcaggcattgctaagcagccttaagcgcaccctggcgggccagggcgccgtatacggtgcatttgatgggcatctgctcaagggctttgtctccatcgaaggtaccaagctgggcagtagagcacaatatatggacctatcccatctctatgtatcgcaagagctgcgcggccgcggcatcggcgcacggctgttttcccttgccaagcagtttgcacgcggccatgaggctgaaaagctgtatctttccgcccattccgctgtggaaagccaagccttttaccgtgctatgggctgcgtagaggccgaggaatacgatccggcgcatgtaaaggcagagccatacgattgccagctggaatgccgcttataaatgaccggtttataaaaaagagggccaaaagccctctttttctcttgcagtttattcgtcctttacaatggcaaacgcgcgaaccggcagtccgttggcatcgcggatctttgcggcctgcaccacgataacagcccctgttggcggcacctgatccagattggtcagcatctccacctgaaatctgtcccgctgcaagacataccgctcacatcttagccccacatccttggaagaaatcggcgcgtctgtatccaatgtttcatgcccaatggccgctacattgcgctcgtcaaagagaaattgcagcgcctcaaacccccagccggggaaatgctcgttgccgtcttctccgatgttggacagcgccgccccatccggccaacgcttgccccaatcggtgcgcagcgccacaaagcagccctccggaattttgccatgctcgatttcaaaggccaaaatatccgataccgacagctcaaaatccacattttcctttacctgcggcgttgcgtctatcacgaccaacggcagtacggtatccatgacgccaaaatcctgcgcaacgcgcccgcccggcacaaagtgcgcgggataatcgatgtgcgtgccgaattggcccggaaacttgaacgtctggatctccagatccattgcctcaaaaggaacggcgatttcccccagcgacacggacccttggggaatgccctcccaataggggctttcatttgtcaaggtatgcgttagatctacccagcggtattgctttgcctccgccagcttttcccacaaaccagccattgcatacagctcctttccattgcctgtttggttcagtgtaccataccgatctctacaaaaaaagccccctcacggaggcttttctgttcttctcttgttttacgcaaaatacagcacgccggcacggaacagcttttggtccttgtctcccggcacattctttgcaatgttctcgcccaggcgctcgctgtggcccatcttgccgaaaacccggccgtccgggctggtaatgccctcgattgcgctggcagagccattggggttaaaggcaatgtccgcgctgggccggccctcaaaatccacatactgggtggctatctgtccctttgccgccagctgggcgatggtttgctcatccgctacaaagcgcccttccccatgggaaatcgggatgcagtgcacgtcgcccgcctctaccaggctcagccagggcgacagcgtgcttgtcacgcgcgtgcgcaccatgcgcgaactgtgccgcccgatggcattatacgtcagcgtcggcgcatccggccgaatggtttcaatgcgcccgtttggcagtaaccccagcttgataagcgcttggaagccgttgcaaatgcctaaggccaggccgtcgcgctgatccagcagccgtccgatggcctccgcaatgcgtgggttgcgcagcgttgttgcaatgaatttgccggagccatccggctcatcgcctgcggaaaacccgccgggcagcatgaggatctgcgcattgtccacaccctttgcaatgcgctctatggtatcctcaatgcccgccggggacaggttgttgaccacctgtatttccggcacagcgcccgccaattcaaatacacgggcagtatccagctcacagtttgtgcccggccaaacggggatgagcaccctgggctttgccatttttgcactggggcgttttttctggcgttcggtatacagcggcaccgtctgcatcggcggtgtaaacggcgtttccgttgggaataccgtctccaacggcgcgcgccaggccttttccagcgcagccagcggcaccttgattccattgacggacagcaccgcttcctccgtcgtatggcctaccagctccgcagacggcagctgcaaaagcgcttgcttgtcttccgaggcaatcaataaatcgcctacccgccaagcaaacagcgtttggtggtccaaggttccttcaaaggcaaagcccacgccgttgccaaagcacatcttggcgacagctgcggccaggccgccctcggccaccgtcgatgccgcgcaaacgctccctgcctggtgcgctttgtataccgctttgaagtgctctgcacaggccgcaaaatccggcagcccctgcgcatccacaggcagcgggatgcgcaccacatactgccccttctccaatgcagccgagcacagctgcgatgctttggtcttggcaatggcaaaggccaccagcgtcggcggcacattgtattccttaaacgtaccgctcatgctgtccttccctccgatggcgggcgtgccaaagccaacctgcgccatcagcgcgcccaacagcgacgctaccggcttgccccagctgtccgggttctgttttaggctttcaaagtattcctgcaacgacagcctggccgaaagcgcgtccgccccggatgctgcaatcttgcacagcgcctgcgtaacggcatacgcccctgcatgcaacgggcttttttccgcaatggccggtgtaaagccaaaagccatcgccgtggcgtcgtccgtttcgcccggggttgggaacttcgccgccataacctgttccggcgttgtctggttcttgccggcaaacggca

SEQ ID NO: 3412 - DNA, 31489 bp, Unknown
  16S sequences of unknown bacteria
gagatctagtacggtctcgtgggctcggagatgtgtataagagacaggaattatacctatcgaccggtaatcggaaagctggtagacgtggtaatggcaatccgggaaaaaaggaaaagacattagacttttacctaatttatacaaaattaacaggtttgtaatcaaaaaagctatggcaatccccggaaaactgtggtataataaagccaaggcaaaactttgccgcaaaaggagggctatgtatgaaattaattcttgctattgtttccagtgatgacagctctatggtttcttccgcgttgaccaaaaacaatttttcggttacaaaactggctacgaccggcggcttcctgatgagcggcaacaccacatttttaatcggtactgaggacgaaaatgtagacaaagcgatcaatgtcatcggagaacacagtaaaaagagaaaacagatggttccttcctctgcatcttatggcgtgggaatgtatacgtcgttcccggtggaagtcactgttggcggagctaccatttttgttctggatgtggagcagtttaaaaaactgtaagtctggggtaatccaaaaatgtcgttattaaaccggttttacggaaatgacaaagcaaaagaggcgctcgtcttttatcaaagagacgggcgctttccgcatgggattttattggagggcgaagaaggttccgggcgaaaaacctttgcccggctgattgccgccgccgcattgtgcgagggagaaaatcctccctgcggccaatgccgccaatgccggaaaatttttaaggggattcatccggatgtgcagatgattgcgccggagccgggaaaaaaatcctttcaaaaggagcagattgagcgcctgcgggcagacgcgtgggtcaagcctaacgaggcgccgcgaaaagtgtatatcctgtgcgagacgcagtatatgacctcctgggcacagaatgctttgctcaaactgctggaagaaccgcctgccggcgtgctgttccttttgacctgcgacaaccgttcccggcttttggaaactgtgcggtcccgtgtggtggcgctgccgctggcagggccgggcgaagcgctgacagccaaagccctgctggaacagatcccggaattgggagaggaaaaggctcggaaagcggcggctcaaagcggcggcaatgttgggcgggcaaaaaagctgctggcggatgaaaaatatgcggcgcttttagaaaaggctgtggatttgtgcagtaaaatggaaacggcggatcgattcggcattctgcaggtgcttgccggttttgagaatgaccgggaaggactgcttcagtgcctggagcaggtgcgccagctgttagcgaaaaatacaaaggattccttttttgcaaaaaacacccggcagttccgcattcttccgttgcaggcgggtagagtccttggtataatagaacagggcatggagtatgcccgccaaaacataagtatgacgttgctgactacttggctgggtgccgggattggcagcgctttcgaggaatagaatggaggaaccatggcggaagtaattggcgtgagatttaagcaggtgggcaaggtgtattattttgatcccgccggcgttcaggtgcagaaagaagacagcgtgatcgttgaaacagcccgcggcgtagagtgcggcgaggtggcaatggaaaatcggcaggtcagtgacgagagcgttgttaaaccgctgaaaaaggtaatccggaaagcgaccaaggaggatttggcgcaggtgcgcaaaaatcaggaaaagcaggccgctgccgcaaaaatatgcaatgaaaaaattgccgtccacaagctggacatgaagctggtggatgtagagtatacgtttgacaacaataagattttattttatttcaccgccgatggacgggtagatttccgggagctggtgaaggatctggcttcggtattccgcacccgtattgagttgcggcagatcggcgtgcgggacgaggcaaaaatgctgggtggccttggcatctgcggtcggccgttttgctgctcgactttcttgggggaatttcagccggtttcgatcaagatggcgaaggaacagagcctgtcgttgaatccggtaaaaatttccggtacctgtgggcggctgatgtgctgcttaaagtatgagcaggaagcatatgaagatctgctgcgcaccaccccaaaggtgggagcgctggtgggaacggtcgacggcaagggcaaggtggtagaagtaaacctgctgtctgggctgctgaaggttcggttggatgccaatcccgatgcgccagcgcgggtgtatccgaaggaagaggttcacctgttgcgggatggtagaattaaggtggaccaaaaagagatagaagcgctcaaggaaatcatggagtaaagattcggtaaaacaggagaaaaatctccgaaaacggttgatttttttgcggaacgtgatacaatgttgtcaaaatggtaatggaggtggatttgcaatggcatatgtaatttctgacgagtgcatcagctgtggcgcttgcgaggcggaatgccccgtttctgcgatctctgccggtgacggtaaatacgtaatcgacgaggggacctgcattagctgcggtgcttgcgctggtgtttgcccggttggcgctccttctgagaaatagtagtacttactaaaaaggcctttgccaagcggcaaaggccttttttcttattgatagaacgtttgtctattgcgcagcctcgccggaagaagtgccctcttcgctggaaaggccgagattctttaacatattggtcgcggccatttcgatatggtcaatggtcgctttttctgcgtcagccgggttgtgagcagcaatggcatctacgatgcgctgatgttcccccatcaccttttgtgcgcgtccttttgtagcaaaagacatttttcgataacgttgaatggaatggtgcagactgcttaaggtttgacgcagggtacggctgccgctgatttcgtaaattcgttcatgaaactgagaatccagattccgaagctgatccagatcgccttttgccgtataaaattcctgtagttctagaatgtctcgcagagacttggcgtcttcttccgtaatctgctcagctgcccagcgggaggctagcccttccaatttcatacggatatcatagatatcccgcagatctttttcactgacacccacaaccacggcgcctttgttgggggtcaactgcaccaagccctcctgctccaggcgatgaatcgcttcacgcaccggcgttctgctgacgcccaaacgggcggaaatacgaagctctgtcagattttcgccggccttcagtgccccgttaaggatttcttcttccagctttttgaatactttatccgccaaggaataaccgttggataacagattgtctttcatgttttcaatccttttttgcataatgcgtccgtccaaaaacgaacttcccatcaggcttgcttttgccggcgggagacatcccccctaaaaggcaaaactcgtccttcgaaactgctattattataatacagacgcaatcgtttcgcaactgaaaatacgtgatcagagaaaagaaaacgagaatatatgttcgattttttgcctaaatcggttgcatcttgcgccgcaatacggtataataacaaaagagcaacaagaaaatcgaaggcacgcaaattttgccgctgacagagttttttgcggatatctttcggttagcttcatcaaaactctgatctcaaggcgagaaaaacggaatgcttttatcctttgccaccaaaagaaaggcgcagacagagcgccttttcaatgggcgtaacaggtttaagcctgttggcaagagaaaaggctcttgtttggggtgatataccggataaaagcgcaaattcgtgaaatgatggcgcggtgcgtgcggaatggagcaaaaatatggtagataaacaaaaagcgattgaaacggcgatcagtcagattgaaaaacagtttggcaaaggatctattatgaagctgggttccacggcaacgctgaatgtggaggcaatttccaccgggtcgatttcgctggatatggcactggggatcggtggcgtaccccgcgggagaattgtggagatctacggaccggaaagttctggtaagaccactgttgccttacatatcgttgctcaggcccagaaagcaggaggtgaagctgcgtttatcgacgtggagcatgcgctggatccggtgtatgccaaagcactgggagtggatattgattcccttttggtatctcagccggataccggtgaacaggctttggaaattgccgaagcgctggtccgttccggcgcaattgatgtaattgtactcgactcggtagcggctatggtgccgaaagcggaaatcgaaggagaaatgggagatacccacgtaggtctgcaggcgaggctgatgtcccaggcgctgcggaagctgacgggtatcgtttccaagtccaatacagttgcggtgtttatcaatcagctgcgtgaaaaggtgggcgtagtgtatggcaatccggaggtgactcccggcggccgtgcgctgaaattctattcctctgtgcggatggaggtccgccggattgaacagcttaaaagcggaacagaaatgatcggcaaccgcacgcgggttaaaattgtcaaaaacaaggtggcgcctcctttcaaagaagcggagttcgatatcatgtacggtacgggaatctcccgcgctggcgaaatactggatttggcggtcaaactggatattatcaataagtccggcgcgtggttcagttataatggagagcgcttgggacaagggcgggataatgtaaaaatctatttgcaggagcatccggactttgccgacgaaattgacaagcagatccgagccaatgccgatcggctcagttttgccaggggaggaaaaacggtggcgccgaaaaaagagcctgtcccctcatccgtagagcagcctgccgatccgccggctcctgcggcgaaagggaaaagtacagcggtaaacattgatgtggaagtggacgaataatgcttcggatcacagctgttgaaaaagcaaagaaaaaaggatatcatctttttgtagaagaggaatatgctttaacgatcagcgccgaggtgctggcgcaaacgggattggctgccgggcagcagattaccccacagaggctggacgaaatccggcagctgtgcgatcgacagcgggccagagagcgggcgctgtatttgttggagagccgcagccacagcagaaaggaattgtttgacaagctttgcagatccgtgccggagcagaccgccgctgaagtaacccagcggatggaggatctggggctggtggacgacgaggcgtatgcccgccgttgggcggcaatgctgtggcgtgagaaaaaatacggaccgcggcgtattcgccagagcctgacgcagaaaggattcgaccgggaactgatcgatcaggtgatggaggagatggcggaatcttttgcagatgaagaagcggcacagcagctggaaacgctcatttgccgcaaatatgcccggcatttggcgactggcgaccccaaagaccgcagcaaggcggtaaatggtctgctgcgcttgggatacgattacggccagattcgcacggcactgcggaatttaagtgaaacagaggagtaaattatggcgattaaagtggggatggtatcccttggctgttccaaaaatcaggtggacgcggaaatcatattagccaaactcagagagcggggttatcaaatccataccgattccggtacctgcgacgtggtcattgtcaacacctgcggatttatcgaaagcgcaaagcaggaatcgattgaaaatattctggaatttgttacgctgaaaaaagaggggcgtatcaaggtcatctgtgtgacagggtgcctggcagagcgctatcagcaggagatggcgaaggaaattccggaagcggatgtcattttgggcattggttccaatgatgaaatctgcgatgctattgaaaaagcgctggcaggagaaaaggtgcgccggttcggcccgaaagaagcgctcccgctggagggagaccgcattatttccaatttgccgtttttcgcttacttgaaaattgccgaagggtgtgacaatcgctgcacttattgcgcgatccccatgattcgcggcagatatcgcagcagggaaatggataacattgtggcagaggcgaagcgtttggccgctcatggcgtaaccgagctgaacgtggtagcgcaggataccacccgctatgggatggatttgtacggaaagcccatgctgccggaacttctgcatcgtctggcgcaaattgaaaatctgcgctggattcgcgtgctgtatacgtatccggattggattaccgacgagctgctggaagtaatggccgaagaagataaaattgtaaaatatctggatattccgctacagcattgcgatcagaaggtgctgcgggaaatgaaccgccgtggagaccggcagtcgattactgccctgatcgaaaaaattcgggagaaagtacctggtattgtgctacggactacgctgatcaccggattccccggcgagacagaggagcaatttgaatcgctttgccaatttgtgcaggatataaaatttgagcgtctgggctgctttgcctattcggcggaggagggaactcctgccggggagcgtgctgaccaggtggagcctgaggtgcgtcagcgccgggcggatatcatcatggaactgcagatgggaattatggaagaatataaccggaaactgacgggtacggatctggaggtagtggtagaaggatatgaccgctatgcgtccagctatttcggccgcagcgcagcagacgcaccggatattgacggtaaaattttttttaccagcaaaaaaaagctggcagtgggtcagtatctgccggtacatgtagacgatgtgctggattatgatttgatcggcagcgcgctgtaaaaatccattgcctgcaatacaacagaaatgaggattgtttttatgaatctgcccaataagctgacctgcctgcgaatgctgatggttccgttttttgtggccgccatggtactgtcgttttccaatcactatttgtgggcgctgattttgtttgtaacagcgtcttttaccgatatgctggatgggaaaattgcccgcaaacggggcctgattacggatttcggtaagtttatggatccgctggcggataaaattctggtgacgtcggcgctgatttgttttgtggaattatgggtgacaccggccgcagtgattattgtcattatcgcccgggaatttgttgtcacctccttgcggttgatcgcggcgcctaaaggaatcgtgattgcggcggacatttttggaaaaatgaaaacagtctcgcagatgatttgggttgcgactaccattgtgcaaatgtatctggaagaagagctgctcatcggtattccgctgctggcggagatgaacatcgttttgatgtgggtgacgttggggctgacggttgtgagcggaatcaactatctttggaaaaaccgcgctgtactcagcgacatgaaatagccaaaagggcaaatctgccgcaaagcaagggctttggcagaggattttacgattctcagaagcggcagaaaatgcgggaaaagagggctgacagctccttcttgacaaacaggaaaaagcgtgttattttaattattacatggcaaaatgcattgatcaggaaaagtaaccggataacgcccgccagagagagagcatgacccgctgaaagtgcttttgggaaacggattcggccaagtgcgcctgccagcacggatcgggaaatcagtatcgatctgcggaagacctccgttatcaggtgaaatcgagtgaaaaatcgaagtggaaccgcggtaaatacaccgccttcggccgttgacggcccgagggcggttttctttttggaccggccttttgggcggaaaggagcaaatcatgagaatttacaacacgttgaccagaaaaaaagaggaatttgtccccatcacccctggcgaggtaaaaatgtacgcttgcggaccgacagtgtataactatatccacatcggcaacgcgcggcccatctgtgtgttcgataccctgcgccgttatctggagtacaggggttataaggtaactttcgttcagaactttactgatatcgacgataagatcatcaaacgggctaacgaggaaaatactgattataaaacgatctcggagcggtatatccacgagtattggaccgatgctaagggactgggtgttcgggcggccaccatccaccccaaggccaccgagaccatggacgagatcattaagatcgtacaggatatcatcgatcacggttacggctatgaagtaaacggggacgtttacttccgggcgaaaaaattcaagggttacggcaagctatcccatatgccaatcgaggagctggatgccggcaaccgtattgatgtgacggaacagaaagaagaccccatggactttgcgctgtggaaagcggcaaaagaaggggagccttattgggagtcgccttggggcaaaggccgccccggctggcatatcgaatgcaccgcgatgatccgcaagttcttgggtgagaccatcgacatccattgcggcggacaggatttgatcttccctcaccatgaaaacgagattgcccagggcgaatgctgcaccggcaaggaatatgcccattactggatgcacaacggctatattaacgtggataatgtaaaaatgagcaagtccaaaggcaatttctttaccacacgagatgtggcggagaaatacggctatgagacaatcaagctgatgatggtgcaatcgcattaccgcagtcctttcaactatacgttggaagtcattgagtcctgcaaaaattctttggaccgcctgtataactgccgggagaagctggaatttgcgttggataacggcttggaggaagccactgagggagaagcggaatttttgcagaagtttgccgcagcgcaggagaagttcgtcgccgccatggacgacgatctgaacactgccgacggcctgactgccctgttcgatctgacgcgagacatcaacaccgctttacaggttccgcggtccaaagcactggcacaaaaagctgctgaacagtttgacgcgatcgccgacgtgctgggtattttatataatcgcaaaaaagaaacactggatgccgatattgaggccttgattgaaaaaaggcaggcggccagaaaagcaaaagattttaaaacggctgacgctatccgtgaccaactggccggaatgggtattacgcttaaggatacgccgcagggtgtgcaatggacccgcgcgtaaaataacaggtatcaaaaaagagcccccaaggggctcttttttcctctgaaagggagaaaggagctgcagatggaaaagaaactttcttttaacgaaaacgccgacaattacgaccgcctgcgtccccgctactgccaggatctgtttgcggacatcgccgcatatgccgggctgcaagagggtgcggcggcactggaggtgggtgcagggacagggcaggctaccggaccctttctggagaggggctgtcaggtgacggcgatagagccgggggcgcagctggccgggattctaaaccaaaagcatcgggagagcgcgaaactttcggtgaaaaactgtctgtttgaggatttttcggcgccgtccggttcctttgatctgatatatgccggaaccgctttccattgggtgccggaggaagccggatatcccaaagcaaaaaaattgcttcgtcccggcggtacgctggcgcttttttggaacacgcccgtcatccaaaatccggaaagcgatgcgatgcagccggcatatcagcgcttttttccagatgagagccgtcctcctcaatttccacaggagcgatttgacaaacgggaggcgctgatgcataaatacggcttttcctttgtgcagcgccgctattactacaaagagcggatactcacagcaaaagaatatattcttttgctggatacctattccgatgtccggataatggagccagacagaaaggaggccttttttcaggaaattgaagaggcgattctgggctgcggcggcatggtccgcattcgggatattatggatctgcatcttggtaaaaatttataacgaaaaaggccgggaaccctttgcggttcccggcctttttcgtgggcaggcggccgacctgaatcgatttgttttacaatcagcgcttcggagggtgatgcatggatttttgggtacggggtatccgcgttttcggagcggtcagcgcaaagctttcctcgatgagacggcgaatatctacgtccttcatgctgccatcaagaattatgctgatccagtgctctttgttcatgtggtaggcgggaaccacagcggaaaaggtccgccgccaaaaatccgcccacataggctgtgcttttacattgatccagatatgattttcccgttcgaaaatcagagcaaaaattttctggttggcccgatgccgtatggctgtccagttgaaatcatcaaaaggataatcctcataaacatcgggcagctgaaggcaggcggcaatggcctcctgtcgggttgtcatgggaaaagcactccttttcgttattttttcccgtcttgcagcgcctgtaaaattccttgatccgctggacaaaagtcgtactggcaaatctgacccgtgctgatccagcgaatggcgttatgctctagcagttgcggcgtaccggattcgattttggcgtggaataaagttaaatggacggtcaaatccgggtaggtatggatcagttccataaaaatatcttctacctctaccgtaacacctaattcctcctggcactcacggattagtgcctgctctttggtttcgcctggctccactttgccgccgacaaattcccacagcagaccgcgggccttatgagccgggcgttggcaaatcaaaaaacggctttctttccaaatgagagcggctactacttcagtcatcttttctctccttattttccgcgcagataggaaagaatctctgcggcattgtcatcgggttttacctttggcatagctttttcaatcaagccgttttcatcaatgaggtaggtggtgcgcactactcccatgctggttttgccgtagagttttttctcctgccaaacgccgtaagcctggattgcatgcagttccggatcggaaagcaagataaaaggcaactggtatttctgggaaaacttttgatgggaggacaccgaatctttgctgattccgatcaccgttacccctagagcggcgtaatcttcccaagcgtcggcaaaggcgcaggcctggcgggtacatccgggggtgttgtctcgtgggtaaaaataaagcacaacctttttgccggcgaaatcagacagggagacaggatgtccgttctgatccggcagggtgaacaaaggagctttttccttttcttgcagcattatcttcttcctttcttacaaaaaacataggtgttttcattggagagttcgggtgaaaaacgaaagtccaggcgatcaaacatcctggcttgttccggggtttggcatccatgctccgccaaatagcgaaccatctctccacgcgccattttgcaaagggttgccttttcccggattttcccgtcctgttcctccgcgaacacacaggtgatcaggcgagtttgagcgggcaggtgaggaatgacgctgcggctgtactcttttgacgcgagatttaaaatgacatcatcttccctgctcagagcaagcgccaaggcgtctgcccaaaaggcatacagatcggcggcgccgtccaccgccagctttgcctgcatttccagccgataaggagctaccccgtcaaaggggcaaagcaaaccgtaaaaaccggacagaattctcaagtgttcctgaatatattccagttccccataggtaaaaacacccggcgccatatattggtactgaattccttcgtaagccaaaatagcgggagtgagattagcgtacagattgatgcggtgcagccgctcatagttttggcaggccagcggttcgctgcatttccataaaacgcgcagctgatccaaggacatagtcagaagagaggacaaaagccgctgggtacaggcaagaaataaggggagatcccggcagtcaaaactgtcggtgtctacattcattttttttgcaggagaaatgataattttcatacggaaaggatccttctgcttcttttcagacatggtttgtcctgttttttacgcggccggaaccacgggacaaaagcattcgcccaccgtttcccacgggaaaagttttcattgtgtaaattatagtaaaaccatgggagaaagtcaacgagcggtcgcgcgcggtacagatgaaagaatttttgcaaaaaaacttttcgaaatccttgttttatgctatgatatttttcgtacgacgaacagagaatgcaaaaagaaggatgtgtttggatgatccggcgatttattcaatattacaaaccccagaaaaaactttttttcttggatatggtagctgcgtttttcattgcggtttgcgatctgttttatcccatgattacccgtaatatgctcaacgattatattccaaaccgtcagcttcggttgcttttgatcttttccacggcgctgattgctatttactttattaaaatgctgttaagctattttgtccaatattacggtcatatggtgggtgtttatatgcaggcggatatgcgaagggatttattccgccatttacagaaactgcctttttccttttttgatgaaaatgaaaccggtaacattatgtcccgcgtggtcaacgatttacaggatatttccgagctggctcaccacggaccggaggatatctttatctcttcggttatgatcatcggttcttttgtttacctttccagcattaatctgcttttgactgtcattatttttctgttcatccccatcctggtgtggttttctctggccatgcgcaaaaagatgaatatcgcttttatggagagccggcgcaaagtagcactggtcaatgccacgctggaaagcagtatttccggcatccgggtggcgaaggcgtttaccaacagcgcctttgaggaagaaaaattccagaagggaaacggaaaatttgtcaaagcgcgggagatgtcctatcgggcgatgggacaatttttcgcgggcaccggttttatcacagacatgttcaatgtcgtggtgattttggcaggcggcgtttttacctatcaaggaatcatcagctatggggattttgctgcgtttatgctgtttgtcaatttgtttatcaatccggtgaaaaaattaatcaactttatggagcagtaccaaaatggcatgaccggttttcagcgtttctgcgagttgatcgatcagccggtggaacaggagcgctctgatgcgggtgagttgaaaaatgtgaaaggcgaaatttgttttgaccgggtgaattttacctatgatgacagcaaagaagttttgcacgatattaatctgaccatccagcccggagaaaagttggcgttggtaggtccttccggcggtggaaaatctacgatttgtcatttgatacccaatttctacaaattagacagcggagaaatccggatcgacgggacgccgattgataaaattacctttgcttcgcttagaaaaaatatcggtattgtgcagcaggacgtatttttgttcaatggcagtattcgggaaaatatcgcatacggagatctgagtgccagcgaggagcaggtaatggaagctgccaagcgagccaatatacacgattatgtgatgagtttgccggaagggtatgaaacgaatatcggcgagcggggaatcaaactatccggcgggcagaaacagagattgtccattgcgcgggtatttttaaaaaatccggcgattctgattttggatgaggctaccagcgcactggacaacactaccgaagcactcatccaaaacgcattggacgagttgtgtcagggacgcactactattgtggtggcccaccggctgtccacgatcaaaaatgccgacgaaattgccgttataaccaaagggcgcattgcagaaaaaggatcgcatgaggagttgttggcgcaaggcggcatttataaggggttatatgaatcccagtttaagcctggtgtcgaaaacgattggatggaatgatcgaatgataggaaagaatagccgaaaatttatagtagcgctgcaggaggggaatctgcctgcgctttggacgataccgaaagcagaccttcacaatcattttgtatggggtggggcgggagtatatccggcgaaaaacagaaattgccatctgctcatgcaaaagcaggaacccctctatgatcaataaaaccaggagaagctgcaagaatagtttgccagtgcgtcgatgcagaaacgatagaagccgcttttgtacagggcaaaaacggcagtgaaacagtctgtatctaaatgaaaaaaggtgcccgaagcaaaacgcttcgggcacctttaaaaaatggtacaatacctcaaaaccgaaaacagacaaaaaaatgccgcccccactattgcaggaacagcacccctggtggacgataagggacttgaacccctgacctcccgcacgtcaagcggatgcgctaccagctgcgctaatcgtccatatcaaaatgacaaatgctattatagccgattctccttgaaaatgcaagaagattttgaaaatttttgaacaaaatccaaactttttgtctcttgatgggaaatcccgccgggatgttgtctcgaaaatttgtttgtgctataataatcacgattatgcggattcgttggatctgctgtgggccagcccttgcggcggatgctgaagaagtggctgcggccaggtctacgccgcaggaaacaggacgcgtaaatacgcgggacaggcaggaaaaatgctgattttagggattgatcccggatatgccattgtaggttacgggctgttggaatatcaaaacaatcgatttcgtacagtagattatggagctattaccacgcctgctgggatggatttttcccagcggctggaacggatataccagcagatgcaaatgcttttgacccaataccggccgcaggcgatggcagtggaaaagctgtattttcaaaacaaccagaaaaccgctattgatgtggcgcaggccagaggcgtgattctgctggcggcgcagctgcagggagtggagacttttgagtatacgccgctgcaggtaaaatcatcggtggtgggttatgggcaggcggtaaagaaacaggtgcaggagatgacccgcatcctgctgcatttggatgcggtccccaagccggatgatacggccgacgcgctggcgattgcgatttgtcacgcccattcgtccggatcgctgatgaaccggctgaaacagtaccagtaaaaaggaggaagcgccgtgttttattatgtgcggggaaagcttgttcatgtggaagagggaatggctgcggtagaatgtgccggtgtggcctttgcactgaagaccacaaacaataccctttccaagctgccggcattacaaacagaagtgacgctgtatacttattttttggtgcgggaaggcgcgatggaactgtatggcttttacgatcagggagagctgaactgtttccagatgcttttgaccgtttctggcgtgggaccaaaagcggcgctggcgattttatcccagctgtcaccggaaaagtttgccctttgtgtggctacaggggatgtcaaatccatcacccgtgcacagggagtagggccgaaactggcccagcggctgattttggaactcaaggacaaggtacagaacgagcagattgccaaaggggtagggatggatcatatcccggctccggccgtgctgactggcgccaatgtgcaggaggcgatcagtgccctggtggtgctgggatatacccaatcggaagcggcgtctgccatggcgaagctggacgcttcgctgccggtggaggaattgatccggctgggacttaagatgattgccactggaaagtaaaagcagattgggccagaagaaggaggaggggaagcatggaagaagaaatggattttgaaaaccggatcctgacgccggagtatgaacgggaggattcggatattgaagggtccctgcgccccaaaaccctgcaggaatacatcggccaggaaaaagcaaaggaaaatatgtcgatttatattgaggcggccagaatgcggggcgagccgctggatcatgtactgctgtacggtccgcccggcttgggaaaaaccactttgtcgggcatcatcgccaacgaaatgaacgtgaatctgcgcattacctctggtccggccattgaaaagccgggagatctggcggctcttttaaccaatctcggggaaaatgacatcctgtttattgatgagattcaccggctgtcgcgtgcggtggaagaggtgctttatccagcgatggaggactatgcgctggatattatcatcggcaaaggcccgtcagccaggtcgattcggatcgatttgccccattttacactagtaggagccaccacccgggcaggccagctgactgcgccgcttcgagatcggttcggtgtgattctgcgcctggagctgtatacgaccgaagaactggcccagattatccggcgcagtgctggaattttggggattccttgtgaccaagacggtgcagtggaactggcgaaacgcagtcggggtaccccccgtattgccaaccgcctgttaaaaagagtgcgggatttcgcacaggttatgggggatggcaccattaccttgacgattgccaagcaggcgttggatcggctggagatcgacggattaggcctggatgccactgaccgtcggatgcttttgaccgttatccgcaattatggcggcggcccggtagggctggaaacgctggcggcggcgatcggggaagaggcggtgacactggaggatgtgtacgaaccgtatttgatgcagattggttttttaagccgcacacccagaggacgctgtgttacccccatgggataccggcatttgggaattgccgccccgggagaagagaacggcgaccagctgaaactggatttctgataaaggagaaaaacgatggggaaactgtttggaacagacggcatccgtggggttgccaataaggaattgagcgttgatttagccatggaggtggcacaggccgcaggtacggtcatcaaagaaaaaatcggtcgcaagccgcgctttgtcatcgggcgggatacccgtctgtcctccagcatgctggaatctgccatggcagcgggcctttgttcggtcggctgtgacgtgcagatgttgggcgttgtgccaacgccggcggtggcctatctggtgcggaaactggaagccgacgcgggaatcatgctcaccgcttcccataatccgtttatggataacggcatcaaaatcatcagcggcaccggtttcaaactttccgacgaagaggaggaggagattgaggctattatcatcgacaacgagcgggtgcctccaaaagcggctccggaagagattgggatggtgaccgccgcatttgacacagtggatcaatatatggattatctggtcagtttgggagagggatccctttccggcatgaaagtcgcgctggattgcgccaacggatgcgccagtgttacagcgccgcagattttccggcggttgggagccgagtgccatgtgctgcatgcagaacctaatgggttgaatgtaaaccgggactgcggctccacccatatggaaaagctgaaagaatatgtcaagacgcacggatgcgatgtaggctttgcttttgacggggatgcagaccgctgtttggcggtggatcgaaatggaaacctggtggatggcgacgtgctgatggccatttttgcgctggacatgaaaaaacgtggaaagctgaaaaataatggcttggtagtaacggtgatgtccaatcttggcctgttccattttgcgaaagaacatgatattacaatgccaacgacgaaagtgggggaccggtatgtgctggaaaccatcattcgggacggttattgtctgggtggagagcagtcgggccatattatcttttttgatgatatgaccacaggcgacgggcagctttcggcggtacatttgctgagtattctggcgcgggagaataagccactgcacgagctgtgccgtattatgacaacctatccgcaggtactgaaaaacgtgcgtgctgacgatgagctcaaagcgtctttgtgggagctggacgatttgtttaaagagatggatgaccgcttgggcgatcaggggcgggtgctggttcggccctccggtacggagccgttggtgcgggtgatggtagagggtgccgattatgaccagattgaggaaattgccgggctgatcgcagctgccatcgaagccagacaaaactagggggctgcactatgaggattgccgatcagtggaaagattatgaaattatagatacctccggcggggaaaagctggaacgttggggcgatgtgctgctgatccgtccggatcctcagatcatctggaatacgcccaaaacgcatcctgcctggaaaaaggcggatgccagatatatccgctccaatgcgggcggcggcagctggcaaaatcgaaccttggacaaaaaagaatggaaaattcgatatggggggctgacctttaaggtcagccccactggattcaaacatacgggactgtttccggagcaggcggtaaactgggattttatggcccagaaaatccgggcggcgaaccggccggtgaaggtgctcaacctgtttgcgtacactgggggcgccacgctggcctgtgctgaagccggcgcttcagtctgccatgtggacgcctccaaggggatggtggcatgggccagggaaaacgccgcactttccggattgggggacaagcctatccgctggattgtagatgactgtaaaaaatttgtagagagggaaattcgccgcggcaatcgctatgacggaatcctgatggatccgccgtcttatgggcgtgggcccggcggcgaagtctggaagctggaggaacagatttatgagcttttggatttgaccgcacaggtcctttcagatgacgcgtttttttttctgctcaactcttacacgaccggactgccggccgcggtgatggaatatctgctgggcgttacggtagggcgtggccgggagggccgggtttgggcgtcagaaatcggacttccggtagcggcttccggtttttcgctaccttgcgggtccactgctgtatgggaacgttaacctgagtcaagaaagaaggaatatcacatggaaccgattttatcggcaagggatgtatcctttgcgtatgacaattatgaagaaaagcaactgccgcccattgtgctggaggacgtttccctggatattcagccaggggagtttgtggcagtactggggcacaatgggtcggggaaatctacgctggccaagcatttcaacgccattttgctgcccactgccggtaccgtttacgtcggcggcattgacacaaagcaagaagaccggctgtacgatatccggcagacggtgggcatggtgttccagaatccggacaatcagttggttgctacgattgtagaagaggacgtggcttttgcactggaaaatctgggcgtaccgccggaggagatccgccgtcgggtggatgagtcgttgaaagcggtgggcatgtatgaataccgggaacacgcgccgcatcagctttccggtgggcaaaagcagcgggtggcgattgcaggcatcattgccatgcggcccaaatgcattgttctggatgagccgaccgccatgctggacccacaaggccggcgggaggtgcttcgaaccatccgtcagctgggggatcaattcggcatcacagtggtgttgatcacccattatatggacgaggctgcccaatgtgaccgggtggtggtagtggacaacggaaaggttatcctggatggcgcgccccgcgcggtgttttcccacgtggaacagttaaaaaaggtggggcttgatgtaccgcaggtgacagagcttgtctggatgctgaggaaggacggttataatttaccggacgacattatatttgaggatgaatgcgtccaggccattgaaaaactgttggaggaacgccatgtcagtcattaaaacagagcatttgacgcacacctattcacagggaaccagccacgaacaagcagcggtctctgatgtcaatttagaaatcgaagcgggcgaaatgatcggcgtgatcggccataccggatcgggtaaatctaccctgatccagcatttcaacgggcttttgcggccgacctccggtaaaatttacgtagatggcgaagatatttgggagaagcccaaggaaatccgccgcatccgttttaaagtggggttggtgttccaatacccggaatatcagttgtttgaagatacggtctataaggatattgcttttgggccaaaaaatatgggcctttcagaggaggagattgaccggcgggtgaaagaagcggcgcttttcgtaggccttaagccggagcatatggaaaaaagtccttttgagctttccggcggccaaaagcgccgggtggccattgccggcgtgatcgcgatgaatccggaggtgctgattctggacgagccgaccgcgggactggacccaaaaggtcgggaccggattttgggccagattctggaatatcacaaagagcaaaaaaataccattctgttggtttcacacagtatggaagatgtggcgaaatatacggaaaaggtgctggttatgaaccacagcagggtggccatgttcgacgaagtggaaaaggtattttcccacagccgggagatcgaggctatgggtcttgcggtgccgcaggtatcgcgggtttttctgtcgctgagcgaaaagggatggccggtgcctgccaatgtctatacagtagagcaggcaaaaacagcgctggaaacgattttgcggcagggaggtggcgccaatgcttaaagatattaccatcggacagtattttccaggaaaatcggtgctgcaccggctggatccgcggatgaaaattttgctgacagtgggttatattgtcatgctgtttaccgtatccaatccgttggggctgtgcgtgggtattttatttttaatctttgcctatgcgatttccggtattccgccccgcatgattaccaaaagcttaaagccggtgattcccattatcatttttaccaccgtgctgaacatgtttttcgtcaaaggtgacccgctgtttgactggtggattttccacatttcccgccagggacttttgacggcggtggttatgaccatccgcattatctgcctgatcgccggcacttcgcttttaacttatacgacctcaccgatcaccttgactgatgggctggaacgactgatgaagccactgaaaaaagtccattttccagtgcatgaactgtccatgatgatgaccattgccctgcgttttatcccgactttaattgaggagacggataaaattatgagcgctcagaaggctcggggcgctgacttagaaagcggcggcattatgcagcgggccagagcgctggttccgattttgatcccgctgtttgtttcggcgttccgccgggcggatgagcttgcgttggccatggagtgccgctgctatcggggagatgtgggccgcacccgcatgaaacagctacattacagctggcaggatggcgtagccgccgctttgacgattgggtgtattgcaggtgtaatcatggtaaatatttttgcaccggtggtgttttaaggaacaaaaatcctttggtgtttgaccggatacaggtggaggagagagcggggatgcgaaatattttaatgaccctttgctatatcggtaccgcttatcatggctctcaggtgcagtctaacgcattgtcggtgacagaagtggtacaagacgcaatggaaaccgttctgcactgccgggaggacgtaaaaggctgctcccgtaccgatgccggagtgcatgccaatcgtttctgcatgaatttccatacggaccatccgatccctctgtatgcgcttaaacgcagtctcaatgcgcttttgccggacgatattggggtgttggactgccgggaggtgccggtggatttccatgcccggtacagttgcgtgggcaaacggtatcggtatctgatttggaatgcagatggaaaaaatccattttaccggggccgtgtgctggaatactggcagccgttggagttggaaaaattgcggccggtgtgcgaactgctgcgcggcacacatgattttcggggcttttgcagttccaaagcggatatggaggatacagtgcgctccgtttatcgctgtgaagtggaacggcagggcagtctcgttgtctttaccatagagggggatggctttttatataacatggtgcggattatcgtaggtactctgctgcgggttaacgaggggaaaatcagtcttgatcaggtgcgtcgggcgctggaagagcggaatcggtctctggcgggcattaccgctccggcctgtgggttgtatctggacgaagtgttttatatgcggccggatcgttggggaaacggatgagaaaattcatttttctcatgcaccttttcccatatatcaggaaaaagaagaatccaatcggaaaggatgagccaaaatgggacagctggaagatatcgaacggctgcgcaaaaagcgtaaccggcggcaaaacctcaagcgtttggggactttcctgttggttttggccatctttttcggcatttggtttgtttgggaaaaaatcaagcagacaagcttggctgaacagctggccggaggatttgcggaactgggttcaggtagtggctatccgatggaaatttccggcgtaacagtccgccaaatggaaaccatggggaatgtgctgctggttctgactgacacccacctgcatatctataataaaaacggtaaattactgcgtgaagttcagcatgattatgcgaacccggtgataaaatgttccagcagccggattattctgtacgatccatcctccagggtgctgcggatagaaagcaaaacaaaaacgataaaggaaatgacttttgacgaaccggtactattcgctgtgctgtcagatgaaaatgatttggcggtgatcaccaatccccagcgctttttagggcagattatcgtatacgatcactcgctggaggatccggttttttcctggaaatcagcagaaagctatttgtatggggcggcttttgaaccgggcggcgacagcattgcagtgccttcggtgcaggtgcaaaacggcgatctggtcagcggtttaactttataccggctaaatgaagaaagcccctttatgcagcagcagtatgtggacgaaaccattcacgacatcagctatcaaaatggtgaactgcaggttttgaccgaccagaatgcctactattattccgaatcaggcaaggaaaaagcggtgatttcttttcaggaggaaccccttcgtatgttttgttcgaaaggtgaaaagatttctgctttggtgctgggagattatcgggagtttaaatcggtcaaactgtctttgctgggtgcttccggtgaagcagaaggcgcggtatcgctgcaattttcggtggacgatatagatgtcaatggcagccggacggcactgttggcgggcaactgtatagaaatttataatgcgaaaggagaactggttcagcagatcacgccggatacggaggtcctgtttttggcgttgggcaacggatttgcttattatgtaacgccggatgccatctgccaggaaccgctttcctgattggatttttatattccagacagatatcctgagaaaagagagaagggatcaatatggaaaaatttctgccgttttttttggatttggcagcggttttgtttgtaatcggttatattcgttcggcggctcgccgtggatttgttcgcacggtcgtgcagctgatcggttttttcatctccttgttcctggcaaatacgctgtccggtgtggcggcggagtatactttttcgcattttatccagcaaggactgacggataagatctctgaacagatcgtatcctccggttctgctgacggctttttgcagacgctggcggcagtgctggaaagtattccctcttatttgcgcaacgcgctggaatttgccggactgccggcggatttaacgctgccatctattgcggacagtacagagcagctggcggcgagtattgtggaacaaaccatagggccgacttgtattgcgcttttttccaccatcttttttttgttgtttttttcacttttcatgtttttaacccgtatcgttgcccggtgttttacaggacttcggcatattccgattgtggggccgcttaattctgttttgggcggctgtgtcggtgcagtagaaggagtgctgtatctgtatttgatggtagccattgcaagccttgttctggcgctgacgggcgacagcattccgtatttgaaccggcagacactggaaagcacctggattttgcggttgtttttagaaaaaagtgccttaggggcgctgccgacgccggatttttcgggatatattgctatcgggcaggcatttttgcagtcgattacaggcggctaaagtttttttctgcgcgaagtttttttcatagccagttcacatttgctttttataatgagcctaaatcaaaaatgataaacaatcacgactgtttttgaaagatatatgaggtgtagattttggcaatgagtatgttgtgttccagatgtaaaaaaagagttgcggtggtgtttatgacccggatggaaaacggaaaaaccatcaatgaagggctgtgcttacagtgtgccaaagagctgggcatcggcccggttaacgagttgatggagaaaatgggcatcaccgacgacgagattgaaaatatgaacgatcaactgatgggtatgatggatgaagacggggaggaaatagatctggattccgattctgacgattcggattttgttcccggcggagcccaaacgtttccctttttgcagaatatgtttggcaaaatgaacggagcagcgggacaaaatccgcaggaaaccccggaaaagaaaacccgtcggccagacaaaagagagaaaaaggcgccgaagcggaagtttttagaggcatactgtacggatttgacccaaaaagcacgggatggtcagctggatcgtattattggccgtgatgaagagatttaccgggtagtgcagattttgaaccgccggacaaaaaataacccctgcctgattggtgaacccggcgtgggcaaaacagctattgctgagggaattgctcagcagattgcgtcgggaacagttccgctgaagttaaaagataaggaaatccatttgttggatatgactgctcttgtggcaggcacccagttccgaggccagtttgaaagccgagtaaaagggctgattgacgaggtgcgcgcactgggcaacatcattttatttattgatgaagtgcacaatctggtgggcgccggcgatgcagagggttccatgaatgctgctaatattttgaagcctgccctttcccggggtgaaatccaggtgatcggcgcgacgactttcggcgagtaccgcaagtatattgaaaaagattcggcgctggaacgccgttttcagccggtgacggtaaacgagccttccattgaggacgcagtccgggtgattgaagggatccgcagctattatgaaaaatatcatcgtgttacggtttctcctgaaatggcccgtaatatggttgtgttgtccgagcggtatatcaatgaccgttttttgccggacaaagccattgacctgctggatgaagcttgctcctgcgctgctttgcgcaataaggaaatggctgagtacgacgaattgaacaaaaagctcttgacctcccgccagcgggtggaggagctagaaagtgatccggagcatttggactatgaacagctggctaaaatcaaagcggatcagctgcagatggcggcccggctggatgagttggaaccgaaagcgctgggcgccgcagtgaccagcgaggatgtagccaaggtcattgaactttggaccggcattccggccagcaaaatcaaagagtctgagttaaataaagtagcgcggctggaggagacactcaaaaagaaaatcatcggacaggatgaggcggtagaactggtggcttctgccgttcgccgcagcagagtgcagatctctgcccgcaggcggcctgcatcttttatcttcgttgggcctaccggcgtgggaaaaaccgaattggtacgggttctgtctcaggaattgtttgattccaccgatccgctgattcggctggacatgtctgaatttatggagaaacattctgtttcccggattgtaggagcgcctcccgggtatgtgggctatgatgaggccggccagctgaccgaaaaggttcgccgccgtccgtattcggtgatcctgtttgatgagattgaaaaggcccatccggacgtgatgaatattctgcttcaaattcttgacgaaggaaaactgactgacgcccatgggcgtacggtgtcttttgaaaatacggtaatcgtgatgacctccaatgcaggcagtgagcagaaggagagcacggtcggctttaccaaaaacgaagcacaggcccgaaaggaccatacctataaggcgctgtctcagttcctgcggccggaatttctgggccggattgatgaaattgtcactttccgccaactggatgagaaggattatgagaaaatcgcggcgctgatgctgcaggagctggtggaacccatgaaagaaaagggaattacctttggctgggatgaggcagtattggctttgattgcaaaagaggcctacggcaataagagcggcgccagagacctgaggcgagtgattcgccgtcaggtggaagatccgatttgtacgctgcttgtggagcagattgacgggcaggtggctttgataaaagcgatcgataaggatggaaagattgagatcgtatcagcgtaaataaagacgcaaaaaggcgggttccccgccttttcttgcgtataagtggatgatggtggagaaaataaaatgggattgacacaagaatgtgccgaaaagcattgacaaacagaccatagtttgataaaatatcatctgtcgttaaagtctgcgggtgtagttcaatggtagaattccagccttccaagctggttacgtgggttcgattcccatcacccgctccattacatccgattcgtgttgacatatgcgccaatagctcagctggatagagcaattgccttctaagcaataggccaggggttcgagtcccttttggcgcgccaaatatggtgggtatagctcagttggttagagcgccagattgtggctctggaggccgtcggttcgaatccgactatccaccccatataaaagaaaaaggctttttgcctttttttcatatttgcctgaatatgggagtcctattttggcaagaatacatttggatattgggctgtcgccaagtggtaaggcaacggactttgactccgtcatcccgctggtccgaatccagccagcccagccacgtcggagcaagctttgtatcgcttgctctgatttttttgtaaaaatcagagcgcacacacgtcgctacccccctccttttccgcaaaaggtcgcactcggctcgcctgctcggttgtaaacgccctcgcgacagctcgctgtcgctaccaactttttgcggagtaagcttacagcgtcggcatctaaagtgttcacgatttccaaccctgcggtgagcaagtcgcgcaccgtggggcttttcacgttttgagccttccggcccgcacttgtgggggtattttctttgtacgaaaaccccaaaagaaaaaggtctggggccgtttgtgccccagacctttttaaccgaaatacggcgcccatatctggaaaggtgcctgtccttgtcttaaaaaagagatgttgacacaagctgatggaaattaataacaagaaccctcctgccgacaaagcaggagggttcttgttattgggcaggaatctggtagatctctcttgcgcttcttgtaatactgccgccaatggaatccaggccgatttcttctggatttaaaggccactgagagccctttgccgcatgataaataaaataatccggaggttctgacagatctgtttcgctgtttttcccttcgttttcaggggtggggacggcaaacaaaaccgcatagttggaaagaggagaaaaaccggacatctgcggattttcatatattttttccactttgcaatccgggacaaaaatacggtaaatacgatgatcggacaggaaatagaacagataacgattgtcccaataaagcctgtcgataggctcatcatgagcataaaacaaccgaagggtcccgtccagctctttttgataaattgcattttcgtccggtcggtactcgaacagggcgtagccccacccgtctgtttcccaatacctttcctgagaaaagtattcttcataagaaagattctcttttgatagacgttcatatgtttttaaaataatggattcctgctcgctcaggctgtgaaaggaggaggcggatggaaaatcacccggcagagacgctgactcgaagggaaaagagctttgttccgcggctggcgtgccgccgcatccgttcagaaaaaaacaacctaaaaagatcagagaaatccagaatgcctttttatacatggctgtatcacctcggattctgtctgctctgaagcacttggaaataagcgggacgatttcaagagatcagtctaacaaactatatttttcctggtatatttcttttgacaggagagtcttttcttttgtctcaagattataataataaatatagtcgttttcatctgtcaaatgagtttttctgtctttttcaaaaagaatgatggctttattatgataaggatgccaatgaaagggactttcagaagaatatacttcttcgattacctcaccaggcaaaaaaactctgtaaacagaattgccagatgaaaagaaaatcaaatcgttccccatataagagtacgtttttgtgtctacctccatgtccgtttggtaaagaggggaaaaaacgccattcgctattgcgtaaaaagtctttaaatgcggcagaaaacacttatcttctccaccaaattcatacgccctttcctgtgaaaagtattcatcataggataaaaatcttggaatgttgttttcattggggatgatacattgattctctatatcatacaggttttccggggagagggcgaaaaagcgatttctaaggattcggtcgtcgtaaccatatgcttcagggaatacttctttttcttcctgcgttttgtggttaaaaaggaagaatctgcgcttagaatcgtccacagtttcatacaaaatagtaaaattggtcaaaggctgaaatgtgacaattccatcgcggcggagaattgtttcaacattctgattttgcagcgaaagacgatatatggttccctctgaaagaaaatagaagcaagcgtgattatagtaataagctgtttcgatcgaagttggatgctgataaaaaatctggttatcttttttgagaacaaaagtattttgccatggattaaaaccataaacatgctcaaatagatcgtagtgataatattcttcttccaaaagaagttcctcacttgaggaggtaaagctatttatttcttcgctttcatcggatagggaaagttgtggtgaacttcgattgcggcagcctcccaacagaaataccattatacagcaaatgagatagatacgcttcataaaagtcctccctccaaaaaaggaaaggtgtcattttattttgccatcccaacttaattgggggtgcgagctctaacataggtatcaaaataatcataaaattgttcagcagtgaatcttgttatcgtcacaagattgtgtgtggtgctaaaatttgcatggtagacatcaatataatttttccctaccattgagaatgtctgcaactttatcatggtatgtctatagtttgtttttttgttataaaatctcatagaacttccttttggtagaccgtctacactgttaaaaacatccgatgcactggaaaagcctccgggttctaaatatgttccataagtttggcttccccacaaataagcataaatctcaagcccaaattgctcacattcattggctcccggataaatatcattgattctataaccagccaatggtcttggaatctgttttccatttaaaaccatggtatacgaagataaattcgtatatccagaggcccgagtgagatttaatattcgttctggatcttgctgtaaagacgatgtttgcgttcggacatcaaatgtataacaaaggctattgtcagatacacagtctgtgcacaatcctttcgcattagcaggagttgaagcttttgtccacaatacaacatgacttgtgatgggataaaagctttccatcatgggctcggtaaagacagcatcgatacgttttgattttacatgatatcggtaaaccgtatgatcgattgcgaaaaatacgatctcggagttgccaataatgccagtaacttcctgcccgtttcgtgtaattgttccattcgcttctttttgaacaagaggagaaaacaaaccggtggacatattgagatattgtttcgatttggtaatcgtatccagataaaaaccatgctcgttctcaaaataatcctcgtaagaaagcatttttgcgtctggaatggcatcttcagcaaaagcaatcggcggacataaaagaataaccattgtaacggataagatggcacataataaacttattctcttccttttcataatggcatctctttcttttgtaacatgattgacttcctgctttcataaaacatgcgcgctttgttttatgattctacttaaaacaccttttttaagtagaaat

SEQ ID NO: 3413 - DNA, 5036 bp, Unknown
  16S sequences of unknown bacteria
gagcgtcgtcatgctgtcgagatagcacgcggcgagacggccgagaccgccgtttccgaggcccgcgtcgggctccatttcatatattttatccagctttacgttaaagccggcaagagcctttctgacaggctcggttattcccaaattaaagagactgtttttaagcgagcggcccataagaaattccatacagagatagtagacctgcttggaattctgctgctcggccttttcgataaattcgttgcggttttttacaagaatgtccttaactgcaagcaccacggccttataaatatattcgtctcccgcgtcctcggggcgaagcccgaaatgagtggagagcttttcctttataagctcggaggctctttcggcggtaagcttgactttcataaaacaatcctcctcggtcggctgtatgtcggaaggctaaactcggaacgccttcggcacgccttatacacacttattttaccataatatgcgtcaaaagcaatagccttacggagagaaaaagggtctttaatcaaaatttacggtttatttacaagcgaaaaagctccttttcggcacatattaaaacaccccgcagggtcaaaatccaagcagggtgttcgggtcggtttcgaaaagctcgcaaagagccacaaggcgctcgagggagggcacccttttcccgatttcgtaataggcatatgtcgaacggtcgatggacagtctgtcggccacctgccgctgtgtatatccgctgtccagtcggtgggttttaattctttttcccaaagttttcatctcattatacatatcatcaccttttatatattacacttttacatatggtatgtcaacacattgattgtttggttattttatatccattattattttattaaaaggaagtggttacatggcggacaagcgctcggttctgcttttaaaagattacggacacgtcgagataaggcttaaagagttgcttgacaaggcgggaatgacccgaaatgctcttgccgacgccataggttcaaactttgaagttgtcaacaagtggtacagcggagccttgggtaaaatcgacgccgacgtccttgcgcggatatgttatgttttgcaatgccgcgttgaggacctcatcgtttacagggaaaaccgaaccgaataacacccgcggaaaaacaagcggtatgcgacagacgagagcttttgcatattgctttttttctttggtgtgttaaaataaaagcggtgatatttatggcagaaaacaaaaatatttattccgaaagcatttcggtcaaaagctatgacagcgatatgttcaaggaaatgtcgattcccgcgattatgcggtatttccaggaaatcggggggcatcagcttgcgacggtgggactgccctatgagaaaatgtttgccgacggggcggtctttctgctcaactgcgtggatatacatataaacaggcccattcccctttggcagccgcttaccatagagacatggtgttacggcgtcaatggcgcgattttcacacggaacaaccgtcttaaaaccgcggacggcgaggtcatggccgaaggctcggcgggatggtttcttgtcgaccccgaaagccaccgcataatccgtcccaaggaatatcccccggcgctgggaattcccatggcggaaattccgctgctttcggacgggcgggtgcgtataaagcgccccgagcagggacaaaagctttgcgacaggtttctgtgcactctgtcctaatcctttgccaaataatcctcctgacgccgattacaaccgtcatctgaacaacacaaaatatgccgaaatcataaccgacctttgcaccgacgagcttgagaaaaagcgcatacgggattttcgcattgtttatgcgggggaagcccgtgtgggagacacggtggagattttcagagaaaacgacgtctttttcggaacaagggacggcgagcgttgttttgaggccgaggtcggatttgagcaacggtaaagagatttttgcgggcggcggccgaattttgccgagcggccgaataaaaatcttgcaaaaatttgcccgatgtgttaaactgtttgagcccgagaaaaacggacgcgcgggcgtggcggaattggcagacgcgccagacttaggatctggtggttttaccgtgggggttcaagtcccttcgcccgcaccattgcttataggtcggttaagaggttttccttttaccgacctttttactttttgtttatcggtcaaatcacggttcgcctcgggctcccgttctttggaagggacttccctttgaaaaacattcccccgaaatgtttttcttcggcaacttcgcccgcaccgcgtcggaacaagttacgctcgttccgatttttttatttcataaaaaatcagtcacccgcttcactgttcctccttattcgcaaagggtcacgttcacgtcggctactcatttgcaagcgcattcgtaacgcctttggttcactaccaaccctttgcgagaatgccttcggcattgtaaccgttgattttaccgtgtttttcattaaaccccttaaaagcacacacaaaaaaacggcgattttcggcagaaagttgtcgtttctttttgtcttcttctctgttctctctttgtttttatctcttctctcgaatcgccgtttccaaagaatagtgaaaagtgaagagtgaaaagtaaaggtggctttgctgtgcaaagccttgattatgttgctgtgtaagacttcatatacttgcaactcggaaagaacaattgttccgtttcgtcacgcaatcacacttcctataggtcggttaattttcttaaccggtctttttttacgcaaaatcggggataataaaaatatatcggcaaaaaaattgcaaagcccttcttttgttggaaatccaacagatttaaagaaaaatttatcttataattcaatcggaaaaccaaagaatatcgggcgaaaaattaggggcaaaattcggctctttcgggcggcggatgtcacttgctcaaacggcggccgaccaaagctctgcccctaattttttgcccgatcggaaaagagaggatgttaatatggacaacaaaatgttctgttttcagtgcgagcagaccgcgggctgctctgcctgcacgggaaaggccggcgtttgcggcaaaagcgccgatgcggcaaatcttcaggacaagctgaccggtgcgctcatcgggcttgcaaaggcaacagacaattccccgaaggtaaacggcgacacttggcagttgatgattgaggggcttttcgccaccgtaacaaacgttaatttcaacgaaaaaacccttcgggaaataatcggtcgggtgaaaaaggaaaaggtacgacttatgcccggctgctcggagtgcgccgccgtgtgcgggcgggtcgacgactatgacctgaaagagctttggcaggcgcaggaggacatacgcagcctcaaatccctccttcttttcggggtgcggggcatggcggcctatgcctatcatgccatggtactcggttataccgacgaggaaatcaaccgcttttttgcaaaggctcttttttatgtgggcgaggatttcggccccgacgagctgcttcccgtcgtcatggaggtgggagagaaaaatcttaaatgtatggctcttcttgacaaggcgaacaccgaaagctacggaacacccaccccggtcacggttccgctcacggtggaaaaaggtccgtttatcgtcgtttcgggtcacgatcttcacgaccttaagctgctgcttgaacaaaccgagggaaagggcataaatatctatacccacagcgaaatgctgcccgcccacggctatcccgagctcaagaaatatccccacttaaagggaaatttcggcacggcatggcaaaatcagcaaagggagtttgccgacattcccgctcccgtactgttcacgaccaactgtcttatgccgccgaaggcaagctatgccgaccgcatattcaccacgtcggtggtatcctatcccgaaatggttcacatcggcagggaaaaggatttttctcccgtcattgaaaaggctcttgagcttggcggctatgatgaggacaaaaaattcaccggcataaacggcggcggaacggtgaccacaggatttgcacgcggtgcggtgctcggtgcggcggacaaaatcgtcgaggccgtaaagaacggcacgataaagcactttttccttgtgggcggctgcgacggagctcgtcccggccgaaattattacaccgaatttgtcaaaaacactcccgccgacacggtggtgctgacccttgcctgcggcaaataccgcttcaacgaccttgacctcggcacggtggggggtctgccccgtcttatggacgtgggacaatgcaacgacgcatacagcgcaattcaaattgcccttgccttggccgacgctttcggctgcggcgtaaacgaactgccgctttccatggtgctttcgtggtatgagcaaaaggcggtgtgcatactgctcaccctgctttacctcggcattaaaaacatccgtctcgggccgtcgctgccagcatttatctcccctaatgtgctcggcattctttcggaaaatttcggtcttgccccaatcacaacgccgaaagaggatttggagcagctgctgaaataaggacggtacgcatgaatataaaaggagcttctcacggccgtgagaggttcctttttgcttaatgaaagaggcggggaagaaatgacaatccctccgtcacggctgcgccgtgccacctccctttacacaagggaggcttgaacgtacaaggcctattgttttttatttctatgtgggaaatataaaatcttttgtttggtttcggtgccctcataaaaaacgaaaatgtgtttttgctcggccccgccaaccttgtataaaggctgaaatcgacctttccgcagcccccggctcccttgtgtaaagggagctgtcagcgaagctgactga

SEQ ID NO: 3414 - DNA, 13317 bp, Unknown
  16S sequences of unknown bacteria
cctgccgctgatcgtgctggccgtgctgatcgtgctgccgcttgatctgctgagcatgaaggtatgcgtgctgctgaccgcgatgccggcagccaacacgaccgtcatgctggcggggaaatatgatcgtgatcccgcctttgcctcagagctggtcatgacttccacgctgctgtctttgttcaccatcccgctgatcagcggcctgctttccctgatctgaaaaggcttgatgaagcgggccagaccccgtataatggaacggtgtgtttaaggggatggataacatggaagttactttacagatgctcctgatcgtctgcccgatggtctttctggccgggttcatcgatgcggctgcgggaggcgggggactgatctcgctgccggcgtatttcctggctggcttgccggcgcatacggccatcgcgaccaacaagctgtccagctcgctggggacggtggcagccgcgctgcgcttttaccgcaaccggctgatgcagaaggatgtggtgatcctgggcatcgtctgcgcgctgagcggatcggcgatcggctctaatctgtcattgatggccagcgagaatctgatccagctcatcatgatcccgctgctgccctttgtcgcttattatgtgctgcgggggaaggggctgaaggaacatgctggcgaacatgaggtgtcgcggcgtcgcgtgctcaccgtgaccgcgctttccgcctttgtggtcggcatctatgatgggttctatggcccggggaccggcacctttctgatcctgctgttcacttcgctggctcatatggatgtgcgcatggcttctggcaatgccaagatgctcaatctcgccagcaatgtcatgtcgctgacggtgttcctgctcaatggcaaggtgctgttcgccctggggatcccggccgcgctgtgcagcatcgccggcaattatctgggcagcggcgtcgtgctgaagaacgggctgcgcgccgtacgtccgatcatcatcatcgtgctggtcatcttgtttgtccgcctgatcagcgaactgctgtgatcgctctggaaaacgagagaaaagcgcgctaaaatgaagaagagaaaaagactgcatcgcggcatgcagtcttttgagaaaggaatggttgtaaatggaaaagagcaaggtatattttacggatatgcgggcattgccggggacgagcctgccgcagaagctgcagaagctgatgcgccgcgccggcatcgcagacatcgactttgagcgcaagatcaccgcgatcaagatgcactttggggagccgggcaatctgtcttacctccgcccgaactatgcgaaggccgtggctgatctggtcaaggagctgggcggacgtcccttcctcaccgactgcaacacgctctatgtcggccgccgcaaggatgcgctggagcatctgagcgccgcgtatgagaatgggttcagcctgttgagcacaggctgtcatgtgatcatcggcgacgggctgaaggggacggatgatgtgtatgtccctgtgcatggcggggagctggtgaaagaagcgaagatcggcaaggccgtcatggatgcggatgtgttcatcagcctcagccacttcaagggacatgagatggccggctttggcggagccatcaagaacatcggcatgggctgcggcagccgggccggcaagatggagatgcaccgcagcggaaagccgagcgtggataaggaaaagtgcgtcggctgcggtgcctgtgcccgcaattgcgcgcatggcgccatccgttttgacgaacagcgacatgccggcatcgatcatgaccgctgtgtcggctgcggacgctgccttggcgcctgcaactttgacgcggtatacaacagcaatgattccgcggtgaaggagatgaacatgaagatggccgaatacacgaaggcagtgctggatggacgcccgcatttccatgtttcgctggccatcgagatctccccgtattgcgactgccatccggaaaatgatacgccgatcctgcccaacatcggcatgttcgcctctttcgatccggtggcgctggatcaggcatgcgccgacgcatgcaatgccgccgcgccgctggccggcagcctgctggatgagcatatgcacgatgcgcatttccatgatcaccatgatcatttccgcaatacgacgccggagagcgagtggcagacttgtctggaacatgctgagaagatcggcgtgggcacccgcgcatatgagctgatccggatatgagcacggtgtatctgctgtgcggacaggtggccagcggcaagagcacgtatgctcggacgctggccgaaagggaaggcgcgctcatcctctcgggtgatgagctgctgctgaagctggaagaccgctgccagggacctgcgcaccagcgggagatggaagagcggatccaggcctatttcctgaccctcatcctccagctgcagaagctggatgtgccctgcgtgctcgatcatggctactggtacgccgatgccagagcgcaggtgttgcgcttttgcgcggatcatcatattccgtgtgaagtgatctgggtgcgctgtcatgaacagacgcggaaggaacggctgcaggcgcgcaatgcgcggctgagcgcagagccgggccgcccttatctcatcgatgaggagatgctggcacgcttcgaccgctggttcgagcccccgcaggatgcgcatatcctatggagcgacgcacatgacgcggggcggtaagctgcggctggcgctcctcgcctgcctcatgctctttttgctttcgcccatggcgctgcaggccagggccggcggaggaggaagcagcggcgggggcggaggatcttccggcggatcgtcctctcattcatcgggacatgcccgcggcacctcttctccgctgtcttcgctggtgtcaggcggcgccttcatgctcatggccggcgcgggcggcatcatcttcgccgtgcacctgcaccgcaagcacagcgcgtcccgcgcgctgctgaagcagatcgacgatcaggactatcactggaatgaggccgtgctcgatgagcgggtggagaagacttactatgccgtgcagcgcgcatggagcgacatggatctggatgcgcttcgcgcttatctcagcacgcgtctgtatggccgctggcaggtcaagcttgctttcatggagatgaaccatgagcagaacatcctgcaggatatccggctgctcaagcataaggtcgtcggcgtcggcgacagccgggatgacgagcaggatttctgctggtattacatcaagggcaggatggtcgactataccatcgatacctgcagcaaccagctgatccaaggcagcacgaagccttcttcctttgaggaatactggcgctttcagcgtcaggatggcgtatttgtccttgatgagatattgcagaaggatgagatctcgctcgatcagttcacggactgcagcgaggcgctggaatcagcgcagcgcgaaaaggaataagcaaaggagcggcaggcaccgctcctttttgcctgcagaggatctctgcaggattgatctatgcttttctgcgcttcttcaggatcatggagagcgcgccggctgcgcccatgacgctgatccagagccatgtgttctgccgcgctgccgtatccgtatcttcggcgtcatctggctgctggacacgcagtgccgcgatggcgtcttgcagcgcgcgcagcgcgttttcgtaatcctgcgcgtcgctgtctggatcggccagcacggccttcgcatcgcgcagcgcctgctggaacgcgttccagctgtcgtcggtatagtgttcgtttcggatgctctgcgcatggctgagcgcttgctcgagctgttccttttccgtcatcgttccctcgatcttctgcagcgcagcgcgggcttcgttgagccgcagcagagcagcttcgatctcttgctgagtcgcagagtcatcgttgaggatcgactgggcgtgtgcgagggcctcctggaaacgtgcccagctctgcttggtgtacccctcgttcttgatcttcagatcctcttcgacctgggcagcgagcgccgctttgtccgcagcgctggctgcgctttgctgctggatggaaagggagacatggaatgttccttccacattaggcacttccacatcgaagctggaagaatcgctcagcgtgatcgggacgcggtaaacctcacgttcgtcttcgacgttggtaaagatgacatagcctcggaaagcgtcatcttcatcgtcaactgagaaataagtgagggtgttgccattgcggtctttcaggtccgaaagcgagagcgagatccgctcatagccagtgaatgtatctgtccagctgttgttttccagcacgccgctgaagctgtcgaggatgtcgatatctacttcctgatcctttgcggtgatgagccggtggaaggaatagaatgtatcgccataaagcgaaaggttcatgtcgtatgatcctttttccacagatgtaagggtgttgcggatgtaggcgtagtggctgaagctgccgccttctctgccggagagggtcagtccgccttctgttccccatgcggccggccagttgacacggacgccggtgaggtcgaagccgacatcgacctgctgatcgccgctgacttccacatccagctgcttgctgatgtattcatcatcgccatgcaggcagcggacggtcatctcataatttccttttgggacatagatcgttgaagcgtgcagcggcacggtgtatccgaagatctctatgtctacgccgtttacttgcacgccggcatctgccggagtgaattccactttgttcatgccttcatcggacagcatgatcgtatcgtatgcgatccgctggcggttgttgacgacatataagtagagatggtcttctgtatagatcacgaagcacagctgtgaagcattttcgctcagctgcaggtcgtagtcattggtgaggacgcagttcagcagtccgctctcttcgtgataacgcgtctgcaggtcgcagctttgccagtagtcattggcttcgtcgtaacagaacatatatgcgctggcataaggcgcaggatctttcagctggaagctgtattgcttcatctcggctgtaagatccatggagagatcttcaccggccacatcgaattgaagcgtatcgctgcggaatgtctcatagcattcgtaagtgacatccagggtgtacagtccgtcgctgagatagaggatgccatcgctgttcaggtcctggtatgtgccgatgccgttcactgagcgcacgctgacctcgtccagcacaaagctttcgtctccatacagggtgatcttggcgcagtcatccagcgaaaagctgtggtcgctgtcatccatcgtcctggtgatcatcgcattgccgctgacgacctgaatgagatgcagctgcgggtcagcataggtttcctcgctccatctgatcaggtattccccggattcgctgcggtcgtggtccactgcatcgccgtccaccaggatgagcggatcgctcaattcgtcgctgatctgcaggcggtaatatgcttcttcggcgggcaggacctctgtcgaaaactgcttttcgatcgtcttggtctgtgcggcgctgacggcgtaagtggcgcggacgatgatctgctgtcggcctgcttcgtcaaagcggacggcagactgatagatccgctcattcagggtgttggttgtggtggcaggacgagcttttcctgcactctcgacttctacgctgatcacatcggatgcgttggcgatccggatctgacattcctgttcctgcagggcgaacagtgtgccatgctctgccgccatgatctcagggacagcgtatgtccgggcttccacggtaaatggtttatccatccgaatggtcttttcaccgctttggacagcatatgtgacgatgacgctcagctcgtgttcgccttgatccaggctgatcccatcgctccagaaccggcgggtcttcgcataagtgccgctgtggacgcttccttgcagcggggtgccgtcgacgaggaactggaccgcgctgacatcggcatagctctggatgtccgcgctgaatgagacgtttctgccatttttgtcatcagagacgttcagctgtgtgatctgcgggatctcccggctgcgggcctggaggtgacggaccgcctcattgttggacgaagaacgctcttccatgccgatcgtcgcattgcgcaggaccacgcggatgtcgtgctgccgggatcctggtgtccagtctatggtgtatgatgtcgaggaaaaggcgttgagcgcttcgttctgcttttccatgagcagcttatcgccgtcatataccagaacatcgtaccagccgccgcggctgccgcggttatacaccttgaaggtcagctgggtcttctcatcgatgatggggtcattgccctttacgatgatgttttcgtgatagaccgcaaagtcaggcttggtgcgcatatcctccagctcctgtggatcgccgatatagccgatcagcgattcaggcggatacagggcggtcagctcgttttcggtcgagacgaagtaactgccggcatcagtgtcataatcccgcaccagcgtgttctggtctccgacgttcaggctgctgttgtcgatcttgtccatggccagatcgctgagcccgtcattgtgtccttgtccggcgtgatcgccattcaggtaatagtcgtagctcgtatccatgtgatgagagaagtcttcgtctttttggtcatacatgcgtccggtatagtgcaggtccggtttcgtgccgtctgcgtaatccggaagatagaagctgttgtcgatccggccgcggttggtgcattggaatccttccatgtacatgttcagcgcgccggccggatgactttcgatgtagcttttccacaggttcagcaggaatgagccagtgctcagggcgatggctgttccgacgccgggcaggaccaggccagccaggctcagcgcgagcgttgcgccggtcagtacggcatatgtgtttttctgtgcctcgctgtatgtcggatcactggagacatcggccagtccgacgatgtcgctgcctatggagtaggccgtgctgaagttgccgatcgtcttgaacgtattcgtatcatcgatggtctcgcccacggccacatagacatcgaagacatagcttgcggcatcgtcctgcggactatcgcgaagcagacggcggaacgcgaacgggtcgctttgcgcatctgctgcgatctgacggtactgctcttcggtgagatatacgcggacatgagccagggcagtgccggcgccgtcttcgatgagctcgcagaccggttcagcgtcttcctgtgcgccggtatatggctgcaaggtagtctgcaccgagagatcgagctgttcctcaccgttttccccataggtgaaggagacggcagtgtctgtcttgacggctttgccgtccacgctttcgctgtgatccaggctgtcgtcgatgacattcaggttataataaggatttccatcttgcttcagcagcaggtctttgacagagaccagatggatctccttgccttcggtgtcgatgttcaatgcgaagcgttcgcactgggcgcccgattccacgaggatctcaccgctgacgcgcgtgatcccatcctgcttcatcttggccaggtccgggatgatccggaattctcttcgctcgcggctttccatggccaggttggcgatgatcggatcggtacgcacataagcggcggcatctccgctcaggcggacagtgacatcgctcagcgcctctcctgtattgatcagttcatatacagagatcagcgtggagctttcgctgcgcagcttctgacagctgatatccagctgcgggatatcgcagcgcagatgaacgatggccctggcgtcggtttcgtccgtgtcggccagacgggcttcgacgggcaggccataccgctcctgttctgcattttgggcaaagatggccagctgtacttgctggctttcgccgggctcgatcagcagcggttcgctttgagagcctcccttgataaaattgacggacagatccgcataggaatgatcgacggccatgtaatatgcgcgcgcctggtcgctgatgttggtcacggtcagcatcagattctgatcataatcccgttcgatctcgtagctgctttccacttcgatgtgcagatctccgtcataaccttcttcgcttgcagagatctgaattggttcttccatggacgcttcgatctgcatcctcgtttcggcagcgtaaatgctgctcgtcccgattgcggcagaaacgcccagaagaccggcgatcaaactgatgaaaaacttcttcatcctttcacccactttcttttccctttctgatgttctttgctatcctccttttctgaatcagaatgataaagatattatatcattgaaaacgctttccgaaaaggtgctggatactgtgcgggctactgtgcgcctcaacttgcgcaggcatcaaaaaaacatcggccaggcagaccgatgttttttacaattcttgaacaactttgcatcatcctgtaaacaatggataagtatgatgaggatcagtcgagcttcacgacgctggccaggccgcccaacgcgctttctttcagttcgatcggcagcttgatgccggtcttgttcatggtttccacgaccatgtcgaagctgacgcggttgcggtgcacgcggcgcagatggcgggcgaggatggcggcgtcgatggcgcgcagcgcacagacagcattgcgttcgatgcaggggatcatcacataaccgccgaccgggtcgcaggtcaggcccagatgatgctcgatgcccatctctgcggcgtattcgatctgatccatatccaggcccatcaggtaggcgatcatggccgcgcccatggcgcaggctgcgccgatctcggcctggcagccgccctgcgcgccggatatggtggcgttgtgcttgatgaggttgccgatcagcccggccaccttcagcccttctaccaatgtctcgcgctgatatttcaggtcgtaatagtaataatacagtaaagcggggagcagtccgctgctgcccagcgtcggcgcggtgacgctcatgccgccggacgcattttcctcacaggcggcataggcataggcgcacagcagcagcttttctcgttcgctgccgtgcacatcgctcgcttcctgcagcagggagcgggcgatccgctccagcttcagcctgccaggcaggatgccgctggcattgagcccggcgtcgaccgtcttcagcatctggatcaggatctcgttgagatagctgctgatgtcactgtcgtcaaattggtcgacataagcattcagcccgatatgctctgcggcgcagaatgccttgatcttatcgagggtgtgatgtggatagcagggggcatgcaccgcggcatcttctccttcgatctcgatgacaccgccgcccaccgaatagacggtcatcgtctccaataggccgtcctcggcgtcaaaggcatgcagctccagcgtgttgggatgcttcttcatctcattcatgtgaaagcagacttccacggggcggggcgccagcgtgcggatgatgatctgatcgctcagatgccctttgccggtcattgccagcgatccatatagatctgcgcggtaatgatcggcgttcggacagcgcttcagcatttccagacaggccttttgcggccccatggtatgtgagctggaagggcctggaccgatacggtaaagctctttcagggatttcatgtcttcactcctttttcagcattatcagtttatcgcagataagtaaaaatgaacaggaaaaagatgctggaacaagcaaaaaatgtataaattcgacggtgtaaatgaaacgtttgaactcttacaaaaatgacaggaaaattgttggcgaagatgcataaattcatgccatgctatgctataataggatggaatcagagtattatggtcaaaaacggggtgaagagattcaacaaggctgaacgagcaggctgaagcagacgacgaaagggggattaggttcatggccaggagagcgtcaaaaaccggacagacgagaatcaggcgtaatctggaagcgatcatgccgctgacgaggcagatcctttctctggtaaagtattacgtcatctgcgtggcagtggtcctgctgctgagcaacttcgtcgcaaagccggtcgtgatccgcggcaccagcatgaacccgaccctggagaactttgattttgccctgtccaaccgtctttccatcgtgctgggcggggagatcgagcgctttgacatcgtcgtcgtgcaaagtgaagaaggagagatcgtcaagcgggtcgtcggcattccaggcgacacgatcagctacgtcaacggcgtgctgagcgtcaacgggacgcagatcgaggaggattacatcatcgatgatccgaagaagcaccatgcggacatggatgtctatgaggtgaccctcggcccggatgagtattttctgatgggcgataaccggaccggttcgaccgattcgcggtatttcggaccgtttcaccgcagcgacatcatctccaaggacttgcttgttctttttccgtttaatcgtatcaagctggtataaatgatgaggagtgaaatgaaatgcgtaaagtagggattgacttaggaacaacgaacttgctcatctgtgtggacaatgaagggatcgtcatcgacgaaccgtccattctcaccatagatgcacagacaaagaaatgtatcgccgccggcaaggaagccaaggagatgctgggtcgcacgccgcgcagcatgatctgcatcagtccgctgaaggacggggtcattgccgattttgaagcgacggaaatgctgctgaactatttcttcaaggaatgcaatctgcgcgggatgttccgcaagaacatgatcctgatctgtcacccgacgaatatcactacggtcgagaaaaacgcgatccgcgactgcgcttaccgtgccggcgcgaagaaggtctatctggaagaggagcctaaggtggccgcggtaggcgccgggctggatatcggcaaggcctgcggcagcatggtgctggatatcggaggtggaacgagcgatatcgccgtgcttgcgctgggtgacatcgtatgctctacatcgctgaaggtggcgggcaaccgtttcactcagctgatcatcgattatctgcgcaaagagcgcaagctggcgatcggtgagcagatggcggaagaagtgaagatccgcatcggatctgcgctgccgatggatgagccgcttacgatggaggtcagcggcctggcgatggaaagcggactgccgagctccatcgaggtcaactccaatgagatcgagctggcgctgcgcgcttccgtcgatgagatcgtgcgcgctgtccgcaccgtgatggagatcactccgccggagctggcagcggatatcgtccagcgcggtttgatgatgaccggcggcggcgccctgctcaaaaactttgacgcgcgtctgcgcaatgaactgcaggtgcctgtccatgtggcggaaaatgcactgcactgcgtggtcgacggctgcagcatcatgcttcagcagctgcgttgatcaaaggatgagcatagagatcttcagccgaggatctctttttttgcgcaaaaaaagccgatcgctcggctctttttccactggtcagtcgatgtgatagacacgctcagctttgcggggcggcgtcttgcttggcccttcctgctgaggatagcccagcacgcagtgtccgatgccctcatagtctccttcgatgcccagctccttcaggatctgcttgccttccggccgttcgaatgcctctttggcgcggtggatccagcagctgcccagccctgacgcatgggcggccagcatcaggttttccatcgcgagcgcaccgtcatagagataggtcggggcgcttcggtctgccagcacgatcagcacgaccggcgcgccgtaaaacggatcgccgtccgtgcccatgatggatgcgttcaggcgggagagcgcatcgcgtgtcttgggatcgctcaccgcgatgatgatgaccggctgacggttcattccagagggcgcatacagaccggcttcgacgatctgatcgatcagctcacgagggaccatgtcgcgctgataggcgcgcacgctccttctcgtcttgatcagctccagcatttcattcatcttgactcctccttttcttctcattttagcatcggcgcgcgtcagggacaagcgccgatgctgacgatgaaaaagacgccggctggcgtcttcatctatgatcacagaaagtcatcgtcatcgtcgaaatcgtcatcgagctccagggagtggcggaaagcctccagctcctgctggtcagccatcgcggccagcgcgccggcgatcgtcgttgtgtgtgccgcatacaaattggcaaagtcaagatggttctgcagctgcccgcaggagatctcctccagatcgccgttgccttccttcaacaggcaatagaggaatgcaccgatgaaggagtcgccggctcctgtggtatccaccacatcgacgcggtgccctttgctggtgatgcattctcctttgcggtacagggaagcgccttccttgccctgggtgtagatgatgtatctgcatcttccctgcagcagctggggcagggctgcttcgatgtcggtgcgtccggtgatgaactcaagctcttcatcggaaagcttgaggatgtcggcataaggcagaaactcgagaacggcgtttctgagcgcttcttcatcatcccacagggagaaacgcagattagggtcaaagctgatcaggacaccttttcttgtggccagatcaagcagtttgcgatgagcctctttcatcggggaatccatgagcgatacgctgcagaaatgcaccattccgcactcgtccaggatgtcctcgctgatgttgtccgggctgtattgcaggtctgcggccgtgcggcggtaaaacttgaagtcgcggttgccgtcttcctgcaaggaaacgaaagagagagaggtgtcgtgctccttggtctgcaggatatgtgaggtgtcgatgccgctgtctttcagcgactgaatgatatagtcgccgaacgcatcggctcccagctgcgtgagcaccatggcaggg

SEQ ID NO: 3415 - DNA, 32759 bp, Unknown
  16S sequences of unknown bacteria
ggaagatacaggcttgtttttcttcaagggaaaaccgggagagcgatttgcaatttgtaatgccggcggcggctttgcttatgtagcagctatgcaggatagctttccccacgctttggaattgtccaaacaggggtataacgcatttgctcttatctaccgtccgggtgcgcagacggcttgtgaagatctgtctcgtgccattcaatttgtgtttgaacatagagaggagctgcaagtgaacacagccggctattctctgtggggcggcagcgctggtgcgagaatggcggcttgggttggagcctatggaacggcagcctttggagccgaagcttatcccaagccggcagcggtcataatgcagtataccggcttaagtgattacagtgaaagtgatcctgctacatttgtggctgtcggggaaagtgacggtatagctgactggcgggttatgaagcggaggctggattgcatgagcaggctgggaacagaaacagaatttcattcgtatccgggactttctcatggatttggactaggaacaggtacggcagcggaaggctggcttgatgaggcagtcgcattttggcaaagacaattggagccttgaaaggagaaaaagcatgaacaactttatttttgaaaacgcgaccaaaatctattttggaaagggatgtgtcaaagagtatcttgccagccttgcaaaaccatatggtcagactgttatgctggcttacggcagcggctccattaagcgaaacggcgtttatgatgaagtaatggcttgtctgcaaaaggcgggaaaaaatgtagtggaattttccggaattacagcgaacccgacttatgctaaggttttggagggagcaagacttgcccgagaaagcaaggcagatttgattatcggcgtgggaggcggcagtgttatggactgctgcaaggcgatttctatggcggcggtatatgacggggatatctggacggatttctgggcaagactgggatatgtcggctttgaacctctgcctttaggagttatcgtcacagcagccggtaccggcagtgaaatgaacggaggtgcggtaattaccaatgaggagctgaaaattaaaaccgggcgtgactatccggagtgcaatcctaaatttgcgctgatggatccagtttatacttacagtgttccaaaacagcaaatggtgtcaggcggctttgacattctctcccatattatggagacgtatttcagcgacccaaatgaagataatgtttccgatgatatttcagaagcactgatgaggggagtgatacgcgatctgagagcggctgtcaaaaatccggaggattataccgccagaagcaacctgatgtgggagtctactatgggagagaatcgcatcattaagcttggcaagagaatggactttgaatgtcaccagatggaacaccagcttggagcttatacaaactgtaaccacggtgcgggattggcagtaatacaacctgtttattaccggcatatctacaggaacggtctatcaaaattcaagaaatttgcagtcaatgtttggggcatttctccggcagaaaagacggaagaggagttagcttgtgcaggtgtggaagcgcttgcggattttattcgtgagcttggcctgccaacaactttgcgggagataggaataaatgaggcaacggatcttaaggcaattgcggattcctgcaatttggctcccggcggctacaaaaagatgacacataaagagatttggcaaatttttcaggagtgctattagataaagctattctattaagcgctgaaaaactaagaaacctgaaaactaagaaagataaagaaaggatgaattattatgaaaaaaataatcgctttaattttgagtatatcgatgctctttgctctatctgcatgcggtggcaacagcaatgaaaataacagtgcgaataacgagatgagcagtgaaagcaacggcgctgctgccgaaacatctgatgaagggtctggaattgcagaaggaaaaacactggtcgtatattattctgcgacaggcaataccaaagaagtcgcgaattatattgcagaagcagcaggagcggatttatttgaactgacaccggttgattcttatacggatgaagatttggactggacagacagcggcagccgtgttgtatatgagcatgaaaatcccgaggcaagagcggtggagttagtggaatctgctgttgaagattggcagtcctatgaaactgtatttataggatatccgatttggtggggcatcgccgcctggcctgtcgatgaatttatttccgccaatgatttcaccggaaaaaccgtaattcctttctgcacttctgccagctcagggctgggcgaaagcggtgaacttctggctgaggccgcaggaacaggaaactggctggagggcatgaggttccgctcaagcgcgtcgcaggctgatgtagaagcttgggtagaagagcttggaattgcagattgaaaaaaggaggaaaattgagtgaaagattttcaactgagaaacgacacaaagttattgttcagaaatgaccccgcagcggatttagcggcattaaccgagggaaaaaaggtgctgtttgtctatggcggaggttctgtaaaaacaaacggctgctatgatgatgtaaaaaaggctgtggaaagcgcgggcggtacgctttatgagcttgcaaatgcctcgagagagctggaaatcattgaaaaaggcatagcgcttgcaaaggaaaaaagtatcgaacttgtaatcggagcaggcggggccaatattatggactgtgcaaagctgattgcattcggcacatatcatgaagatgatttgtgggcgtatataaaatcggaaaaaaacccgtatggtctgaaaaagctgccgctgatacttatgcctacttatccgtcaagcggctcggagtacggactgggagctgtatcatcagatgcaaggaggggagacagaggaactgcatacggcattgcggcggacacggctatccttgtaccgaagtattcaatgtcacttggcgcagagcttacagcttatactggactggtaacactggtacagctttctgcttccactattggagaccggaatccggtatcgtatgatataggaatttctgtaatcaggaatgttcttgcagcgacgaaaaagcttagagaaaatccgcaggatgaagatgcccgcggcgtaatactctacggtgcgtcaatttccacttccggccgtctgggtctcggaaaagaggaaaattacgcgtatgatatctacgaggtgatgtctgttccggaagatctgtacagcgcatcttatcgtaagagcctgacagcaatgtttccgcctttcctcaaagctatggccaaatatcatgaggctgatatccgccgttattttaaggatgcattcggctatgagggcagcatagaggaatcagctgcaaaaatgactaagctttttgaagagcttggcgccaatatgtactttgacggcgaaatttctgtggaagaaacaaaaactgttaatatgtcaacaatgttttctgttgaagaggttacggagatggtcaaggagtgtcttcgttaattcaggaaatataagggaggaataaaaaatgagtattttatttgtaaacggcagcccgaataaaaacggaaatactgcaaaattggcagggatactgctcgccggcaaggcttacaagacgctggagctggcagattacaaggtgtatggctatgggcagaactttgaggatgatcagtttgctgaaattgtcgatgaaatgaaagcggcagatacgatcgtaatcggctctcctgtttattggcacaatatgagcggaatgatccgcaatctgcttgatcgtttctatggtccggtagaggaaggggagcttaaggggagaaggcttgtatttttgttccagggtattacgccggaaggatggatgctggaaaaagcggagtatactatgaaacgctttgcaaacaagtatggtatggaatacataggaatggcagcgaacaaatctgaggctgaaacgctttccaagaaaatttaaggagaaaaacaagatggaaatccgtaaattgggaaaagacctgtcagtttcagctgtcggtctgggctgcatgggttttagccacgcttatggcgcgcctacagagcaaagcaaggcaattgaaatgataagggctgcgtttgatatcggctacactttttttgatacagcagaggtctatggcacgcaggatgacccgcatcaaaatgagattttagttggtgaagcgataaagcccattcgcagcaaggtgcagcttgcaagcaaatttggaattcatttcgatatgagcagctcgcaggtaaatcatccgttaattccagattccagaccggaaacgattcgcttatctgtggaaggctcattaaagcgtttgcaaaccgattatattgatttatatttccagcaccgtatcgatcctgcggtagagccggaaacggttgctgaagtgatggcagatttaattaaagagggaaaaattctgcattgggggatttccgaggccaacgaagcatatttgcgccgggcgcatgctgtatgtcctgtgaccgctgtggaaaacagatattttatgatggcgcggcagtatgagtcgctgtttcctgttttgaaggagcttaatatcggtctggtagcgttttcacctatgcccaatggttttttgaccgcgaaatatgaaaaaggtacaaaatttgattcccaatatgattatcgcagcaatatgccgcagtttacagacgcggctatggagcaaaatcgcgggcttctcgcgctgcttcagcgcatagcgaaagaaaaaaatgcgacgccggcgcagatatcaatggcgtggatgctctgcaaaaagccatggattgtgcctattcccggtacccgcaggttggaaagacttaaagaaaacgcgaaatcagcagatgtaaagcttacagcggaagaggtacggaagattgatgaagcgcttgagcagatggagatgtcggaggtattcggaggttccaggattgtaaataaaccgtatgctaaataggcagtctgttataaacaacggtcacaaaggaaaggtgagaagcatatgaacaaaccctatgttatttgccatattttaagttctttagacggtaagataaacggcccctttatggaagcggaaacgacaaaggccgttggcgcagaatacagaaaaatgcgggaagagatggaggcggatgcctggctttacgggactacaacagttaaagaatttatcaatttcagaaagcctgtcttagagccgcttgattttgaggcaggggatggtgattttgtttccggggattggacgaagccgtattttgtctgcattgatgcaaagggagagcttggatgggaagctggtcggtttgccaacaaaggacgtccggaagcgcatgtaattgagattttgactgaagctgcgccagctgcatacagggcgtatttgcgtaaacgcggtgtatcttacattattgcagggaaagcggatttggattgtaaaatggcgatggaaaagctgtatagccttttcgcgattaaaaagctgctgatctgcggcggcggtgcagcagattggtcgttcctgcaggagggtatggtaaatgaactgagtctggttctttctcctgtgacggacggaagcagcggtagagcagaggtctttaagcagatcgacggtgtgaacgagggaagtccggtagagtttgagcttaagtcggtgaagcagcttgaaaatagcggtctgcatttgaattatttggcgaagaatgctaaatgagcaaagcagcagttacgagatgatgatgttataagcgaaaggtgcaaacataaaaacaggaagaggatttataataagtatataagtgaaaaaggagatgataactatgaatgaacagaaatatataaaattaaacaacggtgtagagatgcctatggcaggtatcggaacttttcttcttagtcctgatgaagcggaagcttccgtaaaaagcgctctgcaggcaggctatcgtctgattgatacagcaaacgcctatgtgaatgaaaaagcagtaggcagagctatccgcaaatcaggcattgcgagaaatgaaatttttctggaaacaaagctgtggccatccttttatgagcaggcggacgcggtggaaaaaacattagagagacttgacacggattatattgatctgctgcttattcatcagcctgcgggaaattacatcgccggctatcgtctgatggagaaagcatataaggaggggaaagtccgcacaattggtctttctaattttacaatagctcagattcaggaaattttggctgtgtgcgaggtgaagccggcgattttacagacagaggtgcatccttactaccaggagccggagctgaaacaatttttagcgcaggagaatatggtcattcaggcctggtatccgctcggccatggagataaggcgctgattgaagagccggtattctcagagctggccgccaagtatggaaagagtaacgctcagattatactgcgctggcatatacagtcgggcaatatcgtaattccgggctccaagaaccaagatcacatccgcgctaatttcgacctgtttgattttgagctggaggatgcggatatggccaagattgcggcgcttcaaaagaacaagagatattacacaagcacaccagagatgcttgcgagctatgcagagatggtgcctcctgtggatgaacagaaataagctaagaaagagttaaaattcaaaagaaagatatcagattattttcagtgtacagaaagcgattattgatgaaaatgtatggctaaatgtgcaggaaagagcaaatagataaatgtcaagatgggaaaaaatgcccgggcgggcaagatgaattatggttatagtaaaaaataaaagtgcgcaatgcacttttatttttttatgctatggtcagcgagatgatatattgttttgccgtacgcggacttcgtccgtttgtacgtattgcaaacgcttcggcgccgcgtatgagctcgtcatgcggcagcgatacgccgtattcctccgcgaggctctcaacgatttctacatataaatctttttcaggttttgagaatgtaacggtaagtccgaaacggtctgacaggctcatcgcctcctgcagcgtatcgtttaaatgcacttcgttgccgatacgggcatccatagactcacgcatcagatgccgtctgttgcttgaagcatagatgcgtatgttttttgcgttccccgaaacatcaccttcgagaatgcctttaaggaagcagaagtcgtcgtcatcggcgcggaatgaaaggtcatctatgtaaaaaatgaacttcagcggagtgccggcaagcttttccgtgagtgccgggataaatttgagttggtttttcttaaattcgaccagccgcagacctttgtcaaagcaggcagctgcgcatgcttttatggttgtggattttccggtgcctgcatcaccgtacaaaagcacgttggctgcatttccgcctgcggcaagagaaagcgtgttgtcgagcacgagaccgcgttcgcggctgtagccgtaaagcgatgaaagcggcaggatatctgcattttcgataggtataagactgccgttttcatcaaccttaaatacatttgcagctgcaaatattccgtaacccttagttgctactgagttaatcatatcaaaaaaagctttttcaatattgataacggagttttcccaagcgggaagctcaatatcatagccgcccatactgtcaattgcatttttgaagttctcagaagtaagcttggcaatttcgtcaaagagggcaagttctttcttggcggtataagcaagagaagcaggtatctgcttctcttttattaccatttcgagataaggattgtcctctttcagaacgatatcctgcacggcgagtgcgaggtcgccgcctgctttataaatttcagagcagagttttccgtaaatcggagcagcttggtcaatcaccgcttcggcaggttttttgtcgagcacgaaaaatagccgatgaagacaatctataagaggtgtatcaagagtactgcgaaatacggaaagcaggctgagtccggtttctatttccgaaagttttttatccattttttaaaatcctcgatttatatttattcagcttgtatttattcaaccggcacggtccagttcataaaatcgtcgattctgcctgtctgaatgccgtaaattgtgtcgtacatttcctgtgccacagggccgattttgcggtcgtttattatcataagctcgtctttataaagaagctcgcctacaggcgaaacaatggctgccgttccggcagcaaacatttccgtgagagtgccgttcttgtaggcctgaacgagttcgtcaatcgagagtctcttttcagctaccggaatattcttttccttgcaaagagcgattatggagtttctcgtaatacctgggagaatagtgccgtttaatgggcttgttacgacttcgccgtcaattacgaaaaatgcatttgccgcacctatttcttctatgtatttctgctcgtgagcgtcgagccataaaatctgctcataacctttttcatgagcaatttcctgagccttaaggctgccgccgtagttgccgccgcattttgcttcgccggtgccgcccgatacggctcttacgtaaacatcctctacgtacatctttgtcggctggagaccgcttgcaaaataagggccgacagggcttaaaatgatcataaatttataagtctttgacgctcttacaccgaggtaaggctcgtcgccgaagatgaaagggcgaacgtagagggaagtaccctcaccctgaggtatccaatcctggtctacctttacgagggctttgattgcggatacaaagagatcttcgtcgatctgcgggatacagagtctgtcgttcgttctgtttgtacgctgcgcgttcatataaggtctgaaaagctgtacctttccagatgccgtcttatatgctttgaggccttcaaacatttcctgtccgtagtgaagtacgattgcggcaggatcgagctcgataggagcatatggaacgatgcggccgtcgtgccagcctttttcttcattgtaatccattataaacatatgatccgtaaaaactgtgccgaacggaagattttttggatcgggcttttttttcggattggtatttttagttatgctaaaattatattccatttttaaacacctcgcttttgtccttataataaaattttataacttatataatatacaaaaaaggccgtgaggtcaacgaaaatcacagattatttgtaaaattgcctgtttttttacaggtagaaacagcttttatatggcagacaaaaagccggcgctttacgccggccggaagaatgttaattaaatgttatatatgcctttggatcctgaggcacaccgtctttgcgaatttcgaagtgcagatgattttcttcgagtgattcaaaaagcgatgtgtcgccgaccccgcttattacctgaccctttgtcacgacatcgctgacttctgtcatgctgtccgtggaaaggttgctgtatgtgctcgtgagcccgtcgccgtggtttatttctatggtaattccgtatttatcgtctgtatatacctttgtgacagtgccatctgcaattgcttttacctgcgtgtcaagcggggctgctatgtcaatgccgtaatgagtcatatactggtcgagagttttggaatataccggggcgtctgcgctgaattccgtaataattttacctgacaggggagcgtcaaactttgattctgactgttcttttacatcttcgttatccttactatcaacagttggtatcggctgcgttaccggctgctctattttaggagtgttaccgagatctgaagttcgtttttgcagattcaatttatcgatgcttgattttacggtaaatacggaagcgatggcaataacgctgaagcaaagcacgagcgatattgcggctttgtctctttctttttttctttcttgtcgcataatgttcacctccatttaaaagtattgttgccgcaaaagcggaaaaacattctcgattttgttttatagtgcttgtaaagaaatggcttgcggtatataataaagtattattttagattttagaaacaattatggagcgaggtgtgaaggtataatatggaaaaattgatttttgctgaagcaaacggaagagaactcaactttaccgataaaattttcggaatttcgagcaaagcacaggagatggcaaagcgggaaggtgctgataaggtaataaatgctactattggagcgttgcttgacgaccgcggaaacctcatcgtatttgatgcggtggacaaagcgctgcgcgcgctcaaagccgaagattttgctgcatatgcgcctctctccggaatccctgaatatctcgaggtgataaaaaaatacgcattcggctcgcatatgccaaatatgtacattgcagccagcgcgacgccgggcggtgccggcacgatcagaaatgcgatagtaaactattccaagcgcgatgaaaccgttatcacaagcgattggtactgggctgcatacaagacgcttgttactgaaaactacagaaagctcgatacatacaaattgcttgatgaaagcggtaaatataacatcgaggcttttgcggaatgtgtggataaatatatgaaattgcaggattcgctccttattattataaacactccggcacataatcctacaggtttttcgcttaccggcgaggattggaaaaaagttatagatatctgtgaaaaatatgcagctttaggtaaaaaagttacgatttttgtggatgcggcgtacatagattttacggaagatccggatgaagcaagggcgttctttgatctttttgaaaatatatccgataatcttctcgtacttgtcggttacagcgcttccaagagttttacgctttacgggatgagatgcggagcgctgatctgtatgacgaataacgaggaaatctgtgaggaatttaaaaatgtcacggcgttttccgggcgcggcacttggtcaaacggcacgagatcggcgcagcaggtgctcgtgaatatgtataacgacaggacgatgaaagaggcggtcgataaggaaagagatgcaagccgaaagatgcttctcgcccgcggcaaggcctttgaagaggcagcgcgcgagtgcgggcttgagatgctgccgtacgattcgggctttttcgtgtcggtgccttgcagcgcgccggatgcggtgggtgagcttttgcagaaagaaggcatatttgtagttccgctggcaatgggtctcagagtagcgctctcggcagtttcggaagaaaaatgcagaatagtggcgccggcaatcaaaaaagctatggacgaatatttcgctaagtagtattatattatttatagaaagaaaatttgcggaagtgcagacggaagctttaaagactgcggtatagttaaaagctgtacgcgattttgcttctgatacggcgttgctttcgcattttatgcggatgtagttcattggtagaactccggcttcccaagccggcagggcgggttcgattcccgtcatccgctccatattgtgaagcccttgaaagcactgaaatttcaatgttttcagggtttttgttttggaatttttactaccttattttttaaaattgttacttttttgtgcgtttcgtagggttttggtgggtcttgatgtgggagtaggtgtaggacttttctctatattatggaaattagtgattgcctgctgtgcccggctgaacgatttatcggagaagtgcacatacctcgttgtcgtctttatgtcggtgtgtcccatcagctctcgtatgatgtcgatagacggcccccgcactttgaagatctgttccgtatgtatggcggtagcaatatgatacaaggtcatcggcagcggggaatatcggttccgcaccttttagtacatcattaaaatttatcggcagcagcctatttcggtaaacctcgcaacccatttctatgttaatctaaaaaccgatttgtcgaaatatactgaaaaatcactgcgaatgttgttgcgcctgatcccgcatccgtgctattatatagaataaagaatgaaaaccaaagccgaaaggagcggaaaatatgagcagaatcgaatttataaacgactgttatacaagcgacggccttaaattatttatggctcactttgactcaggagagagggatatctgtgttgtctttaaccacggtatgacaggcagcataacgggaagctattttgccaccgtatgggctgacaagctcaatgaaaatggcgttggcttccttgctgtaaataatcgaggccacgacataatgaatgatatgaaaaagccggacggtacatcagtgcgtcttggcacggcatatgaaaagattgaagactgcgttattgactttgcctgcggcatcgaaaaagcaagggagctcggttataagaggattatcctttcgggccacagtctcggctgcaacaagtcaatatattattattcgcagaaaaagccggacatcgagggcattataatggcaagcatgccggatatgtttgcttacgaagactctatgggcgaaggttacagagaaagacttctaaaagaagcgagaaataacatatcggaaggaaacccaagcaagcttgtggaaatcgagggggtttcctgggtacctatgagctctgaaacgtatgttaactggtactccgagggcagcgcgctcgataatatcccggtagtaagaaacccggaaaaatgggaacagctcgcagagatagatgtgcctatacttacgttttccggcggtgacgaggaagatatttaccaccatatggatttaataaaggaaaaagctttgaaatgtccggattttgagtactacacgattccaaatacagatcattcgtactggaaaaaggagcttgagagcgcggaaattgtgacggactgggtggtgcgcaagttcaaataggtgcggccggcaaaaaaatacagaagttaaaataagcggtatgggagttttggatattaaaaatcatcaccggtaaatagaaatttacgaaaaaaatattgacaaatttttaaaagtaaatataatagtgttaatgaacaaaaattgcagtcagactgaaggtgcaaagttaggctgtaaacttgagaaagggagaaggcatatggcatttaacttaaataacaacatgatgaatatgtgtatgggaatgtgcatgtgtactttcaccgacaagtttataaagcatgacttagctgaaggcggctgcgtttaggtgaggcaatgctcttttagagtgctgccggcctatacaggaattaccatacataggtttgatgatttgagcagacagttttcactgtctgctttttttcggtaataaggaggaaacggaagatgactgttttgaaactcgaggggctgacaaagacctttgagggcaagaaaggaaacgtaaatgcactgagcgatatcaatatcgaaatcgaagagggtgaaatcttcggtatcatcggtatgagcggtgcaggtaagagtacgcttgtcaggtgtattaacctgctcgaaaaaccgacaagcggcagcgttgtatttgacggtaaagaattgacaacgcttaagaagaaggagcttgcggccgaaagaacgaagatttccatgatatttcagcagttcaacctgctgatgcagcggacagcgcttaagaacgtctgctttccgctcgagctgcaaggagtgccgaagaaagaagctgaaaagaaggcgcgcgagctgcttgccctcgtaggactatccgacagagaaagctcgtatccggtgcagctttccgggggacagaaacagagggttgccatagcaagagcgctggcgacagacccgaaggtgctgctgtgcgatgaagcgacgagcgcgcttgacccgaaaacgacaaggtcaatactcgagcttttaaaagacataaacaaaaaactcggactgacgataataataatcacgcacgaaatgagcgtagtgcagaaaatatgcggacgcgtagccgtaattgacggcggacatatagcggaggtgggaataacctcggaaatattctcaaggccaaaatctgaggcggcgagaaggctcgtatatccggacgggcagatggaggataaatttgagggcggcgatcttctgagattagtgttcgacggaccgtcggcgcaggagcccattgttgcaaatatggtgcttgaattcggcgaagccgtaaacataatatttgccaatatgcaggatatagatgggattccgaccgggcagatggttataaggctgccgaagaacgaagacagagcgcgcgatatgataagatatttgcagaataaaaagataaaaattgaggaggtgagagaataatggctgaaatgataatggacggcatacttgaaacactgtatatgacaatagtttcgacgatacttgcatatgttttcggacttcctctcggagtactcctcgttgtcagcggcaaaaacggtattaagccgatgccgacgatcaatgtaatcataagttttattgtaaatgtattccgttcgattccgtttctcatacttctcgtggcaattattccgtttacgaggtttatcgtgggcacgatgctcggttcgacggcggcgatagtgccgcttacagtggcagcggcgccgtttgtggcaaggctcgttgaaacatctctcagcgaagtggacagcggtgttgtggaagccgcggagtcgatgggcgcgggcacctggcagataataagaaaagttttgctgccggaagcgaagccttcgctcataaacaacgctacggtagcgacaatcacaatactcggatattccgcaatggcaggtttcactggcggcggcggcctcggagatatagctacaagatacgggctttataaattcgatacgggaacaatgtggcttgttgttgtgataatagtagtaattgtgcagataatgcaggaaataggtatcagaatagcgaaagtcacagacaatcgcatgcgatagccacataaaccgcaaaatacgacgaccgcagctgcaaaagcaggcggaaaatctgggagccttctgcgctcggcagaataggaatgcaatcgcttgtaaaacaagcgtgcagatataaataaattataaaaacataatgttatcggttaaaaccgaggaaaagaggtacaaaaaatgaagaaaatattagcattattacttgcagcgcttcttgcgcttggcgcaacagcctgcggaggcggcggagatactgacggagacacagaaactctcacaatcaaggtaggagcatcgcctgcaccgcatgcagagatacttgaaaaggctaaggaaatccttgctgaggatggcatcactcttgaaattactgaattccaggattatgtgcttcctaacgaagctgtaagcaacggagagcttgacgcaaactatttccagcaccttccgtatcttgaacagtacaacgaggaaaacggaactgaccttgtatcggtagcaaagattcactacgagccgtacggaatttatgcaggaaagacggcaacacttgaagaacttcaggatggagctacagtagctgttcctaacgacgctacaaacgaagcaagagcgcttctccttctcgagcaggaaggtcttattactcttaaagaaggcgttggcataagcgcaactgctcttgatatcgttgataatccgaaaaacctcgaaatcgtagagctcgaagcagccctcattccgagatcgcttcaggatgtagatatcgctgtaatcaatggcaactacgctatcgaagcaggactcaacgccagcaaggatgcgttggcaacagaagcggctgactcggtaggagcggatacttttgcaaatatcatctgcgtaaaggcgggaaatgaagagaacgaaggtgtaaaggcgcttgtcgaagtgcttacaagtgatgaaatcaaggctttcatcaatgacacatacgaaggagcggtagttcctgttttctaagccttgaaaaaaggagagaaaaatgacagatattaaaaatagcattacagaactaatcggcaaaacaccgatggtgagactgaacaatattgaaagaaaatatgagctcagcgcaaggattacagccaaactcgaatcatttaatccgggcggcagtgcaaaagacagagttgccctcaatatgatcaacaaggctgaaagagaagggaaactaaaaaaaggcgcgaccataatagagccgacaagcggcaataccggtatcggtattgctcttgtcgccgcggcacgcggatataaggctataatcattatgccggatactatgagcgttgaaagaataaagctcacaaaagcgtacggcgcagaggtgctgctgacggaaggtaagctcggaatggcgggcgcggttgcaaaagcggaagaattggcggcgtctactccgggttcgatgatcgcgggacagtttgtaaatcccgctaaccctgaggcgcattatctcacgacaggtcctgaaatctgggagcagacgggaggcaatgtcgatgtatttatcgctggagtaggtacgggcggaacactttccggcacgggaaaattccttaaggagaaaaagccggacgtaaaggtaatcgctatggagccatacgactcgcctcttttgtcacagggaaaagccggcccgcataagatacagggtatcggagcaaatttcattcctgatactctcaacagggatatttatgacgaaattataacgatcacgacagaagaagcttttgaatttatgaaagcgatagctgccgaggaaggcatttttgtggggatttcgagcggtgcagcgcttgcggctgcggttaaagcggcgaaaaaaccggaaaatgccggaaaggatatagttgtagtattggtagacacgggcgagcgctatttgtccgtattggaggattagcctgttatgggaaacgactttaagagcaatctgccgcattatatagacggtcttatagaaagctatcacgaaaacccgatatcggaaaagacaaccctcaatcttccagacaaagacgaagtaattgagattataaacgactttgaaatgctgctttttccgcagtattcaggcaacaagaagatggatgaggcgactgaaaaatatatcatcggcaatatgatgcagatggtgtatcaaaagctgaaaaaacagcttaagctggcttttctttatgagtacgacaggaaaaatcagaagcttatgcacagtgccgacgaaagggcggaaagtgtatgcgcagagttttttgaacagctgccggagatatacaggtatctttcgatggatatacaggcggcttttgatggagaccctgcggcggagagcaaggaccaaatcgtattttcatacccatgcataacggcgataagtgtgcacagaatagcgcatgtattttataaactcggcgtgcccatcataccgagaataatgtctgagtatgcgcacagcaaaacgggcattgatattcaccccggtgcgactatcggcaaatatttctttatcgatcacggcacaggcgttgtaataggcgaaactaccgtaataggtgaccgtgtaaagatatatcagggcgtaactctgggagcgctttctacgagaaaagcacgcgcgcttgtaaatacaaaacgccatccgactatagaggacaacgtgactatctattcaggcgcttcggtcctcggaggcgagactgttatcggaaaaaattcaactatcggcggcagcgcgttcatcactgagtcggtgcctgagggcagtatggtgagtgtcaagagagacgagctgaatatcgagtagatcgagcagcgttaaaaagcaaaaaaggagagcgcctggctgcgaggcagggctctccttttatattgcaattatatatttcgcttttttcagtaccggaggcaaaccgcgccggcagtgcgcattttaccggacgcgtatagctatttattcgatatcgagccccggcggtatatcgagctcgttggacacatatttgccgttcttttttcgctgtttgacgcactcggtgagaaggtattctatctgaccgttcagcgagcgaaagtcatcttcggcccatgcggctatggcgtcgtaaagtttaggtgaaattcggagcggcacttgttttttgcccttgtcaacgggcttatttttattggtgttcatcttagtagagacttcccgaatttacaatcggctgagcgtcgtggttgccgcagagtaccacgagaagatttgaaaccatagcagcttttctctcttcatcgagctcaacaagctctgtttcgctaagtctcgtaagagccatttccaccattccaacagcgccgtcaacgatcatctttcttgcgtctataatggccgatgcctgctgcctctggagcattacagctgcgatttcaggcgcatatgcgaggtaagtgatgcgggcttcaagaatttcgagaccggcttctgttactttatcctgtatttcgtcacggatgcgggcggctacaagttcgctcgatcctctcagactgccttcatcagctatgccgtcgcctgttgtatcgacattcggtgcaacatcataagggtaatttctcactatgttgcgcagggcactgtcgcattgaagcgaaaggtattctttgtagttgtctacattaaatactgccgctgccgtatcaacgacgcgccaagttaccgcaataccgatttctacgggattgccgaggcagtcgtttattttctgacggttattgttaagcgtcataatcttgagagatatctttttgctttcgatttcaatctgtttgccgccgttgccaagacttccgagaataccaagtgcgcctgtttcatcaccgctgtgcacatcgccgctctgtttaagcttggttttggcagccggatttaccgaggagcagaaaggatttacaaagtaaaagccttcgcccttaagtgtacctacgtatttgccgaaaagcgtgagtacgagcgcttcctgaggcttgagcactttaagtcccatgaagagaatccagccaagcaatatccaggccatacataaaactgtaagaagcatgcttcctgaggcaattccacggataaggccgaaaactgatgctgcataaagtgcgataatgataagcagcatcggcataccgaattttctgtttgataatactttttcgttcattattaaaaacccctttctgaaattaaccgttttaaacggagtagttacgtgaaggaaacagtagtaattaagcagcgataattctgcataatttcaaagcgcttccttatgatatcaaaataatatcatataaatatcaatttgtcaaacaaaaataaaaaattatttctgcggcagtatagcaagcggcagcggttgcatacagccaatttttatgttaaactgatgaatgagatttagggggaaatttaaagaaaaaagaggacaaaggatatgagaaaaacaaagattatatgcactataggacctgcaagtgagagcgaagaaatgctgcgcagtctgatgagcgccggtatggatgtggcccgcctcaatttttcgcatggcagcagagctgagcagctggcaaagatagaaactataaaaaaggtgcgggatgagctcggactttttacggccatacttctcgataccaagggaccggagatacggacggggaaatttgaaaatggcgaagtactgatagaggagggtcaagaattcatactcagcactgatggcaggctcggaaacaataagggctgtgctgtgacatatgagggccttcccggagatgtcaaggcaggagacaggattttgatagacgatggactcataagccttagagttgaaggtgtcagcggcggtgacatagtatgtaccgctgagaacagcggtaagataaaagacagtaaaggtataaatgttccgagtgtaaatatcaatctgccttctcttacggaaaaggataaacaggatctgctcttcggcgtggaaaatggagtcgattatatagctgcttcgttcataagaaacgctgatgatgtgaggggcatacgttattttctcgactataacggcggagaggaaataaggataatttccaaaatagaaaatcaggaaggacttacgaatatagatgaaataatagcggtatcggacggtataatggtggcgcgcggagatctgggcgtcgaaatacctgaggaggatgtgccgatagcccagaaagaaataataaggaagtgcaacgaagctggcaaaatcgtagttacagctacacagatgcttgactcgatgatgagaaacccgcggccgacgagggcagagattacggatatcgccaatgcgatatttgacggtacagacgctattatgctgtcgggcgagacagcctcaggcagatatcctgaggaaagtgtcagaatgatggacaaaatagcctgtaagacggaggctgctatggtttacgacgatatacactattcgcgtgcagaaagcaagaaaaaaggcacgataacggatacgatcggccattgcacctgtatggcagcaaaggagctttctgcaagcgcgatacttacaccgacgagcagcggcgatacagcctttgcagtagctaagttcagaccgcaaacacagataatagcgccgacatatcaggaaaatgtggcgcggcggcttgcgctgtgctggggtacgacggcaatcatcatagaaaaggctgaacatcagcgcgacgtatacgcaagcgcggtcaatgtgccgaaagaaaaaggaatgctcaaagacggcgactgcgtaataataacggcgggtgtgccgctccttgtacgcggcaataccaatcttatgagaatacatattgtaggaaacaaacttgcatagcagaaaaatcatcaggcggcgcagagaaaaaatgtgatggaattaaaataaacagcggtgagaatatgaaaaataatgtagtaataggtatagcaggcggcagcggcagcggtaaaagcacgatgataaatctcatcaaaaaagaatttaatgaggatataacgataataagccacgatttttattataagtgtcatgacgaaatcccgcttgaagagcgcagaaagctcaattacgatcatccggatgcgtttgacacggatcttatgatagcgcaccttaaagaactgaaagctggaaacaaagtaaactgtccggtatatgactacaccgttcataacaggaaaaaggatgagacaatggagattctgcccgccaaagtagtagtggtggaaggtatactcatatttgagaataaagagcttcgcgatatgtgcgacatcaaaattttcatagatgccgatcccgatgtgaggatcgtgcgccgcatagtgcgcgatgtaagcgagcgcggcagaagccttgaatctgttatcggtcagtatcttactactgtaaagccgatgcacgagcagtttgtggagccgagcaaaaaatatgcggacatcatagtacccgagggtggatataacaaagtggcgctttcgatgatcattcacaggataaaggcgctgctctgtgagtaggcttgttaccggattgcagaaattcaggagtaaagcatttaaaattattagagcttatgattgattaaagagttaaaatgtagagaggaaaggcggatttttaagtggaagagtcacagaaaatgacggaagaaacgcagaaagaaaagcggggcaagcgtatggaggacaacaaaattatcctctatacgcttgctgtcatagagtcggtaatatggggattttcatttgtaggtacaaaagcagcgctggtaaagcttacccctatggaggtaatcacagcgcgctggactatggcggcggcagttctcatcattcttgcggcgtttaaaataataaaggtaaattttaaaggcaaggatatgaggcttgtgatgcttgcggcgcttgcacagccgtgcttctattcgataggggaggtatatggtataagtatgacgacgacttcggaatcgtcaattcttatagctatgggtcctattgccataatgctaatatcagtgatatttttgaaagtgaagatcgataaggtcacagtatttgcggtaatagcggcgttcctcggtgtcatactttccattgcgatgaacgacgatttttcactcggcggcaaatatgagggatatgctattctcgtagttacagtgatactcggtgcgattttcacgctgatgtcaaatcgcatatccgatcgttttacaccgatggagataactttagtgatggctgtgcagggcagcgtgttttttaatctcataactattatcggcgggcgcggtttggaggtttacagagtatgctttacagataaagacacaatgcttgcggtgacctttctcggactcggctgcacagtgatatgctacataattttcaatacggttgtttcaaaactgccggcgcatatcgcggaggctctgcagaagaacttaatcacgctcacgggagttattacggggataattataaacggtgactcttggaatatgtggacgataatagggcttgcagtgatgctttttggtatagtgcttgtcagcagacctaaagataaggaaaatacagataaagagtttcagacagatagtgtagcagaatgcgaaggctgaacataaaaacagccggaaattatgatgctgcataagctgaaagaggaatatatgatggaaaaagttaaaggttttttaaaaagaaaggacatagagttttcggccaagcgttattttcaggatgcgctttcggcgatggcgcttggacttttctcttcgctgctcataggtcttataataaagactgtcggagagcaggtagaaatatgggtagcgccctgtgcgttttcagaattctgtatagagacgggaaatctcgcgatgggtcttatgggtcctgcaattggcgttgccgttgcctggggacttaaatcgccgccgatagtgctctttgccagcgcaataacagggagcatgggtgcgagcgcactggcgacggtattcggctttacagtatcgggcggtcctgccggtgcgtttcttgccgccgcagtcggtgcagagtttggcaaagccgtgtccaaggaaacaaaagtggacatcatagtgacgcctgcggttacgctcacaatggggatgctcgcagctaagctttttggaccgcctgtgggcgcgctcatgtcggggctcggaaatatagtaatgacagctaccgatatgcagccgctgattatgggcatagtggtatccgtgattgtcggacttgcgcttacagcgccgatttcaagcgcggcgctctgcataatgctcgatctttcgggtatagcagcgggtgcagctactgtcggatgctgtgctcagatgataggctttgcagttataagctttcgtgaaaatggcatcggcggacttatagcgcagggtatcggtacatctatgcttcaggtatcaaatatcataaaaaatccgtggataatcgtgccgccaacgcttgcagcggccgtgctcggaccgattgctacatgcgtatttaaaatgacaaatttgcctgccggtgcgggaatgggcacatcgggatttgtagggcagataggaacattcactgctatgggattttcgttaagagtgctgcttctcgttatcatgcttcatatagtgctgccggctgtgctgtcgcttatttttgattttatgctaaaaaaagcaggcaaaataaagacgggcgattatgcgctggaactgtaacatgcagcaagagagctttatattcagtctgacgggacaagctaaagagcagcttgttatcgaataaacgggctttggtcctttattaaataaatctagaaaaattaaaagaaaggtaaaaagacaacaatggcaaacacaaacaaaacaaaaacaacagttataacacagacaggagttatgctggcgctgctcatcatacttcaggcagtaacaaagccggcgggaacgatagtgacgggttcgtgcgtaaatgcagtgctcgcaatgacagcgctgtgcgtggggcttgcaggcggtctcgttgtagcggcggtatctccgtttttcgcgtttctgcttggcatagggccggcatttctgccgcttacaccgatgatagccatcggcaatatggtatttgttacggttatatggctgctttatgacagagcgggcagaggcgctgtgaacaagattttgacctgggcggcggctgcgctcgcgaagtttgcggcgctgtatcttctcatagtgaaaggtgtgtgcacgctgatgccgcttcctgaacctcaggtgcagacgttttcaacgatgttttcattcccgcagcttatcactgctgcaataggcggcgcagttgcaatatacatagcgacgctgatgaagagggcgatgcggtaaaaaataaagatactttttcgaggtgaaattgacctgatggaaaattttaatcttggaaaagtatttttttttgatttttgcgaaaaaagacaatttagcggcgaatgaagcatatatttctgtctttaagacaaaaaagacacgaaggttaattaaagtatggaaatgagtattattccgcgggcggcaaattttatagttaaaaacaatgctaataatccctaaaggcgaatatatattttacaaagtaaatagaaaaaacatatataaaagggggattttttatgaagattggcattgtcggtgccggtgctatgggcaagacgataagcagttatatagaggaaagaaaagcgcatggcgaggactttgagagcgtcggaatggcagaacttttgggcggcggcagtatagaggaggcgttttcggaggtgcctgatgtagttatggactttagcaacccggcaaatatcgaaaagacttgtacatatgcggaggagcataggatccctgcagtgatagcgactacaggctgcggagataccgagcgagcgcgtatagcacgtgctgcggagaaggtgccggttgtattttccgcaaattattctctcggaattacggtaatggagaaaattgcgggtgaaatgacagagtttctcggcggcagctttgatatagagatagtagaaaagcaccatagaaacaagctcgatgcgccgagcgggacagcgctgctattagcaaatgctgtaaacagcaagggaaattacgaatttacatatggcaggtatggcagcagtctgagaaaaaaacaggagataggggtacacgcagtgcggggaggcggcatagttggagagcactcgataatttttgccggcgacgaagaaatgcttgaaataaagcatcatgcagcttcaaagagaatatttgcagtaggcgcacttttagcggcagagtttgctgccggcaagcagagtgggctttatgatatgaaggatgtattatgtatgactcaaaatcaataattgaatatataagaacggccaagaaaagcactccggtaaaggcttatataaagctgaaagatgctgtgaacactgcaaacggccttccatttacagcagaaaatgcggcaaatgaagagacgcataaaatcgaaaagctgtatgaaacatttatagcgcggctttccgaaagctgccgcatatttgaatgcggcaaaactctgatcgtgttcggtgaaatgggtgacatcgaaagcgcggttattgggggcgaaaattctgaagaggcggaaaagcaaagtgcgggtgcacggattggaaacacagaaaagctaatagagtatatggaaattgaaacgcaggctcggaattcagccgttccgcttcttgatatatcaaagcttgatgcccgtgtagagccgggtgccattataagagaaaatgtgagtatcggaaaacaagcggtaataatgatgggagcaataataaatataggtgcggaaataggagcgcgcactatgattgatatgggagcagtactaggcggccgcgccgtagtcggatgcgattgccatataggcgcgggcgctgttcttgcgggtgtgatagaaccggcaagcgcaaagcctgtagtaatagaagacggcgtgttcataggtgcaaacgccgttgtgatagaaggctgccgcataggcagaaaatcggtaataggagctggtgcggtagtaacagatgacataccgccgcattcgctcgttgtgggcgcgccggggcgcgttatcaaaacgctgaccggcgcagaatcatcagcgagtgaaataataaaagagctgcgtgagctttaagcaattttcaaagatttaaaagccgaaaatgcagctcttgcatatttctaataattctctgccttctcttggaagaaagcttttacatgcttgcagacagggcagatttccggagcgcttgtgccttggaacgtatgaccgcagtttctgcatatccaggtgataggctcgtcctttttaaagacgcgatctgattcgatattggcgagaagctttaaaaatctttcttcatgatctttttcgattttggctacttgttcaaattgcgttgccagctcggaaaagccctcttctctcgcttccttggcaaactgcgagtacatttcagcccattcgtagtgctcgccgtttgctgctattctcaaattttcagcggtatttgagcccattccggatagcgccttaaaccacatttcggcgtgttccttttcgttgttggcagtttccgtgaaaatagcagcgatctgctcataaccatctttcttggcggcactggcaaagaacgtgtacttatttcttgcctctgattcaccagaaaaggcaaagcgaaggttttggtcagtctttgttcccattaagttattcatagtttacctcctaagtggaaatttgtattgtaaatatcagtatgaagtatctcccgtaaaacggtaaaatatacaataagcgcagattttacttgtcttttagctgcaaaaatgataatatcaataaatgtatcaaaaagggaaggattaaaaaggaaaagacaggggcagacaaagaaaggaacggatgaaagaacgaaggaaagcacgatggaaatagaaacaaaatatataattccggagagggagacggcagataagctctgggaggataaatttctcgtatctatggaagaagagggttcaagagaaacactttatatgaaagccgtatacttcgatacagaagattcgctgcttgcgaaaaacgacatagcgttgcgcgtgcgagctgagaatgagaccatatttgcaacgctcaaatggtcggggaaaaacgaaggggcgcttcacacccgagaggaaataaacattcctgtcggtggcgatacttgtatgatagcgccggatatatccgtatttgaggaaagtgaaattggaaaagagctgatagacctcataggagacaaaccgcttttcagcaatgtcgaaacgggcgtaatcagaagacgttttagaattgataccgggaaagctcttatagaagtgtctgttgataccggagaaataattacagacggcggtattgagccgatatgtgaaatagaatttgaacttttttcgggtgaggaatcagagcttgaaagagtgagtgagaatgtaaaagaacgctatgggcttgagccgggagaaaaaagcaaatatgcaagaggacttgaactcgtatctaacgcgaaaaaatgacgacaaaacgcgaaaaaatattatctaaataacaaaagagcgcaccaaaatcaaaaaaatatgcgcttttttgatttttcacccggtttttacaattttaacatatactttttagacgtaataagtttactttttaccgaaaagagagtataattaaatgtaattgtctactaatgaaaaagtttattatttcgggaggatatatataattatgaaaacaacccttatttcaaaggaaaataacattgctaaatttacaatggaatttacagcagaagagtttgatgcggctatagtaaaggcataccagaatacgaaggacagatatacggttgacggattccgcaagggaaaagcgccgagaaaggtcatcgaagcgcgctacggcgagggcgtattctttgaggatgccgtaaacgatatgtttgcggaaggatatccacaggcgctcgacgagctcagcctcgaggtgcttgagcagcctaaggccgactttacggatcttgcgcatggcaagggatatacggtaacgatagaagtagagacatatcctgaggtaacggttaaggattacaagggagtggagattgaaaagattgcgcatgaagtgacagatgaagatgtaaataacgaaattgaagcggtaagaaaaagaaacgcgcgcatggtagtcgttgaaagacctgctaaggagggcgatactgtacttctcgactatgatggattcctcggagacgaacagtttgaaggcggcagtgcggagagatttccgctgaagctcggatcaggtatgtttattccgggatttgaagagcagcttatcggagtttccgcaaatgaggaaaaagatataaatgttacatttcctgaggactatcaggcggagcatcttgcaggacagccggtcgttttcaagtgcaaagtgcatgagataaaggaggaagagctgccagaggtagatgacgaatttgtaaaagatatttcagaatttgatactctcgatgaatataaagccgatgttagggcaaaccttgaaaagacggcatctgcaagagcagaaagcgaaatgaaggatgctgccgttcagaaagtatgcgaagcgaacgaatttgatgtgccgcaggctcttgtaaacgaagaaattgatgcgcgcatccgcgagttcgaccagacgcttagatatcaaggctttgatgttgaaaaatatcttgaaatgacaaatactacgatggaagatatgagaaaccagattgcggacgactgccgcaagacggtaaaaacgaagatggtgctcaaggctgttgctgaagctgaaaaaattgaagtcagcgacgaggatattgataaggagtgcgcgctcatcggaatgcagtatcagatggatactgccaaggtgagagaggcaataggcgcgcagggtatcggtatgatcagcagtaatatcgcgttcagaaaggcagtagatcttatatttgaaaatgcggttataaaataagaaaatgggtatatgagattaaaagacaaaataggaggtgtgtattatgccgcttgtaccttatgtaatagaacagacaagcagaggggagcgttcgtacgatatatattccaggcttctcaaagatagaataatatttctcggagaagaaatagacgatcatgttgcaagccttattgtggctcagcttctgtttcttgaagcagaggatccggaaaaggatattgccatctatataaacagtcccggaggcagcgttactgcgggaatggctatttatgataccatgcagtatatcaagcctgatgtatcaacgatgtgcgtaggacttgcagcaagtatgggagcattccttctttcatcaggggcaaaaggcaagagatttgcgcttccgaatgccgaaattatgatacatcagccgcttggaggagcaaagggacaggcgtcggatatcaaaattcatgccgactggatattgaaaacaaaagataaactgaataaaattctttcggaaaataccggtcagcctctcgaccgcctggagaaagatacggacagagataattttatgagcgccgacgaagctatggcttacggcctcatagataaagtaattaaatcgagataacgggggataatataaattatgacagtaaaatatgatgatgaaacaaagcagcttaaatgctcgttttgcggcaaacctcaaagtcaggtgagaaggcttgttgcgggtcccgatgtatatatatgtgacgaatgcatagagctttgcgcagatattattgaggaagaatttaagcagcaggaaggtgacagctctggaaaaatgaatctcggagccggcagacttccaaagcctaaagaaatagcagaaactttatcggaatatgtaatcggacaggacaacgctaaaaaggcgctggctgttgccgtatacaatcactacaagcggataaatcagcccaaaaaagcggacgacggcattgaactgcaaaagagcaatatcgtgatgataggaccgacaggttcgggcaagactctccttgcacagacgcttgccaaaatactaaatgtaccttttgcaatcgcagacgctacagcgctcacggaagcgggatatgtaggcgaagatgttgaaaatatacttctcaagctgattcaggctgctgactgggatgttgaaagagcccagcggggaattatatatgtggatgaaatcgataagatagcgaaaaagtccgataatccatcgataacaagagatgtaagcggcgaaggcgtacagcaggcgcttcttaagatacttgagggcactatcgctaacgtgcctccgcagggcggaaggaaacatccgcatcaggaatttcttccatttgacacatcaaatgtacttttcatatgcggaggagcttttgacggacttgacaagatcatacaaaggcgaatgggtgaaaagaccattggcttcaattcggaaatacaggtgacgagcgaaaaagaaaaggatatacttttaaagctccagcctgaggatctcttaaaatacggactcattccggaatttatcggaagacttcccgttgcggtatcgctcgaggagctttcaaaagaagcgcttgtaaagatcatcaaagagccgaaaaattcgctgcttaaacagtatagaaagctttttgaaatggacggcgtagagctggagatagatgacgatgcgattgaaagagttgctgaaaaagcgctcgaaagaaagacgggggcaagaggtctcaggagtatatttgaaagcataatgacggatattatgtatgaaataccgtcgagaagcgatgttgtaaaatgtataatcacgaaagaaaccatagacaatatatcacagccggtgcttgtttttgctgacggaagcgaaaggaagagcatagaggtagaaactgcctaggcagagactttttgtaaaaacgggtatggcgcaggctgcgccctgcccttttttgtaaagggaaaataaggaggggaaacagcgtgacagaagactataatgatataaaagtgttagagcctgaaactgatgaaaatgaagtgaaagagccgctcgtgctgccgacaatagcgctgagagggctttcaatattcccgaatatggttattcattttgatataggcagggaaaaatcaataaaagcgcttgaaaaagcgatgattatgaatcagcaggtatttctcgtcagtcaaaaggatgagaatacggagctgccaacggtagatgatctttatgagataggaacggtggctaaggtaaagcagatgctcagacttccgggagactctataagagtgcttgtagaaggtgtgagcagaggcagaatcaaggaagttgtctttgaagttccgtactttaagtgtgcgatagagattatcgaagagacagatgcggaagaaagcgtggaaaatgaagcgctcaagcgttcggtgcttgacgaatttgatgaatatatagaaggaagagaaaatggtcatgagatattccgcaccgtatccggcatagaacatccgggaagacttgcggatgcgatagcagcgcatcttaatacaaaggtcgaggacagacaggtactgctggaaacgatagactgtatcgagagacttaattcgcttaaaaatttattgggacgtgaagttgcaataagacgtattgagaacagcatcaatatgaaagtgaagtcgcagatgaatcaaaatcagaaagagtattatctgagagagcagatgcgcgctattcaggaagagctgggctttgaagaggatacgattgaggaagccgaaaattggagaaaaaagctcaaaaagctcaagatgccggctaagaccgaaaagaaaatcgaaaaggaaattgcaagattcggcaagctgcagccacagtcagcagaaagcaatgtttcgcgctcgtatatcgagacgatccttgaactgccgtggaacaagacctctaagacaaagatagatcttaaagaagcggcaagaatcctgaatgaagatcactatggactcgataaagttaaggaaagagtactggaatatcttgctgttgtcgagctttcgggcgagcttaaaggtccgatactctgtct

SEQ ID NO: 3416 - DNA, 7985 bp, Unknown
  16S sequences of unknown bacteria
atcagagattttgactctcgcttaccgcttcgctgggctctcgtttgaggggaatgcaccctgctgcgcgcataattttcacccatggggaaccgaaatggggcctggtgggggaaagcgagcgggaatgttgcgaaaaccggagagaaaaggaaataatctctgaaacatggcgggttttaggggccagtttcgtcagtttttgctctttctttttggggggctgcgtgctatgatggagcggctagaaaaggcgttctatcattgacgccgcagcagcggctgcagcgcgcgaaacgtgccgcgccggtatattttgggggaaaagggaagcgctatgtttgattatttgattaaagatggcatgctgctcgacggcagcgggaagcctggctttgccggagatatcgccattcagggcgggaagattgccgccatcgggcggatcgacgccgcggcggcgcgggtcatttctgcgtctggccttgtggtgacgccgggcttcattgatatccaccggcacgccgatgcggcggtattccgcccggattttggccagctggagctgcaccagggactgacgacgatcgtcaacggcaactgcggactctccctggcgccggtcagcccggcgcacaaggcggagatcctgggctacatgagccccatcaccggccgtgtcccgtcccatatcgagacggcgacgatggacggctatctcgagcaggttgggcggcagccgctacccatcaatgtcgggatgctcgtcggcggcgggacgctgcgggccaacgccgcgggctacgagacggagcggctggagatgtcccattacgataagatccacagccaactggaggcttcgctgacggctggagctttgggcgtctccctgggcctgggctacgcgccggagtgcttctacacgacgcaggagctcatccgcgccctttcgccggtgcggggcaccggcattcccatcacggtccatatgcgccaggagggcgacgggatgcttgcggcgctggaggagatgatgcaggtggcccgggcgctgcaggtgccggtgcacatcagccatctcaaggccatcggcaagcgaaattggaacgacgtcatctgccgtgcgctggaaattctggaccgggcccggcaggaggggctggatgtctcctgcgatgtctacccttataccgccggttcgacgcagctgctgcatatcctgccgccggaattcctgcagggcgggacggaggcggccttgggacgcatcgcgacggcggacggccgggcgcagcttgcccagcgcctggcgacgggcacggattttgaaaatatcgtccagctggccgggtgggagaatatccgcatgtcgaccctgtgccagccggaaaataaaccctatgagggcttgtccgtccaagcggcggcggagcggctggggaaggacccgctggactgctgctgcgatatgctgatctccgagggcgggacgattacgatgatcgacttcatcacctgcgaggcggacattgcccgcatcctgcaggcgccgtttgccaacgtgatctccgacagcacctatcccacggaaggcatcccccatccccggctctatgggacattcccgcgggtcatccagaaatacgtccagcaagacaaggtgctgaccctgccgcaggcggtgcagaagatgacgtccatcccggcggatgtgctggggctgacgggcaagggacgtctggccgtcggtgcggatgccgatctcaacgtatttgatgcctgcaagctgcaggagaacgggacctatcaggccccggcccagtttgcctccgggctggaggccgtctttgtcggcggcgagctggtactgcggcacgacgagttgaccggcgcgacgccgggcaatgtcctgctgcggtaagcgtacgcgggaaacgcaaagaaagagcaaataatacaaagcggctgccccataagcatgggcagccgctttttttgtgctctgccagagacgcagaacacaaaatttgtcgaaaaacaggagattttcgtttataattcttaaaattggctaagaattataccatttccggcaatttgtggtagaataccggtacagcaaaaaatgacggaggtctcgctatgaaggcttatttgaaaaagtacaaatgggcgctttgcctgcttgtgatatttgcggccctatgctgggcctacgccagccattacagcacgcggtcttaccccactgtcctgacttatcacgccatttcggaggaggcggcagaggagaacgcgtatctcttcgtccgcccggcggacctggaggagcagctgcagctgctgactcgcaaggggtatgaattctgctttgcctcccagtatgaaatcacaaataaaaagcaggtcatcctgaccctggacgatggctatgaggacaattatacaaacctcttcccgctgctgaaaaagtaccgggccaaggcgacgatctccgtcgtgaccggcagtattgggcagccgggcattttaacagcggaccagatccgcgagatgagcgacagcggcctggtcgagtttgcctcccacacggtgacccatccccacctgaccagcctggacgacgcagcgctggaccaggagctgcaggcgtccaagcacgcgctggaggagatcaccggcaaggatgtgcaggtgatcgcctacccctacagtgattatgaccagcgggtctgcacgacggcggcgaaatattaccgcttcggctatatcgactggccgaaaaattactacgcccaatatgagatcggccgcacctctgtgcaccgggatatcacgatcgagcagtttgaggcgctgttacactgagttaggctccgacgcgttatccggcggctccgccggggcatcgccgggggcggcgtctggcgcgtcatccgacgcggcatactgggccaggcattgctggcacagggtccggcagctatcaatggcgcgctggggggcgagaattttcgcccggctgccgaagctgatgatccagctgtagaacaccggcgagagggcgatctccgtcgtcacggtaaaggtgccgtccggttgggggatgagcatgagatccgtcccgaatcggtcgatgacgacgccggccaggctggcggaaaactgcattttgaccgtcgtatgcggcccgttgaacatgccgaagacctgccgcccatagcgggccaggtccagctgcgccagctccggcggaacctggcgcggcattgccagggcagtgatgcggcgcattttatccacccggtaatgggtgatgccgtgggcctgcgtataggcgatgaggtagtagtattcctcgtgccagaccagcgcccagggcgttgcgatgcggctcgggccgcgcttgtggcgctgcttgtccgggccccattctgtataatcaaagcggatgcagcagtctgccgcgatggccgattggatcgcgtccaccgcgtagtagatgctctcgtccatcgtcttgacccgcccggcgacgacgacctggcgctccaaaaggcccgcctggtgctcgctggaaagctgcgccagcttgcggatcagggcggcggattttttctccgtcaaaaaccgggaggactggacggcgtctaccagcaggcgcacctccggcagctcaaaggcgcggctgcccaggtaatagctgaagtggtgcccctcccggacccggaccaggtccagcccaaattcctgcagcagctgcaggtccgtgtaaagcgttttgcgctcggcggggatctggagcgtattcaaatacgcctgcagtgcagcgatgctggccgggtggtcctcatctgtgcagcggtgaaaatagtcgtataaatacagcagcttcagccgctgggtctccgctcttgccatatgcgttgcctccttgcgatgcgcctgctttttatttagtgtagcacagcttcgcgcaaaagcaaggcttattctggttgtcatatgccgcgcataaaaataggataaaaattatccatttccccacgcctttcttgacggaaaacgccggacgtgttaccataagaacgataggaaggaggtgggagaacgatgccatttcgccggaataacaaatatgttgcctgggggctgacgtttttaggcgtgatcgtcgccagcatcattatgttcgtcgtcttcacgaatctgaagggcttttttgccgtcattcagaagtttatctccatcatctccccgttcctgtatgggctgctgtttgcctatctgatgaaccccattatggtccgggtggagctttgcatggggaagctcctggcggagcgggatctttcgccccgggccaagcggaacctcagccgcggcgttggtgtgggggtctcgtgcattgtgctgctggcggttttgtatctgctgatttatatgatcgtcccgcagatcatcgagagcttaaataacctgttcgacccgcagacgatcatcaattactaccagcagctgcgcaagtggatcctgaagctcttccaggataatccggatacggaagcctggtgcatggagaggctggaggatgtctacaaatgggtggagaactggctgaaaaacctcgatctcgaggcggccttccgcagcattacgacaggcgtcgtcagcgtcgtccgggcggtggtcaatctcttcatcggcctggtcgcggcggtgtatatgctgctgtcgaaggatacgttctatgcccagctcaagaagatagccgttgccttcctgcgggaggagcgctgcaaccgggtctttgacgtctgcacccggacaaataaaatcttcggcggctttatcgtcggcaagctcattgactctttgatcatcggtattctctgctattttgggatgctgatcctcaagctgccgtacccggtgctgattgcggcaatcgtcggcgtaacgaatatcatcccgttcttcggcccgatcattggcctggtgccgtcggcgctgctgattttgctcattaacccctggcagtgcctgtactttgtgatcttcgtcctttgcctgcagcagtttgacggcaatatcctcggaccccatattttgggcgactccgtcggcctgtccagcttctggatcctggtctcgatcaccgtggcaggcgggatattcggctttgccggaatggtcctaggcgtgccgttttttgcggtgttctactcgctgttcagcgactgggtcaaccggaagctttgcaaaaagggccgcccagcgcagacggcctgttacggcaagatcaagtgcgtcgccgatctggagcggccagtcaaaaagcccgcgccgccggaaaatctgacaaaggctgccgccgtgctggaccttaacgatgagatcgagatcgaatccgccccagcgggcgatgccgaggacacgccggagtatgactttgaccgcgatttcgcagggctggattaagcacccgcgaaagcgcaaagaaatggccgggcagcgcgggctgccatgggtttatcaataagcccccaaagggacggcccttgggggcttttgcttcaccgccgcccacttggcggcgcggatccccggaagggagggactctatggaaaaatttacagagattttgaaccaatgcaccggctttttagaggggctgcggggcaatgaccaatttgtgcagctctttggctccgtcgtgcggtatctgctgccggtgctggtgtttttcgtgctgctacggtgcgccatctcgctgctgacgttccgcaaggagccggagatctgggcctggctcgtcctgcccggcggccaggagctgccggtgacgcattgggaaaatgtcatcggccgggcgcggggcagcgatatcgtcattgatacgccgtccatcgccaagagccacgcggttttgacccgctatgacgacggcagctggaccatctccgatatcggcagccgcggcggcgtcagcgtcaacgggcggcagacggagatcgtcgccattgacgaaaacgatgtcattaccctaggcgatctggagctgcgtctggtgcccaactccaagcgggagcaggcgcggcaggcggcgggccggacaaaggccgggcataggatctcgccggggctgtcgctgcttctgctgacactgctgcagctgctggcgctgctgcagctggtcacgacggtggaccccgattatatcggcagcgtctgcttcggctttttgatcctgatctgtctgcaatggctgctgtttttgacgatgaaattcgcccggcggcacggatacgaagcggagaccatcgcgtttttgctttcgaccatcggccttgccatcgtagcgtccaaggtgccggattcgatctataagcagctggcggcgtccgtcatgggcattttcctgttcctgtttatcggctgggctctgcgggacctggagcgagcgaaaaagatccgctatatcgccgcggcggccggtgtggcgctgctgctgttcaacttggtcttcggcacggagaaattcggcgcgaaaaactggatctccctaggcggcatctcgttccagccgtcggagctggtgaaaatctgctttattttcgccggggcttccaccatggagcggatcgtgacgaagcggaacctgattctgttcattggctattccggctttgtctgcctgtgcttggtcttgatgaacgacttcggcacggcgctgatcttctttgttgccttcctggtcatcgcgttcctgcggtccggcagctttgcgacgctgtcgctgatctgcgccgggacggggtttgccggggtgctggcgctgcggttcaagccgtatatcgccaagcgctttgccgcctggggccatgtctgggagtatgctgcaacgacgggctaccagcagacccgggccatgatggtcatcgcctccggcggtctgtttggcctggggctgggcaacgggtggctcaaatacgtcgccgcgtcggatacggacctggtcttcggctttgtctcggaggaatgggggctgctggtggcagtcatgatggtgctggctatcgttacgctggcagcgttcgtcgtccgctcggcgtcgctggggcgcagcagcttttataatatcagcgcctgcgccgccgtgacgattttgatgacgcagacgatcctcaatgtgttcggcacggtggatatcctgccgctgacgggcgtgacattcccgttcgtctccaacggcggctcgagcatgatgtccgcctgggggctgctggcctttatcaaggcggccgatacccggcagaacgccagcttcgccatccgcctgacctcccagaaggagctgcgggaagaggcggaagcggagacgttcgacgagggcagctatgacaatgcctacgacgatggctacggcggcgcctacgacgacggctatgatgacgcctacgacggttacgatgcctacggcgacccggagggaggcagagggtatgaatagagtttccaaacgcagtgcgtttgcgctggtgctggcgtttgctctgctggcggggctggtgctgttctgcgtccggtatgtcgtggatgcggggcagtgggtgacctaccccggcagcccgcatctgtataccgggtcgaatctgaacaccggcgttgtcttcgaccgcgccgggcagacgctattggattccgcggacggccgcgcctatgatgccgacgccgaggtccgcgccgcgacgatccatctgctgggcgaccgggacggctatatcccgtcgccgctgctggatcactacgccagccggatgatcggctacagccgcatcaccggcgtcagcagcgccaaggccgggacgggccggatgacaatgaccattgacgccaatgtgcaggcgaaggcgctgcagctgctggcaggccgtgctgggacgatcggcgtctataactacaagaccggcgagatcct

SEQ ID NO: 3417 - DNA, 29863 bp, Unknown
  16S sequences of unknown bacteria
tatcgcagtcgagatagagcgccttatcgtactgcgggaacattcccgcgataaagatgcggaaataagtggtgcaggtataataatctctcatatgcaggagggaagaaatgcttttcagtttttccgtcacgtccacgaaagaaacctcgaacccctcttccgaaaaacgcatgattttctcctcataatcggcgctgacgcccgaatgaaggacgtagatcttatagagatattccctcgaagaattttctctaagagagcgaagcgtcacggcaaggaagggaagatagttgtcgtcggtggcaaaaaacagaggaattatccccttcttcgccttcggcgcaggcgcgggacgccctttggcgcgcacagattttcccacctccgtcttggcgggcgtataaatgcgagcgtcggcttctccccagcccgttcttcccagcaaaccgatttgttcctctacaaactcagaggcagcaagcgatattttattcataaatcaatactccttttccattttcatacttggatcgccgcttttcgcttcctttcccaaacaggagcgaggcaaagcggacttttttgtcttgatattattttatccgcttttcggcaaaatttcaacctactccaagcgaccgcctctctactcggcatttttgcgattctaccccgcttcacctctcctctatctcttttttcttcctttccgccccataaagtcattgaataattataaatattaagaataattatacatttctaatatccttttcgccgtttgtcttgaaaaaacgcccgatttcgctctccgaaaagggaaaaatcctgcgaacgtttcggcggaaatccctcttttttcggatgattttatcgttatcaattaatttcgataggaaagaagctatacaaaaattactctttataaattccccgctctcgtttttccttccgccatttgccccgactttctctactctgtttttgccgtcggtagagaaaaagtccgattctactgtcggtagagtcgatttttaccccttttctactgcgagtatacttatctcgacgattctcatcttatttgtcaacgatttcgggaagaaagatgacatttgtcacgaaaggatattacacctattatttatatactatacttcttcaagagatgcagaattttccaatatgccttaaaaaacgtttcttctcacttctcagaaaaaggaaacgtttttcgtcccctactttccgataattggaaatttactcttgcattctcctttttctcccctctaaaaaatcgttccgcgcacctgcggcgaccgaagagaaagaaagctaagtaagtaagtaagtaagtaagtaagtaagtaagtaagtaagtaagtaaagaaagccctcctgataggcgcacgcgcagtcaaaaggacagaaaaaaacgagccgctcggcaacccgatttgcgcaaaacataaaggccgtttttctcataattcatcccgactgcccatggaaggcgtcatgcgctcagtcccctataaaaaaccaagcgcgctttcccacggcactcgccacggaacgttacatttatagatttatatatcctctgtaaaagcataggctacgcaagcgatctgggcgcgacagtcatgcactttcagcttccgatttggatattcctctccccgaaaaggcatccggggaagggaaaaaacggagggacagccgcgcgaacgtttgagatctgtcaaagctcgatgacgcggttggcgacgcggcggcgaaaagcgccgtcgtgttcgacaaagagcagcgtcgggcgaaaatcgaggataagttcctctatctgtatgcgggaaaggacgtcgataaagtttaagggttcgtcccagatatagagatgcgcgctctcgcaaaggctgcgggcgagcgccgtctttttcttttgtcccgcgctcaaagaggaaagatcggtagagaagtcctttttttcaaagccgaatttatggagcaccgctttgaaaagactttcgtcgataccgtaagcgcgggcatattccccgaaacttcccgccaaactcccgctgtcctgcgccacataagaaattttcagctgcggaggctttctcagttctccccgataggcactctctccgagaatcgctttgagcagggaggactttccgcagccgttttttccgttcaacgcagccctgtccccgcggaagagggaaaaagtaacttccggacaagcgggtttttccccgtaatacgcctgcaaagccttgacttccaaaagtctgtccgtataaaactctaacggacgaattttcaagatttctttttcttcgacgtttttcagaagcgtcgatttttcttccagcgctttgttttggcgggactcgatcaccttggaagccttcatcatctttgccgctttgtggcctacgtatcccctatccacccgcagtcccgaattgcgcgcgccgtatttgcccgcttccgtcttttccgaccaatccgccgtccttctcgctgattctttcaatcgcttgatctccgagcgaagcctgtcgtttttttctctttcgaacgcttcgcggcgctcggcgttctctttccaggaagaaaaattgccgctttgaatctcgatgccgccgcgatggagggatagaatgtgatccgtacagagatccaacaattcgcggtcgtgagaaacgagcaaaaatccctcttttcgcctcagatattccccgatcgcttttttggattcctcatcgagatgattggtcggctcgtcgagaagcaaaaagtgtccttctctcaaaaacattgccgccagcagcgctttggtctgctcgccgcccgaaagactgaaaaaaggacggcacagggcttcgtccgctactttcaggagcgaaagttccttgaaaatccgccactcttccgcgccgctcaattctaatagtacctccgccaaagtaagccgggtgtcccttacttcgcagggaaaatagtcgatttgcgaaacgcgtgaaatgcgtcccccgtactctccttcgaaatcccctttcaaaagccgcagcaaagtcgttttgcccctgccgttcctgccgatcagtcccgttttccacgtcgtgtcgatttgaaaggaaacgtcctcgaatacattttccccgcttcccggataggaaaaagtcaaatttgtaatttgtatcgtcataaagaatattctcctcgatattcgccatatcattgggaagcgaaagcgcgaaattttccgcttccgtttgctccgtccgtcctgcggacaaaaaggggaataatgttcctaagttctcctcaaaagcggaaagcacttcttcccctaatcggccgcgcttcgccttcccgtcccgccgttcattaaaggagcgagaacgcaaaaggcggaaaggacggccgcatcgcccatcggcgcccgaaaacatggagcaaagaatacaaaaaagccgcaagaaagcaaaacaccttcttgcggcacgcgccatccttctgcaaagagaattagagataaagagtttactttcttgcctgcgggcaaaacgaacataaggaacgccgccgcgtcccccgatttccgtcttttcccgttatttttttcagcaagaaactatatacactccttatgcctccgtattatttttatcgacaaaaactgaaaccctcttacggtttcccctatacttttttaaaagccggaacgcggctccgtttcaaactgccgtcttctttatagccgtttccccgacggcgacttttccgccgtagacgcttttttcaagcgatttgttctttgttattatagcagatccttttgctcctgtcaagaaaatacagctctccttatccccttttatagggcttttaccctttttcggtcgttttcggaaatcggtgccgcgttcgtccctattctttcattcgttttcgggaaacggagattgaaggcgcttttcatagactttgtctatccactcgcgcagacggctgcactctttttcgtcgagatctcctatctgtttgcccgtgcgtttcaacacgacttcttggagctgctcttccgtatagccgattttttcccaatcctcgggactgagggaacaggcgttttccttagcggcgcaccccttcgcctttttcgcgggctgcgccgtcaacgacctctcccgcggatattcgaaaacggtttttccccgttcatccacgacgacaagacggcggatgcgccgtaccttatcgtactctatctccatgacgtcatagcgcgcaaaaggattcgtcagcttatacctgccgccgtccttctgcgtgggaacgttcaaaaagataaacggagcggtgtagagttcccgtccgattccccatttgacgcccgcgcgtttgaaggcgtcggaggcttcgccctttttctcgttgcccgcgtcctcgcggctttcgatgccgcagtcccatttccacacgaaaggcgcgtcgggcgcgggacggatgccgatgccgcaatagagattgccgtgaatttcccgatagtcgtccgcccaattttcggcgcccaccgtttcgtcgagaatatccatgtccacgcgcgacgtcttgtagatgagcgccaccgcccccttctccgtcgcctgcttgattttcacttcgatttcttccgcttttaaaagtctgaatttcttttccatatgtattatgtataaagaggggcagaaagtccggacgctcaaaaaacgccttaaaaacagcatggttcatttaggcaaaaactatgcccgccgcgcggaaaaaaacggcggccgtgaaaaatcccgaccgccgtttttcgatttgaaaaaagctttcgcttctttcggaaatctatctataaatcatactctctcggataaacttttttatacgcgggacacgccctcacgcgacctcttctcctttggaaaaatcatagggaatcacctgtttttcatacacgttccaagtgtcgagaatggttttcacgagctcctcgggaacgtataagaggacgtccgcgggcaccttgccctcccagtggaaagccgcttcgacgtcgagatatacctcgacagacgttcccgtggaaagggaggtgggaagaatgtgacccctttgggcgcgaatatgcatctccgtcaaagaggtacagtaattgaacgccttattttcaagcttgacggacgagcctactcccgacgcggaaagatcgactttaaccaaggcggcgcagccttcgaacgccgcgtcttcaaccgcgatgccagcgacgccggcgaaatcgctcgttacggagatctcgacatacgccagtgaaaaagagtcggaaaaagccgagttctcaatagtgacatacgccgaagcgcccgtcgccgaaatctctacgcccttcaaattgctctcgcggaacgccgattgccccaccgcgacattgccgccggacaatttcaaactttctattccggagcaattcaggaaagcttccgcgcctattcgaatcgagttctccgacggcacggctatctcaatacggtcgagcgttctgcaattgacaaacgcgcttattcccacgaagacatcctcggtatccgcaaaggctatgcttttaagcgccgcgcagtcgaaaaaggccttctcccttacgcgggcgggcgagccttcgaaagtcgtcagatttccgcagttcgcaaacgccttttcccctacctcgacgcaccttttgaagcttgcgctctccaaattcgtgcagttttcgaacgcggacgcgccgatttgcagcgcttcgttcatcacgacgacacagacgggcgtattcgcaaacgcagcttctcccacgttccgcacattgagcagctccacgaccgtcaaatctccgcaatccttgaacgcggagttcgaaacggacgcaagccttccgcttcggacagcttgaagccccgtacttttaaaggcgctttcgcctaccgattccacatacgaaagatctatttttttcaaagatttgcaattgtagaacgcctcgccgtaaatttccttaatattgcctaattcgacgcgttccaaaggcgtattggaaaaacaattggagggaatgcgcgtaacggcgcaattcttagcgaattctactcgggtaagcttgctgtccataaagcaccctatcccgatggaatcgttttctttcataaaaaaggtaaagtcggtgatccccgccgcccgaaaggcatacttgccaagactgtcgacgtcggtgtcggtgaacttcgtcaagctctcgcatccgtggaacgcataatcgcctatctccacgccccctttccgcttgccgatcgtgacgctttccagatttttgcagttctcaaacgaatagagatccaaaatcaaacctttcgcgctttccgcgaatacaatctgacggatatttttattttcggaaaaggcgtttgccgacaaggtataaaagctgtcggggaaaacgactttttccgcccgggattccatccacgcatacggcatattgcagacaacgccgtcgggaacgataaattccttcgtttctttaaaggcgggatagaccatcagcatatttcctgccttattgtataaaacgccgtccgccgttttaaaggcggcgtttttttcagaaatctcatagcccgcgcagtaatagggcacacgactttcctccgtcaggttttcgggaagagtcacgaccccgatatcggatttgcgaaaaacatatccgtcgtaattcaaaacttttatatcgccgaaactcagctgcgtcagccgagggaactcctcttcgttttcggatgaatacggacctatcaatttcagagattcgggacttccgaacacgattttttgcaaatttttacactttccgatagattgttgatggaatatggagatagaatcgggcaggacgagttcctctatgccgtccgcgcctatgccgttttctaaaccgttccccactctcagcgccgttacgcagtcgggtacgcgcagcgttcccgtaagacccacgggataatagacgagggtccccgccccgccgctcgccgtttccgccttattgacgacggctccgtttgccataaagtaatcgggattttcctcagaaatattcacctgtttcaatttcggcagattgcatacgagcgaatacaggtcggcggcaatctcgttctcgctcaaagaaacgttcaccgtttttccgaagtttatgctttctgcttccgcgcagtaggcgaacgtgttgcgtctgaaactttcaatgcccgaaacgtcaaaatttttcagcgagttgccttttaggaatgcagagcgctctatgccgcggatcaaaggatggggtgtaaaatccgtctgtccttcttcgtcgaaataataaagcagcgtcctaccgttcgccgtacacaggcttttgtcgtccagcatcaccatgtcgggatgcccctcgcccacgacgaattccccgccgccgcggataaactcccttaaaaattccgcgctttcgtcgctgaacacgatgtttgaagacgccgggcagtccttgggaatgacgatttttttcggatatacgttgaggggatcggaaaggaaatcgtcaaaaattcccttagcaaaataatctccgccgacaaaagttaacgtttcgtccgcgttgttgtatattctttgagaagaccaaattgtccggctgtatttgacgtagggcttcaaggtcagatcttccgtcacgcgaagctcgttcaaagtgtcgtaacgctcgccgttgacgagccaatatttcacctcggtattggcgttgcataaaacccaattaccgaacgactcgtcgatatccaccgccgcccgctcggggagcgtataatcaaacgaaccgtactctcccggcatcacgacctgcaccttgtgtttacgagtatagtcgagattcgtgccgtcgagatattttatcgtattgcccgccctagtcagttcgctgtccgtcgagaatttttccaaaagcacgttgcggcggcggctctttatgttgtcgcggagataataagcgtcgatgtagagcgcgttattttcgactcccccgaacgacagatattcagaggtataccccgaatcgaacgaaaacggagagatcgccccgtccgtatagagttcgatgcgcaccgtattgtcggaaaagaagccgtcccccgtcagcaagccgattctatgttcctcctctctataataataatcgtagctatacggctcgtagagggtgtcgtctttaaagtcgggatctatcacgatttttccttcgaggctgcaattttttacgacgccccggttattacttgcaaacgcgtcatagccgacgggtaaaacggcggtcgtcttgatctttaagccgttgagaatccccgcgttgtttttaaaaagggcgggggaagtgttgcaggtgatcgtatagccgtaaggattgacgatgatccccgtgaatttctcccgatagatctcgtaactttcccacgcgtcgagttctatgtcctccgtcagaatatagctttccgtcggctcccatctcatgtactcgtttttccagggggtatagtcttcctcgttcgcttcgtatacggcaaaatgattgacgaaactataagacaacctcttattccctatgccgtcaaagcggctctcgctcacggtgaaagtaagctcccaaatgcccgttcccaaagcgtggacttccccgcgttcgtcgagaaagatgccgtcgccgtccactttttcgctgccgatcagcttacagacgctctgtttgcgaatggggaatttatgcccgtcttgggacttttcgaattccgcgtactcgggattcacgtcgctgagtttcagcgattccccttttttcatctccgtcatttccttgggcgcaaagtctttcggatacgtgttattaaacactctcggaccgttcaaactgaaaacggccagagcgcaaaatccgagaaacaatacgggaaatagaatcaggagaatttttctgccgatgagtttcgtattttttttcactttttccacctccccgttccgctctctgaaaggtcgtcggcaacgtcgattttttcgtttttattccgcgggactccattggagccgcgcgcgaaaaaagagtccagcgtatcccccgcggctccgctttttttccacagtcttccaaagccgcccctgaaaaaggcgtttgcggaaaaggcgagaaagatcagaaggagtcccgctgtaagcgtcgctatgttgcagatgttccagcacgcgtagcacaggaagatcggcgccctttccgttacgtctgcgtaggttaggtatgcgtgtgtgtattccgtataagaaaaggggtcaaacggcatgggatacgtataaagttcattcattccccaggcgggcgcctgcgggatcacctgcacgagattcgcggatgcgagccaaaagatcgccatcgccgccgcggacacgactcccgtcaaaactttggcgaagggggagcgcacggccctcacggcgtttatgacgacggaacagagggaatacagcaccaaagcgttaatcgtcaccgagagtatgaaaaaaatataatacggactgcggtgacagagcgtaaacatcaaataggacacccgaaggggagaaaagtcctggggatctgtctttcgggcgatgaagtccatcagcgttccgcccagaagcagcaccgtcaccgtcgcggcgcagcagatggcgaggcagagcatccgcgtcgtcaacagggagagcggagtcttgttcaccttggcatacagcctgtcgtaagccgcggtgcggtaaacggtcgtcgcgacgagataggcgaagaggatatagagcgccacgcgggaaaccgcgtctattccctccatcgaccagcgcgaccaccaccacagcaccccgcagacgagccacgccgccccgtagccgcacagggcgatgaggggcactttgccgagcgctttcaattcgtataaaaacaattttttatccattgaccttctccttatagaattccgcaacgctcttgcccgtgctctcgcgcacgtcctcgctcgcataatatcccgacaatttcccgtcctttaagatgagaaatccgtcgatgagcgcctcgatttccttgatctcgtgcgtggtgacgataaacagccgcccctcgccgcactccatgatcatcgtgcgcgcgatgcgctcgcgcatattgacgtcgagattggagagcggctcgtcgaacaggcagacgctcgccccgctgtacgccgtcagcaaaaatttaaaatactgtttcatgcccgacgaaagggaaaagatcggactcttcaaggagatcccggcctcttgcgccgcctcgaaaattttgtccctttgaagcccccgcgtaaaggtgtcgtaaaattccaccgcgccctttacgttcatgccgaagggaaaagagccctccgtcgtcatgtacgccacgtcctcgaaatccgtcttgtataactcgcccgaaaaatccccgtccaatcccgcgaggatcctcaacagcgtggtttttcccgagccgttcagcccgaatatccccgctacgccgcttaacggcagcgagaacgacgccccgttcagcacgacctttttgccgaatttcctcgaaatatcctctcctccgaacgcgtgttctctcactttgaaacctccttcgcaagcttcataaactcctcttcgtccaccccgcagccttttagctccgtgcggaattcgcccatgcgggcgcgcaggtactcctcccgcttctccgcgatcccgcgctcgtccgcgttgacgaacttgcccagcgtgctgtccgtatagatcagcccctccgcttccagctccgcgtacaccttcaccaccgtattgggattgacgcagcaaaaggcggcgaactctcgtatgggcagtatcttctgtcccggggcgtaacggccgctgaatatttcttttttgacgtacgccgcgatctgcgacgcgatcgtctgattgctcttgaattccaattgcccgccccctcatttttgtattattgaaatagtacaagtaggtttttaaaaaagagcgttagccgcccgaagcccttgtattattcatctaatacaataatagcatatgcatttacgtttgtcaatagtttttgaaaaattcctcaaagaaaaaaacaaatcggaaaagggcaactctttcgccccgcccgcctttcgtttaagcgcggagccttcgttttttcaagcgctcgaaggcgagcgtccgtcccgccgccgaaagccgcgcccttcccgaaagagaaggggagccgccccgctcccccgggcgaaatcttccctcgatccgcccttctcccgcgcgcgcccttgccaaacggaggaccgagaaatcggaagaaaagagccgctgcgctttcccgcccgcccttcgttccgcccctattatgggagcgattttttctccgtcgagggcaatcggcaaaaaggtcgtcggttcactccctttgtcgaaaatttttcatgcgtttccaatcggggctgcccggacctcccgataaaaagctgtatgcgcggcgtccccgcagcgcatgagatctttattggatcgttgcgtttttgatagggcggcaaaaagagaaaacgcgaggggagcgatccctcgcgctttcttcacaaagattcatcggtatatgcgcgctccgtccgccgaagcgtccgaagcggggtaagcgatcgttgaaatttgcccgcgggcggggacggatccccttttctcgacggcgagcaggaattcttcctcgtacagcgggcgggaaaagaggtagccttgaaaatagtggcagcggaggcgttcgagaatctgcttttgtcgcaccgtttccacgccctccgcgacgcactttttccccgtcctccccgcatagcctatgacggtgcggagcatcctctccaccccgctttcctctatgcggtcgatgtacattttgtctatcttgatatagcggacgggaaggagcgcaactttttcgatgtcggaagagcctttgccgaaatcgtccaccgcgaggaaaaacccgctttgttccagcgcggcgaggttctccgccaccgttcccccgacctcgtattcctccgtttccgttatctcggcgatgatgcttttcggctctaagccgctctcctcgacccaagccgaaaagcatttgccaaaccccttttttttcagctgtacgggggaaatattgacggaaaagacgatattttcaagcgccaaccgcgcccggcattcgcccaattccttcaaaacgcctatcgtcacggcgtctatgtacccgctctgttccgcatagggaataaagtccccgggcatgacgattttcccgccgtattccagacggcagagcacctccgctttattgaacctctcgcccccgctttcgtagatgggttgaaaggcgagctttattttccccttttttagagcttcggccaaagcggggcgccgattatccgttgataatttcatccgcaatgcgcagagcgacctccttctccgtcgcgtcgaaacgaaatcccacatacctctcgtccgtttcgtacctcatcgccaccaccgtgccgaaaacggataccatcacggttttgtcccccagccgcgtcggctccgtcgcctcgttgaaccagctgtaatcggtgatgtattccgcgcagcgcttatccacggcgatgctgacgagaaatttcgtcccgtcctccgcctgatactcgacggctacggacagcgtcgcgtccgtttccctgtcgtaataaagagcggtggaagacaccgcatagccctccacggcgtcggggaaaaagacgcccgcttcctcgctgagccgcggcatggacagatccgtcctcacgcagctttgatccatatagatgccgtcgttttcctctttcagcatttgcggcaacacggccgcggcgaccacggcgacgagcgccacagagcataaggcgcaggcgaatttccccgcgggaaattccctcttcttagggcggtaatacgccgcgatgatctgccggttgcggtcggaacggtcggggacggaaagatcttccccgacgccgatattttccaagtccttccattcttctttcagcgcatttttcatggtttccccttttgacctctccgttttaccaaatgttcactgccaaagcgtaatcgagcgtacaggaatcgtacaggcgaatatagccgtcgggcagggaagagatgaccgtgcggacattgatgtagcggtcggtgcgatactttacctcctccgtttccttgacgaagcggaaggggttataccaaacgggcgaccacacggatttcgtttccgttctgtaatactccacgttgcggtatccgtaggcgaccatggtatgattgccgctgtaataattggtgaccatcatatcatagccgttcgcctgtgcgatcgaactgatggcgttatatctgtccacgaagagcaccacgggcttgccgtttttcacggtggattcgaaagcggagaaattgagggtgtttcccgacgcgaggctgctgtacgacacgttccgtccccgcctcgtcacataggcggaaagccccgttttgaaattctcgtacgtggtcccgccgtagacgttcgttttcatatcgtagtagagcgtatcgatgaggttgcgcgtagcgctgctctccgccgtccacctgccgcccgagtaagcggtgtaggcagggagtaagtcgtcgtaaaaggagtcgtaatagccgacgacgatcccgcccgcgatgttcgcgcaggaattttcgtaagaagtctgcatataggagggcagaccgcgggagatcttataggaagtttccgactttttcgaatattctattttttgcgtccgactgcccgcggaaacgttgaagtcgccgtacagcctcgccacgggtttccccgtcaccgcgtcgtaaaagaaattgccgatgatttcgagatagttcaaaaagccgccgtacacggggcggcgcgcgtccttgtacggattttccgcatctgcgtaatattccgccacttcgtacccgctctccgtttccaaaaggactaaaaacccccgcctgtccccgatctctatgtcgtacaaaaaacccgtttcttcgagcgacagatcgtataacgcccgtttttcaaagcggaattcgtccgtttcttccagttcctcaatggcgtcccgcacgacggcgtcgggggagatcttcgcctccgtttcttccgccgcggcggcgacggcggggaccgcacaggatacgaggcagcaaaacgccgccaaagcggcaagtatttttttcatttttccaccctccattataatacaacggacaagccatccctttttgcccttctcttccaaattttatttgccgttttttcgggaattacgtcgaatttcatttgccacacgacaagaagtatggtaaaatagtaaacggaatattttatattgggcgttttactgcgcggtcggggtcggcggcttcgtccgcgcgaggatcatttttcggcataagggaaacgatattgaaagttgacaacgaaaaaataaatagcctgctcgaaagcatccgaaagaacgacctattcgcgctgggggaactgatggaggcgatcacgcctaaaatcgcaaaaatcgcctgcgcaattttaaaggacccgcagctcgccgaagacgtcgtcgacgaagtgctcatcgctctggtgcaaaacattcattctttcaaatcggataaaaacatgaacggctggttgaatgccgtcaccatcaataaatccatcgactgccttcgcaaaaggaaaaacgagtttcttcccggcgacgattttctctccgccattcccgccgcgatcaccgaggacaaactggcggaaaagctgcaaatcgtagacgtgctcaaaaaaatggagcctttgcaaaggcagctgttggtggatcgcgtcttgaacggagaaacgctcttttccctcgccaaaaaatacaatctcaccgtcaagcaggtgcgcattcgcctgaaaaaagcgaacgccgccttcgcggcgctctattccgaacgggaagactgacgagtgcgcaactttccatgaccgcatatgcgcacctgcacatttttccatgagtttcccctttcgttttttgtctgtctgtttccgcgcggcgcttcgaaatcgtttcgaaaagcggccgctttattttttatcgggagcttaaagaggagtttctatttccaaagcgctcgaaaacacgcggtcccttttttccgccgcctacggaaaacttgccgaaaatacgggcgtttttctttcccggagagtcggactctttgtatttacagaaaacttttcaaagtttcggacgtttccccgcacacgggaatctgcgatttttgtgcgcggaggagagcgcggaggagagatagaccgacagtttcctcccgcagacggagtctgtaatttttatccgcgaggaaacgcagaagaagggacgtcatttctccccgcgccgagaaaatgagtgtttttattggcggaaaacaaaaagtcaaggcaggcatccttttgcacgcgtcggtaaaaccggtattcttcgtctgcggaaaatataacggcgtcgcgggcgtcctcttctccgcaccgagaaaaaccgacgtgttttgccgacggaaaatatgccgaagggatgcgcgtccttctcccccgaacaaaatggaaaactttataaaacggcagtcctcgccttctctcctgttatgcgcctcccgacgcgcgggcgaagaaaccgttttttcaaaaaacctcccccgaaagtcaacgccttcgggggaggttctgagagttcgattaaaagccgttttttcctatatttccaaagtcatgccgtcgtaagccgcccgaaagccgtattcccgctccgcgcgttccaaagtttcccgaaagggaaaattgttgtgagaatagtgcgtcatcacatacgcggtatgtacgtcggctatctttcgccgcagaaattcccctttcatcgccgcattgtcgggcagtcccatatgccttgcgtttgcgcccgcctcgtaaaagaggaacgtggaatcgaaagtgacgagagcggccgtctttccccgcgcccgcgcgtattcttctaaaaaatccagcgtttcctcgggcagtctgcccgtatccgtcaggtgcagatagactttccccgccttttcgaaataatatacgtaagcgcattccgttttgctgtgatttgctttgagcgcgacggcggtatattcaccgctttgaccgaagacgaacggctcgaaaggtctgaccgtcgtcatttctgtcgtcgagcgcacatcgggacgcatttcccgccgcgtgcattcgtcaaagactttttttacttcctcgttgccgaaaatttgcagtttcgaagaaatccctgccgcgtatttataaccgcgcaaaataaaatcgtgcgcgtagaaatgatccatatggctatgcgtcaccaataaatagcggacggcggcgagatccgcgccgaatctcagcgagtgataataggcgtcgggcggaaaatccacgcacacttcgccgtctatcaaaagctgcgaacgactgtgaaactcgctttctccgcggcggcgtatctcgcggcaggcgggacaatgacagaacaccgcggggacgccttccgccgcgcccgttcccaaatactgaaatttcatactatttccttttgaccgatcgaaattttctctcgggcacttcgcccgcggacaaagcgcccgtcgctcccgcgacagcgtttccatccttttcacaacgctctcttttcaggggagccgccccaaaaacgccgcgcgactcccgacgcgcaaacgcaaagaagtccctgttcccttgaaaaactctttttaaaaagcgctctgcctttccttttttccttcccgaagaaagcgaatgagctgttcctcgtcctcgaaatcgtcgtaatcgcccgtgatgccttcgcggtgatagacgacgccgtttttttcattgcgttccaaacaatccataagttccccgatgccgtatctttgcacaaaaagccgaaacgcgcgcggctttattttttgcagcagtcccttgccgcagttctcctcgcatccgtaacagccttccaggcctttttccatgctgcaacgcctgttttcgcaccatgccgcgcccgcgcagccgtccgcctgacatcccgggcactcccgcgcgcaaagacagcaggcaagaccgcacctcgctattcccttttcccgttccattccttcctcccttctctgtttttatgtttcccgacgctccgcgccctaaggcgccgagccttttaaaaaccgctttttatcaatttttccaactgccgctgattttttatcaccgccgtcttttcgggatagcgaaaaaggagatctttgaacttctttcgccgcgcccttttgcggctgtcccaaagaatccatctgacgaactcggcgtccattttttccgcgcatccgtccgtcatcgactccctcgtttttccgcgacaggcgagatatcgccttcgggcgcggagcaggcaggaaaggcggtggaaattcataaaaacgattttatccgcctcttcgaatcgccgctccccttcgagccgaaaatagttgccgtcgatgacccatccgctacgactgtccataaacgccttcgcgagtttctcttcctcgtctgcgggacgctcccgccagccgggcagccaatgaacctgatccagatacaatacttccgcgccgtacctttcccccagagccttcgccaacgtggactttcccgcgccgctgtatccgatgaccgcgatcttcatcttttttccgccctcacctgatttcgggcggaagggcggaaaggtccgtccgcatacaaaaatcgtacgcctgtgcgcattcgtcttgggagagccccgtcgccgccgccagacattccacacacgattccctgttttcgaactgagaaagtatctccttaaattctttgagccgcgccatcgccttttcaaaatcttccttcgacagtccttccataaagcacctctcttttttctttgctctttctcttccttttccccgctttttgcggacgcgggggccatctcgcccggactttactccgattccagaaggatggtgacgggaccgtcgttgagctgttctattttcatatccgcgccgaatacgcccgtcttgacgggaacgccgtattcccgtatcttttcggccgcgtattcgtaaagcggctcggcgcgctcgggacgctccgcgagcgtaaagcttggtcggttgccgtgcgaagcgtcgccgtacagcgtaaactgcgaaataagcagcacttctccgcccacgtcgcgcacggacaaattcatctttccgttttcgtcctcgaaaatgcgcagacccgccacctttttggcgatgtagtccgcgttcgcctgcgtgtcgcccgccttgacgccgaaaaacaccgccaatccgaacgggattttcgaaacgagttttccctccacgcgcagggaggcttcctttaccctctgtaccaccgctctcatcacgattctcctcgcggcgctttcctccgccgccgattttgcgatttttaaaaagtatacagcaaaacgcaggatggggaattccgaatcctgcattttgaacgattttcagtttttcgcgcagggcgcaaacaggaaatagacgcgggggctatggcttacaccctgctcatatattcgcccgttctcgtatcgatgcggatcgtttcgccttcgttgacgaacatgggcacctgaataatcgcgcccgtttcgactttggcgtttttcatgacattggtggcggtgttgcccttgacgcccggctccgcttcgatgactttgagttccacgaaattttccggctccacggagaacgcggtgccgtagaggaatttcacggtgacgacgtcgttttccttgatatatttgagcgcgtcctccacctgatcgtgagtgagcatggtctgattgtattcctcgtccataaagacgtagaattcgccgtcgaaataggaatacgtcatctttttggtttccacctgcacggtttcgagcttggcggtagggttaaaggtctggtcggaaaggacttgtcccgtcacgacgtttttaagggtcgttctgacgaacgccgcgcctttgccgggcttcacgtgctgaaaatcggtgacggtgtaaacgccgctcttgaattcaaacgtaacgccctttctgatatcgcctgctaacatctgtgccatacaatttttctccttgtttcaactgatgattttttcttgttttatctttcctcttgcgccgcaagcgtccgcggttttaggaacgcttacaaaatcacaagatttctgtccgttttgtgcataaagctctctgcttttccgtcttttaacgcgatggtatcctcgatgcgcacgccgtattcgcccgcaagatagacgcccggctcgtccgaaaacaccatgccgtccacgaggacgtccgtcccgccctttctcacggaagggaactcgtgaatgtttaagccgatgccgtgtcccagagaatgcgtgaaatactttccgtatcccttttcttcgagataatttctcgcgatcgcgtccgcttcgccgcccgtcatgcccgaaacgagcttttcctttaccaattcgtgcgcggtgagaacggccctgtaagcctttttgaattcctcgtgttctttgtcgtccccgaaaaggaaggtgcgggtgatgtcggaacagtatccgtccaccttgcagccgaagtcgacgagtatctcgtcgccgaatttaagcttcgtgcttcccgtttcgtgatggggcaccgccgcgtgcggtccgaacgccacgatcgtgtcgaaggaaacgctgtaagcgcctaacttacgcatattgtattcgagaagcgccgcgacttcggactccgtcatgccctctctgatttcgggcaggagctttaaaaagccttcttccgcaatatcgcaggccttcgcgatggcggcgagttccgattcgttcttcaccgccatgcatttccgaaaggcgggcatactgtccacgagggaaattcccaattccgaaagcttcttgtattcgggatagaaagtgagttcgaaggggattcccaccgtcttatactttttcaaaagttcggtgggagtatttgcaaacctgtccatttccgccacgcgcacttccgtgccccgcaaggccttttccgccgcctcggtataacgggcgtccgtgtacatggtggtgccgtctttgtcggtgaggacgaagccgccctccgtgaaaaaactggtgacgtatcttctcaaatagtcgcaggtggtgaatacggcgtccgcgccgaccgcttcgaagatcttttttccgtttgtctgaatcatttaaacgcctctttttctatattgtagcaaaaaaatcccgtttcgtcaactataagcaaaaaccgattgaaaattattgtaaattttttatcgtcttttttctttttccgccttgtcgaaagagatacgcgcctccctcggcgaaaaatagaacggcggcgacaaaaagaaggagggaatgaaaaacgacgaaaaaattaaccgtttcaaaacggaaaacaaatacgtatgcgtatagcgaaaaaatctcgcctatccgaagcagcgcgcccaaaacgaacagtctgacgacgggctgcccgccgctgacaggacgaacgcctttcccgcgttttttcctgttcgcaggggacaggaggcacactgcaacggcggaaatcatatccgtgacgccgtataggagcagtaagccgcataaatcctttcgccccggcagttgttcttcttcataccacatattcgcggccgaacctatgacgaagaaaagcaggaaaagcagcgctccgaacgacagcaaagacaggacggtgcgttccgccgcgcaaaaaaaacgacgggcgctcctcttttcgcttttctcttccatgttttctccttatcgacttcctgcgaaggcagccttctttcccctttggtattccgcgcccttttcgaacggataaacgccccgcccgattctctcccgcaagtccgtgaaataagggagtacttttcccggaggcgccttctcttatgcccttgcctctcccgttgaaatacaaacggtttaaaaacacctgcccgctcttttttctctcgcctgcgctgccccgcggtgtaaaaaacttaaaggctctcgtagatccgcttcatctcccccgcgtcctcgatctgcgtacccgccgattcgctgacgatatacggctgcaatttcagctgtttcagcgctatggcgagcggataaaattcggggccgtaaacggtgtcctcgaaagtgaggtgcttcacctcgccctttgcggaatacatgatcttggaaaaatgcgcgtgaaaatgtttcatgcgttcgaagccgagttcgtcgatcatgtaggaaaggcgggagagatagtcgtccgccgtttttaaagagccttgttcccgcgcgttgatatgcccgaaatcgacgcagggcgtatagacggggtcgatcttgcaaaagcgcacgatctcttcgatcgtgccgatctgcgcgagcttgcccatcgtttcgggacagaatttgagatcctgcaacccgttgagatagatataatcgcggagcactttcaatctttcctccgtctttgccaccgcttcttcgcggcaaactttcccctgcgcggcgggatggaacacgacgcgctctccccccatcagtttcaccattttgccgctgtcgagcacatagccgtaggacttagcagccatttcgtcgtcgggattggcgaaattgataaaatagggggcgtgcacggaaatctccacgccctccgccgcaaacgcctcctgtatggcgatcgcctttgtttcgctcatgcgcacgccccgcccgaaggaatactcgaaacagtcgagtccccgttccctgacgaaaggcgccgcttcctcggtatgcgagaaacccgccgcataaaagcagtccgagtttccgctcggtccgaatttaatcatgaataaaatctcctccgaaatctgccgccgcattgttcctgcggcggtttacaaaaaaatcggcagaccgaatcgcgcctttcaaaagcgcttgacgcgattcacgtgccccgccgcaccctctctatgtccgtttccagctgtcttttcagcgccgcggcgccgtcgaacttctcgatgtccctcaaaaaacggacgaagcgcacggtcagttccttgccgtagagatcgccctcgaagccgtcgagataggtttccgtcaacactctgtcgttgtcaaaggtagggcgggcgccgaaattggaaatacatttatattcctttccgtccacgcaaacgcgcgtttcgtacaccgcccgctttaaggggaattttccctcgggatagaggatattcgccgtgggaaagcccatcgtcctgcccacgtgcctgtcctcgacgacctctccgcgcaggaaaaacggctcgcccaaaaatcgcgccgcccccgccgcatctccttcttccagcaatcttttgacggcggtagcgctcaccttttccccgttcaggcgcagcagcccggacacgtccacgcggacgcccgtgcgctcctttaagaaagcgggggttcccgcggcgccttgaccgaagcgaaaatcgctgccgcagaaaaaaaactcgggggaaaattccgtcgtcaacagctccgcgaagcgcgcgggcggcatatctttgatctccgcaaagggaagctcgaacgcgaaatcgatgccgagcgaggaaaagatttcctcccgttcgggaaaggtgaacaaatcgcggctccctttgccgccgccgatcgtcatgatcccgacgggaaggagcgtgcgtttggctctttcgacgagaacgcgatggccgatatgcacgccgtcaaagccgcccagaagcaacgcgcagggcgcttttttatcaaatttccccgtcaggtccgccgttttcaacattttcgtccgtttttcctttctgtcccgcgccgaagtgtgttcgcacaaacgggaacaggcatagttaggagatgatttttcgcaagacacggcgctttcgcacagacgtacaaagacatacggtaagcggaaaccgcaaagtattacgaaaagtctgccgtaaaccgccgtttttattttgtgtgaacgcgctctgaatgaaggcgcaaaaaatttttcgtctttacttgtccgttttcttctttgggcgccttttccctttcctcgccgccgtcccaggggcgaatccgattccaaaccgttcgttttcctcgtttcccgccgcgtgcgtcagcagagcttggtcctgacccttgccaatccgtttttcacctcggcgatcccgtaaaaaacgccctcccgatatattttatactgtccttcgggatagtccgtcgcggcgggaacgccgttgaatattttttcccgtcccgccccgtgtaatacgatcttttcaaagggcagcaccctttccgtgggaatgatgaagctttccgcgttttcttccgtcaaccagtcgggcggcacggcgtcctctattttaaaatacccgctttgcgtgcgtttcaaaccgctcatgacggcagcggtgcctatcttttcagcgacgtcgcgcgcgagggaacggatatacgtgcccccgccgcagcgaattttgaagcaaaacgcgccttccctgccctccgccgcgcccaaaagcgtcacttcgtctatccgcacccgcttgggcgcaagctcgaattccacgcccgcgcgggcaagctcgtacccccggcgcccgttgacgtttttggcgctgtacttgggcggcacctgcaaaacgtccccgcagaaatcgggcagaacggcgcggatctcctccgcttcgggaacgcgcccgcactcgaaaagttcccccgtcgaatcgagcgtatccgacgtgacgccgaacgtaaattccgcgatgtattccttctcttttgcgaggaaataatcgaacagacgcgcggcgttgccgattcccacgggcagaacgccgcttgccaggggatccagcgtgcccatgtgcccgcacggcaggcccgtgagccgtttgattttgttgacgattgccgaggaggtgactcccgacggcttatcgacattgataaatcccaatgtttccacttttctttccgtcttcacgctgctcctttttcttagtcgcatccgctgcggccgcgcggcgtaagcgttgccaaaaacgcttctttttccgccactttgcaaggcgtccgaaaaggaaaggaacaaaacggactcccgctctttttcagacgctcttgcaaaaaaggcgcgcgatttttatcgaagctctatccccagtttgaatccgaggttgccgaggatctttttgacgaacccgtccaatgcctcgggcgtaaacgccttttccgcgtccgcgcccggcgtaaaagtcaaagtgaacgccatgctcttcttgccttcgggcacctgcccgcccctgtatacgtcgaaaagcctggcttccgtcacgtatttgcaggagtgcaggagcacctcctccacctccgcgcaggtcagtttttcatcggcgatgagggcgagatcgcgcttgacggcggggaatttgggaagattgacgaatgtgacgccgtcttccgcggcccctttgagggcctcccaatccagctctccgagatatacttttttatcgagtccgagggaaagggcgatcgcggggtcgagttccccgatataccccacctctttcttgccgagcaggagtttcgcggacacgccgggatgcagatagggcttttccgcgcgctcgtagccgagcttgaaatgaaacgccccggcgagggattccacggcgcctttcagatcgaagaagtcgtatttgccgccccagagccccagcgcgagggtttttctctcctcgggctgccgctcgggggggagggtttcggacaaatacacgtttgcgagttcgaattccctgccctcgtcgttgccgcggcggatattgcgcaccgcgttttgcagcatggagggcgcgaggaaagtgcgcattgccgacagctcctcgctgatgggattgagcacgcgcaccgcgtttcgctcctccgcgtcttcgggaaggcggaaaagatcgaactccttgggcgaatagaaggaataattgcacgcctccaaaaagccctgcgtgcgcaggacgtcctttacgcgcagttcctgtttctgttccgccgaaagcccgccgcccgtcacgctcgccctttcgaggaaggtgggcgtcaggtgcgcgtagccgtacatacggatgatctcttccgccaaatcggcatacccgtccacgtcgtcccgccagccggggacttccacgctcaggacgtcccccgaaatttcgggtttgaagaagagcctcgtcaaaacggaaaggatttcttgtttcggaacgtcgatgccgaggagcgcgtttattttggcgacgctcgccgtcatcttacgcggcgtcaaatcggcggcgcacacgtcttcgcaaagatcggtcacgacgccgcagcagatctcttcgatgaggtgcagcgcgcgcgccatgccccgtcccgtcgtgtaggcgtccacgcccttttcgaagcggaaggaggaatcggagctttgtcccagcgcccgcgaggtctttctcacgttgtcgcgcgcgaatttggcggcttcgaaaaagacgtttttcgttccctccttgatttcgctgttcaagccgcccatgatccccgcgagggccacgggcttctctccgtcgcagatgacgaggttttcgttcgtcagcgcaaattcctttttgtcgagggtgacgatcttctccccttcgcgggcgcggcgaacgacgatctgcccgtccttgatatcgtccgcgtcgaaggcgtgcatgggctgccccatttcgagcagcacgaaattcgtgacgtccacgacgggagaaatggaacggatgcccgaaagcgccagccgctttctcatccacgcgggggacttgccgcccctgacgtcttccacataatgcccgatatagcggggacagagatcgggcgcgtccacccgcaccttcacgggatttttcgaagtcttatgcggggtgtaggaatcgtccggctctttgaggggcttttgaagcaccgcagccacttcgcgcgcgatccctaaaatgcactgacagtcgggacggttggcggtgacggaaatatcgaaaatccaatcgtccagcccgacgacttttttaatatcctcgcccacgggcgcgtctttgccgagatccaaaagcccgtccgtttccgcgccgggatagaaatcgtcgttgatgccgagttcctcgcccgaacagagcattcccaaagactccacgccgcggagctttccttttttgatcttttttattccgtcgggatttttttcaagggcggcgggattggtttcgcagacggtggaattgtccagcgcgcagggcgtcttcataccttcgtacacattcggcgcgcccgttacgatctgaatgtccctcccgtatttttcgccgcagtccacgacgcagacgcgcatatggtcgctgtcggggtggggagcgagggatttcacctgccccaccaccacgcggtctatcttatttcccaggtagagaagttcctccacctcaaatccgcacgagaacagcttttcggcaagttcttccgcggacacgtctatctccacataatctttcagccagctcaaaggtgctttcatcgtatactcctttcttttttactcgcggaaacgcaacgccgatgcgttcccgtgtttcgtttcccttattctccgaactgcgacaaaaaccgcgtatcgttttcaaacagcgctttgatgttgttgatgccgtatttcagcatggcgatgcgctcgattcccatgccgaacgcaaaacccgtgtattcgtcgggatcgacgccgcaattttcgagtacgcgccgattgaccatgcccgcgccgagcacttctatccagcccgtgcccttgcagaggcggcagcccttgccgccgcactccgaacagctcaaatccacttcgacgctcggttcggtgaacgggaaataagagggacgaagccgcactttcgtggagcttgtaaacatcctcttcgcaaattccccgagcattccctgcaaatcgcagagggtgacgcccttatccaccaccagtccctccatttggtggaacatgggcgaatgggtggcgtcgtcgtccgaacggaagactctgcccggggaaaggattttaatcggcggcttttccgtttccatcacgcggatctgtcccgccgaggtctgcgtgcgaaggagcaggttgtccgcgagatagaaggtgtcctgcatatcccgcgcggggtgatccttgggggtgttgagggcggtgaagttatagtaatccgtttcgatttcgggcccctcgtataccttgaaccccatgcccgcgaaaatgtcgatgagctgatttttcacgagcgtgacggggtgcagggcgcccgcctcgtattttctgcccggcattgtgatgtcgacgcgctccgaggcgtacttcgcctccatttccttctgacggacgagcgccgcgtgcgcctcgaatttttcttccatgccctgtttgaactcgttgacgatttttccgaaagcggggcggtcctccttgggcaaatctttcatgccgctcatgatgcctttgagttccgcctgaaatttcattttcagttcgtacagcgccctgcccgtttccgtcctttgcatcgcgtcttcgattttcgctttcagcgactggattttttcctgcataacctcgttcctccgtgataatattttaaaacttttccgcaaaacgctgcgccccgaaggtcaatcgaaaaatttgcgtcccgaaggggcaagtcccgaccccgcgcgccgaagcgcccgtcccttcttatttttcgcttttttcgctttttccgttttcgctctccgcggcggcgttaaattttccctgccttttccaaaaagcaaatgtttgtttttacaatgccgttttaagcgatttaaaacggctcaggcgcgcgatccgccctcctcccgacaagggggcgggaaaggataaaaagacgccctgcgcgccgattaagacgcgcagggcgaaaagatttcgcggtaccacctgctttcgtattgtttcaaagctcttcgccgcggcaggctttataaaccgggcggccgattttgaaaaacaccttattttccgctgtaacgcgcggatcgcgtcgccgactacttccgctcttttccgaaacgttcgaaaaaacggtgcgcacaaaacaggtgcgcgtttgttccccggcaaagctccaaagtgaaagggcggtccgatttccgtttccccgcctttcagcctgcgaacggggtttctttgaaacgggggcttcggcgcccgctttttcatcgcttttcttttttatttgagaacattatagccgttctttctgcaaaagtcaaccgttttttcaagcctaaaagcgaaggaacaggatatttctaaaattgcgatttttccgtcgtcccgatcttgtcgaaaaggcacataaaaagtttcggactcgttcaatatgccgaaagattctttatccctccacacctttcaagacttttccgctttaactcaattcttcgacccgcgacagcaactccgcgtaacgcgcggcgaactcctccccgctgacggatcgcgcgaaaaagtttgtgtgaaagcataaattgccctcttcgtcgtaagattcaaaataacggatatagcgcagttcgagcggcgtcagaatcgtcagcgccccgaaatacttgcggcagttttccccttcggcttcccacgactgctttgaggtctgcatttgcccgtacagcaattccagacacgtttccgtctttttgagttttttaatcccttcttcccccacgatatcgtagtatccgtccccgccatagcccgcgttaaaaatagaatccagcgccgcccaaagtttctccaccgccgcttcggacaaattcagcacttttttatcggaatataattttatttcgtcgggcttcgccatatttttgtcggtcacctgtaattccccttcgggaatcggcggaagcgcgtaaacatccttggacacacagctcacaaaaaaaatactgcccgtaacgatgaaaatcaaaaagttaaaaaaacactttctcatataagctcctttaaacgcacaagttttcggaaggaatcaactcccccgtcaccaaattgagataagaaattttcaactcactcatcccattttcatcggtttgtatggtctttatgacctttgtcggaatcggctgcccatccattaccaaatagaaatcactgatttccgtatttaatgaatcattcaaaattccctctccccctttctcaaaattttggaactttgaaacactttccgatttacattatatcacttctttttatgctgtcaagagattaaaaaa

SEQ ID NO: 3418 - DNA, 2814 bp, Unknown
  16S sequences of unknown bacteria
ggaagaagcggacgcgctgagcgccaacctggatacgatgacgctattggatgtcatctttgccaaggccgcgtggtgcaatgccaatgatggatgtgtggcttcgctgaatacccaggatgcgcacctgctgttgaaggaagcgcgtcatccgctcatcccggcagcatcggtcgtcgccaatacgtatgagatgcgggagccgcgccgccggctgctcatcagcggatcgaacacgggcggaaagacgggcacgctcaagaccatcgcgctgttcgtcatattgacgcatgccggcttcccggtattgtgcgagcgcgcgatagtccccttctatcagcgcatcctgctggatgtcggcgaccagcagtccatccaggaatcgctgtcgacgttctcgagccacctttcccgcctggcgaggatctgcgagcttgcggacgcacgctccttcatcatcctcgatgagctgggcagcggaacagacccggcggaaggagaatgtctggcgatcgccattctggaggagcttggccgccggcacagcacgctcgtcgcttccacgcattttgcgcgcgtgaagacttacgcggcagcatgcgacgatatgatggtctcttgcgtcgctttcgacatggagacgatgacgccgacttatcattatctggaaggggtcagcggacagtccaacgcctttgccatcgcccgtcgctatcatctcagcgcggcgatcgtggaccgcgcgcagcagctgaagcaggaagggcagagcgaggaagcatcggtgatggagcggctggaacggcagctgcagcaggtgaacgaggagaaggaacgcctgcatgcccgtctggatgaggtgcagcagctgcgcagggatctgctccgcgagcaggaaaagcttcgccgccgcagcgaggatgccgtacagaaggcctatgagcaggcgcgcgaatcttatgaggagcgcatgcagcaggctgagcagatcattcgggagctgcgggacatgaaagcggatcataagccgcatgaggtatcccagaagctgcatcagctgcgggagatgcagccggatcagcgcgatcccgaagtcacatctcctgtggacgaggagatcaaggtcggcgattatgtgcgtctgaggcgcctaaattaccatggcgaggtcatctcgctgagcaagaacaaggcggtcgtgctggccaacggcatgaagatgaacgtcaagtgcgatgagctggaaaagatgcagccgccggaaaagaaaaaggaaggaaagggctatcgcaagccgtcgtcttcctcgttcccgctggagtgcaatgtcatcggcatgcatgtggatgaagcgctggccgtggtggacaaatatctggataacgcgctgctgaacaaggcgtccagcgtgcggatcatccacggcatggggacaggcgcgctgcgcaaggcggtgcacgcctacctgaagcggaatgtgaacgtggaaagcttccgcatgggagcgcagggcgaaggcggtctgggcgcgacggtggtcgagctgaagcagaaggggaagaagcatggctaacatggaaaagatcgccgacaagctggccatcctgccggcgctgccgggctgttatctgatgaagaatgtccgaggagacatcatctatgtcggcaaggcgaaggtgctcaagaaccgggtgagacagtattttgtcggcgcacatgatctgaagacgacccgtctggtcgccaacatcgatgatttcgaatacatcgtgaccgggagcgagaaggaagcgctgctgcttgagatcaacctgatcaagaagcatacgccgcccttcaacatcatgttcatggatgacaagacgtatccttatctgaagctgacgcgggaaaaggcgcccaggctggaggtcgtgcgcaacacgaaggataagaaagccacgtatttcggcccttatccggattcgggagcggcgtatgatacgatgaagctcgttaaccgcatgtatccgctgcgcaaatgccgccatctgccgaaaaaggaatgtctgtattatcatatcgggcagtgtctgggtccttgcatacgggaagtgagcgaggaggaatatgcgaagatgcgcagcgacatccagaaattcctgcgcggcgatgtgaaagagacgatcgaggagctgaagcgtcagatgcaggaggcgagcgaaaagctgcagtttgagcgggcgcaggagatccatgagatgatcctgtccatccagcacatcatcgaccgccagcagatcgatttcagcgatcatctggaccgcgatgtgttcggctattacgtcgacaaagggtatatctccatccagggcttcttcatgcgcggcggaaagctgctggaacgcacgctgtctgtgacgccgctgtatgaagaggagatggacgccttcatctcgttcatcgtgcagtattatgagcataacccgctgcccaatgagatcctgctgccgaagacatatgatgtcggtgcgctcgtcgagctgtatggcagcaagatcgtccagccgcagcgcggaagcaaggcgaagctggtggagatggtgctgcgcaacgcaaagaatgcccatgagcagaaatttacgctggtggagcgcaaggagcaggagcgcgaggtggccatggcgcagctttcccgcatcttcggcaaggagatccatcgcatcgagatcttcgataactcacatctggccggtacgttcaatgtcagcggcatggtcgtgttcatggacggcgagccatacaagcagggctatcgcctgtatcggctggagg

SEQ ID NO: 3419 - DNA, 3090 bp, Unknown
  16S sequences of unknown bacteria
gagcggatgcacctgaaggtcaatccgctgcgccgcgtctgcgatcgtgtggaggagatctgggcgttcatcgaagagatcacgcagcagcgtcattcgctgccctatgagatcgacggcatggtcatcaaggtcgacgatctgcaggcgcagacccgcctgggcacgacggtcaaggtgccgcgatgggcgacggcgtacaaatttccggcggaagaggtgcagacgcgcctgctcgacatcgtgctgagcgtcggacgcaccgggcgcatcacgcccaacgccgtgcttgagccggtgcgggtggccggcacgacggtaagcgcggcccagctgcacaacgaggacatgatccgcgagaaggacatccgcatccacgacatcgtggtcgtgcgcaaggccggagacatcatccctgaggtcgtccgggccgtggaagagcgaagagacggctcgcagcagccttatgtgttccctgaacactgtccggtatgcggcggcatgctggtccgcctcccgcaggaagccgcgcactattgcgtgaatcaggactgtccggcaagggtcgtcgaggcgatgatccatttcgcttctcgcgatgccatggacatcgacactctgggagacaaacgcatcgagcagttccacgcatggggcctgctcaatgagatcgaagatatataccggctgcacacgcaccgcgaggaagtgctggaaaaagagggcttcaaggataagtcctggaacaagctgatggatgccatcgaaaaaagcaagcagcagcctttggaaaacctgttgttcgggctggggatccggcaggtgggcaagaaggccgccggaatcctggccgcgcgctttctgacgatggatgcgctgatggcagcggatacagagacgctcacggcgatccgcgacatcggggagatcaccgcccagagcatcgctgcgttcttcgctgaagagaagaaccgcgagctgatcagccatctgaaggcattcgggctgcgcatgagcacggatgcggcgcaggtcaaggaaagcccgttcacgggcaagacggtcgtgctgaccggtacgctgacgcgctatacgcgcaatgaggccaaggcgctgctgcagcagctgggcgccaatgtcaccggcagcgtatccaagaagaccgatctggtcatttatggggaaaacgccggctccaagctgagcaaggctgccgagctgggcgtggagacgatggatgaagaagcctttgcacaggaggtgagcgcagttgaagaagcttaagatgatgatggcatgtgtgctggcggtgtttgcgctgggcgcatgcgacgaccaggatctgggcaaccgttcagagacccagacgatcgctacggacggcgattatgcggcagtgctgccgttccatgcctcagatgcacggcagaagcacacctcggtcatttctgaccagggggagcgcttcaacatcgtcaccgggctgatggagctgtccaaatcgcacttcaacccgaatgatgtggcatttaaggaaagtcagtttctgacttatgacatcctggatgcctcggattattcgaccggcctgctgggcagggcgagcgactccaatccagacgggctcaaccagcgccgggatgagtcgttcgacaccggaaatggcagcagcgccaacggcatcgcgccgctcatcgacatctatgagctggattggtattccggcagcgatctgtccggcatctcgctggcgatggtcgttaccgcggaaacagtggattccgacaacaacagcgtgagcatctcgcaggagcggctgaaggtgtttgcggagacccaaggcaagaagctcaacagttacatgcgggataattttccagagatctcccgcaacctgccgatcctgatcacggtctattgcctgagcgatgatgcgaccttgccgggcaatttcatccagcaggcatacttcacttctaattcggcgaatttcaccgatatcgatgaggagtggctgctgctgccgagcgatgatttcgaggagctggacgcagatgtcagctcacagttcagcacgctgaagagcgggctgagcggcgtatcgccagatgatgtgttcatcgtcggcaaaggccgcttcgtgagcggcgcgctggcagagcttgacatcacggtcaacctgcatgccaagaccggtgcggaagcgatcgcgctggcccagtatatctatgggcagacatcgctgttcacgagcacgaactatgagatctcgatcgatatctcaagcgacaatgaccatgtggcggtcatcaagaggtcagcgggatctggagatgcgcagatcacgatgctgatatgaggaggaaatgatggaacagtttgacaaggcttattttcaacgtctcgcagccggcatcatgctggacgtgaatgacgatgaggtggaagacctcaagggtgagttcgacgtgctcacgcagcagatccagctttttgacaaggtggatacagagggcgtagagccgatggtctatccctttgaagaagagacgtcctttctgcgtgaggatgaggtgacgcatgtcctgacgcaggaagaggcgctgcgcaacgcgggcagcgtacgcgcgggacacgtgcatgtgccgaaggtggtgaagtaagatgagactggatacgatgaaggaacaggagatcaagacgcgctgcgagacagcgctggaaaagctgaaggcgcttcagccgcagctgaacgcgatcgtcacgttcgtggatatcgatgagcagctggaaggactcaaggacatcagtgcggatgcgccgctgtatggcatgcctgtcgtcctgaaggacaacatcagtacctgcggcatccgcacgaccgcatcgagccgcatcctggacaactatgtccctgtttatgacgcggccatcgtggagaagctgaaggcggccggcgccgtcatcatcgccaaggcgagcatggatgagctgggcatgggcggcaccaacaagaacgcttataccggcaaggtgagcaatccttatgacctggcgcgcatttccggaggctcaagcggcggcagcgcc

SEQ ID NO: 3420 - DNA, 9020 bp, Unknown
  16S sequences of unknown bacteria
ttcatttgagcctttttctttggctctgttttttcataatttatttgacactaccatcttcgctgcacatttcgaattttctattatccgatgcagcgcctgacagacaaattatgcatttgttctccgattaatcaaacgccccactgtaaaaaacggggaatctgaccctcgcggcagtcgccaacacttgattcatgcgacgcattgctcgcgggaataaacgctaaggccgatactaagacatgaagaccacccggtaaaatggcaaaaaaagaaccttctactcatggtaaaaggatcgcgcgaaaatgaaaaatggtacaatcaattactcgtgatccggaacatgcccagtaccgacaacaggcaggtttcctggcttgcagatcaacgcatcagccgccttcccggtttcccagtgacataatggccttgctccctgcttacagtgacgagatcgcgcaggactttcacctgcttctcttttacccgtttctctgcttcggtcttttgcagagaaaacggcacctgaagtttccttattcagttttatttcggaacgcctgcattccggcgcttctggcagtataatagcacactctgacggaaagtacaagaggggagaaaaaattctcccctcttttgcatgaattacacaaatcatgatactgttttactcttcttttccctgtctgcacagcgccactccgagcagcaacaacaccggaaaaacaccccctgcaagaatgccctttttcagatcgccgccaaaaaactccgatacaaatccgaccagagtcggaccgccggaacagccaacatcaccgccaagcgccagaagcgcaaacatcgcagtaccaccctttggaagcgcagccgctgccttgctgaacgttcccggccacatgataccaacagaaagtccgcacaacgcacagcagaccaggcttaactgaggcatcccaagcagagaaatacccaggtaggaagcaatacacagcagactgctcagcaccataaaacagtccagcgagatcctgtccccgtattttccataaaatgcccgcgacgctcccatcaaaaccgcaaacgccatcgggcctgcaaggtcgcctgccgtctttgtgatgccaaggcctttttctgcaagtgtcgaagcccactggcttacgccctgctcacttgctccggcacagatcatcatgacgagcaggatccagaatgttttcattgtaagcagttcttttaagctcagccctgtttcgccctcttccattagagaccggagcggtactttcgtaaatgcagcggcattcacaagcggtacgattgcccacagcaccgcaagaatcttccagtttgtgatgccaaaggctgaaaagaaaaccgtagagatcagtacgactcctacatggccccagcagtaaaacgagtggagcatgctcatcgccttttccttattgtccgacggacacgactcaacaaccgggctgacgagcacctccagaagtccgccgccgatcgcgtaaatcatgactgcaatcaggatgcctgcaaatgcggatggcaaaatttccggcaataccgtaagaaaaatcaatccggctgcggacaggatatgtgcgagtaccatacagaaccggtatccgagccggtccacaaaactaactgacagaagatccacgagcagctgcacaccgaaattgaacgtgatcagcatcgtaatctgggaaagcgggatatcgtacgtccgctgaaaggtcagaaacagaagcggtacgaaattgttgacgatcgcctgcacaatatacgcgacaaagcaggaacgaatcgtcttattgtattcattttttgtgttcattcttccaaattttctccttcccgcgcaaaaagcgatacattttctgtcttcgcctcgctgcagcgtttttggagttctgtctttaccgccatatatttcttttccggcaccggaagctcgatcccgttctgaagccggatccgaaagcggcgaatctcacttacatactgcggatttaccagatagctggcgtggcagcgtacaaacagatccggataacggttcatcagggtctgcagactttccaccgactcataatcttcttctactgtgtgaatcacggtatggcttctggccgtctccacatacagaatctggctgctgttcagaaacaggagcgccttactgatgcttttgatctgcacccgttctgaacgctgttctcctgcaagcataaattttttataattggattcataatggatcgggtaaatggtatcccgttcatcgtatacgatcgcatttgaaatatggcacacccgaagccggattgttcctctccgctccgtgaccgtcagctggatacgctgtctgacccggttcacactgccatccggccagatcgtatccactgtaaataccagtataatttcacatacatgactgtttgtcgtggggatcggaatcactttgaggtcgtgaaccacaaacctcagatcatttttttctgctgcaaaagctgctaccaacgcctctcttgtccgtatgatctgattctctgccggtccgatccacaatacatcctcatcacatgcatccaaaaacggctgtatgtcattattatagtagcgcatcacaatatccacggtctgctttgccacttcctgaatattcatcggctctcctcctgctgttcataacctgtccgtaaggcagtagacgcaaaacagaagagaattccatgccagaagacaggctcctcctgcttcaaagaaaaaagcattgtcggactttaacaatgctcttcttcacactgtgcagctggctgccattttacaggtcctttagctttgcgtcacaacctttcggttgttttgcccttttacaaatttttgtaaaagttattataccatttccgattaaaaaaacaagccccgcaaaatgatttcgcaagctcccaccagagacaaatgtaaatatcgccggtgtaaccggcaaaaagccgtacacttacgtagacgatgacggcaactacaccggttatgattttgaggtactcaagctgatcgccgagaagcttgagcagtatgaagtgagccttagcaggattgcgcgccatgaatcgttctcactgccgcgcttcgcatccatgatacgcatcatcgtgccgcaggctgccgtttccgcggttccaaacctggcaaactcctcggtcgacatcctgaaaaacacatcacttctgtatacgatctccgtcatggatattatggcaaaggcagcggtcactgcctctatcggcttccgctatcttgaagtctacaccgatgcgctgatcatttacctcatcctgtgcatcttctatatggtcttcttctggatcattgaaaaatttgtggtgggaagaaccgcaaagctgatgccgtgaggaatgcacgtcctgtaagcgaacaatactttttctgtagtataaaacggacattcgcaatctgcttcactgcaggatcataaaaaattctcccgcaggccggctctccttgtgatctttcatgaacactaaaaaatgggaagaccactgcaccaaagcagcgtttcttcccatttctttctgtgtaaagccaagtgcagatattcactttaactcaaactcatttacaaaaactctttgcgccgtgcagcgttgacatgatatccacatggcatacatttttatcttcgaattatccacacatttcacttcgtccatccaagatacgtgatattcagcactccgttcttcttttcgatctccgtgttcacatggaataccgaccggatctgttccacagtcagcacctcttccggtgtcccgttcgcaatgatctttcccttttgcagcaaaataacgcggtcacagtagcgggcagccagattcatatcatgtacggaagtaaaaatagtcttatcctcaaactgccgcatgatttccataatatagagctgatatccgatatcgagatgattcgtcggctcatccagaataatcagggaactttcctgggcaaatgccattgcaagatagatcctctgcttttctccgccggagaggctcaaaaagctgcgctcctccgtgccctgcattccaaccatggaaagcgctttttcggtaatctccagatccctctcatcatcctgctcaaacattttctttctggaataccgtcccatcataaccatctcacggacggaaaaatcaaaatccggctgattttcctgtgccacgacagccatctgctgcgcaacctccttcgacttcatccggtaaatatcttttccgttcagataaaccgccccggaggacggggaatactgacggtaaatgtttttcagaatcgttgatttgccgctcccgttcggaccgatcagaccgacaaattcatttttggagacggaaagtgacacctgagagaggatcttcgaggtttcgattgtaaaatccaggtcttccacccggatcacttcattctctttcatacatccccctcctacttactgaatgaatatctgcttttccgcagcatccacaaaaatgccggcgttccgcaaagggaggtaatgacaccaaccggaagctcctgcggggaaaacataatacgcgcaaataaatctgcccatacgacaaaaattgctccaagcagaacagaaaaccagatcagacgcttgtgtgccgcaccgacaatactgcggctgatatgcgggatcacaaatccgacaaatccgatcgctccgctcatggaaacaaggatcgccgtcagaagcgtactcgtcaggatcagaatccatttgacacgcacggtattgactcccgtattccttgcaatatcctctccgatcaaaagtgcatcaagctcgcgcgtcagcggaagtgtcagaacaagccccaccacaagcacaccgactgcaagcggcacatcgccccagtctgttccggcaaaggatccgctcagccagaatgtcgccgtctgtacccgccttgaatccggcgtcaggaaaatgatgatattcgtcagcgcagaaaagaatgaggacagtgccattccgaccagaatcatttttgtcgtgttgatctttccgtttttcgatccgaacacaaacacaattaccgccgtcagaagcgctcccgcaaaagagctttccgcaagcggcactcttccgatcaccggcagtgtcccgatcaaaagtgatacgactgctccggctgatgctccggaagaaataccaagcacatacggatccgccagtgggttcttcgtgattgcctgcatcaaaataccagtcagcacaagacctgcacctgtgcacgccgccacgatcaccttcggcagacgcagcgcccagatgatattgatctggctgcttttatacgcgctcagatccttattaaaaatcttgccgtaaacaatctgaaagacatccttataataaatatccaccgaaccaaagtttacagcaaaaacaagtgtcagaataagaagaacgaccagcgccgcatagacgccggtcatcactcctttttttgaattccttaacatagcccgcccttagaagcaatccggatggaatgcctttgccatcgtctcgattgcatccacgctgcggtagcagcctgtcacatccgtcaggtcgatcacgatgatgttgtcatttttgatcgccggaacatcagcgagaatatcactgtttttcaggaactccagcttctgatcgattgggtcagatgcaagataatccatcacaacgatgcactccggctctgctgcgatgacatcttcccatgctgcagaagtccagttcttctcagtatctgcgaaaacattcttgccgcctgccagttcgatcatattggtcggaagaccggcacttgcagtaaacggtgcatcctcaccggagtcatatacaaatacggataccggatcctttccctcaacagccttttgtactgcctcaatccggttcttcatatctgtcacgatctcatcagccttatcttctactccaaagatcgcacccaggtttgtaaagtcttcataaacagactcaatcgttgccggtgcatactctacccgcgggatgtacggtgtgattccgttctcctcacagaagtcatacgggaaattcttctcggaaaaggtggaataccatccggtcatgaaatccggctctgttgcaagcaggtcttctttggatggattgctcgtctctgagatgcagttcagtttggaaaactcctccgcatactcctccggcacctcattgtccatgtagccatagccgacgatcttgtccgaaagaccaagctccaacagcatctcagttgtaaagttcgcaagtgtaacgacacgctccggcacctttgtatactcaatgtcatactctgttccgtttaattcagtatggatggttgtctctgcgcttgccgccatcggaagtacgcatgccattgcaaggccaagtgctgtcacttttttccactgtcttttcatgttttttctccttttcttgtgctgccagtaaaatcgtgtcaaaacccaaatgaagagaacgacacacccaccgcaaggcggacctgtcccgtacaatgcatctttctgtgaatcaaaacagatattcgcagttaaagcagcaggattgcctgattcgagtcaaagcggatattcgcaatccgcttcgctacttgtaggatcataagggatcctcccgcaagcgggtccttccttatgatatttcataaccgagtagctgcttcgcagcttatcaggagtggcttgtaccactcctgatacaagcaagtccccacccactgcttattgctccgcgcaaccacgcaggggacttgcttgactcggttaaaaagagcctgccgaaaaacagcagactccacacaattcctcgcgtcatctcttactttcatcggaagcatcagattcacagaacaagcaggtttcctgacttatggatcatcacgtctgccgccttctcatatctttgcagatacaatggcgtctgacagccactccccaaatacagtgaccggatcgctcaggactcgcacctgattcccttttcagaccatctgtgtgtgtcgtctttttggcgtcattcacaaaatcgtctgcacttacactggcatatttagttgttattgactaacatagcttactcgtttgtctgaataatgtcaagcgtttcttggggcggcgcgtggaatgaccattcccggtttgttttgtcatctaccaataacagatccgtgcgctgcccgatatgtggaatgcacgggtttgacaactcctgatacaccggttcaggcaaaacaattcttccgccataaagttcatgcaaaatattcgtatcattgatccaaaaaaatgcggacaggcaatcggtatcaaaaaacaagtcatcagtcattcagttcgaattcctccccgtcaaaatcgtacacgatatctgcccgatatgcttccatcaagagttcttccctttttccgtttgaaataaaatccctctctgtcatctgctccactttccgaatgtattcgccagtcgtaaaatattgctgattttttgcggtcggataatataattcctttccgtagcccagtctcgccgcttccatcgaaacggtaatcagccgatactcctctgcacgctccgctgcgatcagcttatcacgcaccagccgatggagcatcgcctgatgactcacctgaaaaaactgctctgcgtcaattactttttccagagtccatttcgcctggtcatattcatactccagcagagcatcatagggcatcagaagatagcttgcaaactgatctgcttcatattctgattccggtttgtcccctgtcatactcatatcacagattacacgctgcatattttcctcatacagcacatggtacagctcatgtgccagtgtaaaacgctgtcgtccataggatgtcgtcgaattaatacagataataacatcttgcttttctctggtacacatgccgctgattctcgatgacagaggataacggaccagtgtaatttttttctctttccacccgttgacgatcgcaaaaatatcaaccggagaatatccgtcttcattccacattctgcgtgttcgaagtgccagcgaattcaattcctgtgctgttttcatccccatcagtctcccatcttctcattcatatatcgaatgttcattacaattttgtttactgctgcgatgctttccagatcttctgcctgaattttatttgagcgaaacgcaaaattcagtggaagatacgcatcctccctgccaagcagataatcctccgtacacccaaataagctgcagagcttttcgatcagtgtaacattcagatttcttgttccattttccagttttgtaatcaatgtctgatccactttcaaataatttgccagctgttcctgcgtcagtttgctctctttcctgagttcttttaaacgtatcttttttccctcaatctgcatttcatctgctcctctcgatccccgttttctgtaagaacagtatagcttcttattgtcatattttcaagtaatttttattttatttttatgacaaactaaaaccagctttgaactcgaaatctcttttaactttatctcgcgtacgatctgagcaagatcattttcactccactgtataatctgaatttcatcctgaatactgtcacaccagctgaaaaacatacttaatttatccggtcttatttgttttccttttatcaaaacatattttattcggctgtgactgactcggttgtcaccgaattaaatttgacatttctgcatttcttttttatactggctatatactataatgttatgggcgatcctaatttaaccgagtcaagcaagtcccctgcttcaattgcgtgcagcaataagcagtgggtagggacttgcttgtatcaggagtggtacaagccactcc

SEQ ID NO: 3421 - DNA, 6856 bp, Unknown
  16S sequences of unknown bacteria
agccggggcaaactgctttatgttataaaattgttatattgcttgattttttggagatgattattcgttttgacccccgttttgaccccttgagtataaataatggccgatttcggattcgaggttttgcaaggccttctgctcccggtagtcagaaacgtggtcgtaaattttgcggatcatggtatcgtccttatgacccatccatttgacaaggacttccatgggaacgtctgcgtcgcgacacatggtgcagaaagaatggcggaagtcgtgggtacggatggtgacactgcgccatggaggaagcttgccttccgccagaagctgtttatgcgccttggttttgccgtaccagtgcttctgacagccgttgagcctggtttccatatcggcgagatagctgttccaggcagcttttaaggcggacagggtcgtgtggccgtttaggggctggaaggcaaggccgtgtttgccggtgaggaggacgcgcaggggcgtaaaaagcggcagtgaacgaacgccggattcggttttgggcggcttgagagagccgcgacagctttcggtgaaggtgacggcttcctggacgtagatcaggccggaatcaaaatcgacgtctcggtcgatatcaaaggccagcacttcgccgacgcgcaggcccgcgtaaagcatgagcatggcggcagtaccgaaacgatgatcgcgcagctcgtagaccagatcacgttcccactgttccagcgcccggtgggtgccggaggaaccgcggggaggctttgcctcgcgggcggggctggaacggatcaggccgtcatcaacagcatccagaaacatggagcgaagcagggtcttgatcttggtgatatgggaatggctatagtcggccaacgtattataatactccacgatattggttttggtgatctgctgaaggggcgtatcgccgccgacgaaggaacagaaggattccagcatgaaagcgtattgattgtaggacttgcggttcacgtcctttttgtaggccgggagccagcgggagacgtactgctggacggtgacgcctgcggcctcgcgacggaggccggattcctcctgccgcttgtaggcctcgcgggcggcaagggcctcggactgggtggagccgtagaactcaaggcccttgtatttgcagcggaagcgtccgtccgggcgctgcttgagggtttgacggggcacggaaaatcaccctctttggaaagcattgaccagcaggctgctatagcggatgagaccccgtccgccgttggacacatcccacaaaaaccagctgaaaaacagggtgaaaaggaaaagcgcagcaagagcgacggcccgccagacacgaagttcctgatgctgggagtgaaggtgatcttcccggacggcgttttcggatttgtgggcgtctgacatttcggcaagagtccgctggtgcagggcgtctatttcacggacgtactcggcgctgtagccagagtcgctgggagactccggggagcggagaccggccagctcgtccagcgagataccaagagcggagcagaccagaaagacccggtcgaaggaaggcgtggtcgagccggaaagaaaattgtcgagcgtaccctttgggatctgggtatgatcggcaagattctggacggtcagtccgcagaaggaaagacgggccttgatgagcgtccggagagcgtccatatcaacgggaattgcctgattcgggaacgaatgctccatatataagaatccctctttcgcataaattttgtcgaacggatgaagcgccccgaatttgccgattgaaggaacggggcgaatgtggtatgcctgtaaatgacaggtgatacgctgaaaatattgtatatcaaaaatgaaacaaatgcaaggaggaggcgggaaaaatggactggcaggaagaaactgtacagatgctgaaggccattcggagcaggaggaacctgaaaaccctgtacaagatgacgaggatgttctacaaaaaagaaacggagaagcaagatgaagtatcgaaaggccatctgcaggatgctggagaagatagagaacgaaaggctgctgaaatatgtgtacaggatcgtaaaggatatctttgaaacggggaaataaaaagaaggggccggggaaccggctccttcttaaagtctgaattttttatagattagtttaataagcggagcaaaaagcaaagcgagaggatagtaataaaatgtttctcctataggtttatacaaagcgactaatttatccggaaaagaaatatggaacagtttgaaaattagaaaaaaagcgatcaaaacaataggcaaagccatataacctatgatggaatagccaaaaatctcttcttttttggcgtatttttcaagggcttctttcatgctgccgtaatcgctttgcttttcaagtttttctctatatgaccgaacgagatcataatattcatttaatctggttttatagtattccaactcttctttgcaggactgaagctcctgtttgcattgttcaagttcagaagaagggtcgtttggggagcacatgaggaacactcctttatgatgaaagtatcagaactgacacacattgtataccgaaaaaggaaaaaaagcaagagaaaaggcgagccgtcagaggcccgcctttttgagggtgtcgaggatatcgcggagctgctgccactgctcgtcactgagggcgcagaacgcggccatggtctggcgggcgaagtcgttttcgccgcgcatgacgcgggagaccagttcatcccagccgggggcttcggggtgcatttccccggtgccgaactccaaccattcccggcagatgttgaacttggagcagatcagttcaacagtctgcccagaagggttattgatccccttctcgattttagaaacggaagcagcggcaacaccgattttttccccgaagtcagtctgattcagtccggcggataagcgaacttcttttacacgattgccgatcaagatgctcatttcctcctttcgcaaaaaaatatagcatattttttaactaaagtcaatttttctgttgacaaaattaactaagtcgattaaaatatagccgtagttaaaaacgaaacggaggtgatcgggtgaagctggaaatcgatgcgaggccgtacagagaaaaagtgctggtggacgggacggacgtgagcgaaagcctgaagggattcacggtgcgaagagacgaagacggcaggtataccttcgagccgaaatacgagatcgaggcgctgagcgggagcctggaaaaccggatcgaactgcaggaagcgtgtgaaaagtgctgggtgtacaagaacgcggatattgtgggagagattcggaagaagcgaatcacgatagcggtggtaagcctagcagcgctcgcaatggcagcacttgcgattctgctaatattgcgataacggagaggacaagggcgacgacggcaattacggtggtaagcctgtaacggatggtttcccggcggagacgcggaagctcgtcccgaaggaaaaggcggcgctgaatgccggaatccgtcaggcggcaggaaccggaggaagagacttccaggaagccgttgcgctttgcctcggtgatgagagaaatggagaaatgctgattgaggtcgataatgctggcgcgtcctgggagcaggaaagtaagaagctggaattcctcgttcatgggcgaagacccccttcgtagaaaactggtggagattgttcaggaaaacttccgggccaaggggattataacacggaaagagccggaagagacagcgggaaaggaagtgagaatatgacagccaaagagaaggaagccattctgcaggagattgcgcggctgaaggagccggagaagcagtttattctgggctggtgcgcccacgcggcggccacggcgaaggcggaggacgggaagaaggcgtgaccggctcttcggagccggatatgggacgggagttcatcagggaaagaacggcactcacatgcgcgcggctgtgctaaagagtgcaggtgcgggttcgacgcccgcccgccccaccagcggcgcgtctggtcaacgcgccggttgtcagtcccattgaattgggaacctccaatgtgtgtggcaaagcggaaagacgcttggcggcccggacagacgggcattttatggggctgatccagcggccatggcgctggatgattgctggctcgtacccagccagccccaccaaccccgggctggacacacccgggtaacgtctcaggcatgggacgtgtcattacctcctaggggcatgaccccgaccctaccccttcaccatctttcggggagggcggccctctggcgcacggagatctggtacgtcaccggcgctttaagagggcctacaccagagaaaaagcccaaagcgggccaaaaatagaagcgaggcggacggaatgttcaacaaagagcggttcaaggcggcggtatttctgaagggcgagaccatggaggacgcggcggaggtgctgggaatggcgtattcgacgctctaccgccggatcaggctgaacgactttaagtcaagagagatcgaaaccttttgcgagcactacggcgtgacgcgggatgagatcttttttgatgggaaggagctgccaaaatggagcggctgctgacggcggcggaggctgcggagctgctgggcctgacggaacgggccgtgcaggacctgatgaagagcggagagatcgaatgcctgagcgtgagcaagcgcccgggcggcccccggcctaagctgcgcaccacggagagccggttggagcgctgggtgcagcggcgggcggaggaacagaagctgcggaaattcccccaggacaagcccgtgcggaggaagcgccgggcggacgaggtgccgccgggcatggaacggacggcggacgggcagctgcgaattgcgaggaggcactgacatggtagggaccaaagcggcgtaccgccgtcaggcggcgctgaaactatggacggggacggccatttatcacgggatcgaaattgtgcccaggacggggctcaacctgcgcagatacaagcggaagctgatgaagatggcggagccggtgtgcccgccggataagacgtggcaggtggcgatcttgtacgtggcggtatttgccatgtgcatctatgcctttgcaaagtggtggtttctgtggtgatgggaaaggattttctgcacgcggtgccgggccagatatccaagcagatcacgctggggactaaagtctttgcctcggacacggtcaccgcgcccaaccgcagcactaccgacccgcgaaaaatcagaagcacaaagacgctggaaagagcgctgtgctacaacgcccgctacgcggtggattacaaggggcgaagggtgccggaacgcaaaatggaagggcacagatggctgctgaacctgggcgcgtgcgtggagtgcgaaagcccctgcgagtacggcatggagcggctgcgcaggatgcagatccacgaacttttggaactgggctgcggcggagactgtatgaagtgcccggagccctgccgggtgtacaagctggcgctgacgaagatctgcgacgaagagtgcaaaaagcaggtgaaaaagaaacaggcgcaggcctttgcgcgggaagcgctggccatgtacctgccgaaggaggcggaaggatgagcatgaacaaagggatgtacacaagcaacagctgtgaatgggaaacacctgttgatttttttggaaagctggattcggagtttggtttcgacctggatgtatgtgctacgccagaaaacgcgaaatgcgccagatattacaccaaagaggatgacgggctggaaaaagaatggaccggcgtctgctggatgaatccaccatatgggcgtgaaatcggggaatggatgaaaaaagcttatgcatccgcccaaagcggagcgacggtggtctgcctcgtacctgcgcggacggataccggctggtggcatgactacgctatgcgcggggaggtgcgctttgtgcgggggcgattgaaatttaacgggcttaattgcaatgcgccatttccatcggcggtggtgatttttagaggcaaatgaaaagggggtaaagggacatgaacgaccagaaaaggctgacctgcccgaagtgcggacagcccatgacccggatggtggtgaacaaccccatggaggaaggctggcgggtatcgtaccggtgcctgaagtgcgggaagatggggccgctggtacggggcggacggcaggaagaaacggagaagatggcggagctcctgacggagagctggatccggcggctgaagggagaaaaggaagaacagccggagcggctgcgggcgtgggctgaagcactggaagcctacaaaggcgcgggcctgcggtacgaggaagagatcgcccggctgaaacgtatggcggcggaggatatcctgcgggcggcgcagagcggctacccctgcgacagctgcatcaacaacacgctggatgagcggtgcggctgcgactgcgcggactgcgagcaccattgcacgtgctatgagtgccacgacgatgaaagctttgtatggaggggtgggaaatgatctgcaaaccgattctgttcaacaccgatatggtacgggctattctgatgggccagaaaacgcagacacggcgggtgatcaagccgcagcccacaagaccaagatggaacaatatcggttggctcggttggaatgacggacatggttacagaatgaagcctccttgcgaagatggcgatgttctctgggttcgggagactt

SEQ ID NO: 3422 - DNA, 24348 bp, Unknown
  16S sequences of unknown bacteria
gagactaaatgcaatttcggctcacttagagttgcgtttactttttcacttcagtgacggtaattttcagattcctcatattgagatgacaaagggttagtggtatgatagattcgatttttcagggatcgcaagacaggggagcatgatatgaatattgtagagaaatatggcggaacgagcgtcggaacgatcgaacagatcaccgcgatcgcgcagcatgtcaaggaaatgaaggaagaggggcatcagctggtcgtcgtggccagcgcgatgggcaagacgaccaatcagttgatcgccatggccaatcagatctcggaccgggtcaacaaacgagagctggactcgctgctttccaccggggaacagcgcacggtcacgctgctggcgatggccatcgatgcgctgggcatcccggccatatccttgaccggctatcagtgcggcttcatcacgagccatcaccatgcgcatgcgcggatcaaggacatcaacatcgataacctcaaacgccatctcgatgaggggaaggtcgtcgtcgtggcaggattccagggcgcgacggaaaatggagagatcacgacgctgggccgcggcggcagcgatacgaccgcagtggcgcttgcggcgaagctgggctggggatgtcacatctacaccgatgtcaacggcgtgtatacgatcgatcccaggctgtatcgtcatgcgcggctgcttaaggagatcacctacaatgagatgatgcagatggcatgcctgggggcgggcgtgctggagacacgcagcgtagagctggccagcaaatacaatgtcccgctgtttctgggacgcgcgctggaaaaagacaagagcagggggacatggattatggaacagacgagacatcttgaggatatgccgatcaccggcatcagcatcaaggaagactatgcgatcatgcgggtcaatgatctgccgaccgacggcgtgttcatcggaaagctgtttcagctgatcgcggagatgaacatcaacctggatacgatctctcagcagctcagcgaggaaggaagggtgaacttttccttttactgcagcgaagagcagagcgatcagatcttagagaatacggaccgcttgggcagcgagtatccgatccaccgcatgctgggcttcatcaagctctcggtcatcggcgtgggcatctccacacacagcggcatcgcgtccaaggtgctcaatacgctgaatgccaacgggatccgttattatatgatcacatccagcgagatctccatctcgctgacgatcgagaaaaaagataaggaaaaggcggtcgaggtgctcggcaaggcattcgacctgtaagcgcgggcaaacgctggccatgcaggccgcggcatgcgcttgatccggaatcagacagaacgcacaggcacagacgaaggtcaagggatcgctgtgcgtttttttcggatacaggataaaggaaaggcgggagatgatgcgctcactgtctcaggcagagccgggaagaagctataccatcaaatggatatttgcctcagatgaggccatgacgttcatgcaggagcatcatatcgaggaaggcagcagcgtacagctgatccagcgctgcatgcacggcgtcatcatcaaggtgcaggggcactgtttcgccatcggggatgagatcgcggatcagatcaaggtatgatgatcagacgctgtgcgcagggatgatcggatgaggaggacaagatgaaagaaaatcgttatgacgaccaggaatttttcgaccgatatgcagagatggcgcgttctcgcaaaggcctgagcggcgctggggaatggcctgtgctcaaggagatgctgccggatctgcaaggctgccgcatgctcgatctgggctgcggttatggctggcactgccgttatgctgtcgatcagggcgcctctgccgtggtcggcatcgacatctccgaacggatgctgcagaaggcgaaacagctgggcgatgatccgcgcatcacctatgtgcggacagccatggaggatgtatgctttccgcctgaaagcttcgatgtggtgatcagctccctggcatttcattatgtggagggtctgcagccgctgtttcgcgccgttttccgcatgctcgctcctggtgggaagtttgtcttcagctgtgagcatcccctgttcaccgcatacggttctcaggactggtatcatgatgagcaaggaaacatcctgcattttcctgtcgatcactattttatggaagggaagagagatgcgctgttcctgggagaacaggtgatcaaataccatcatacgctgagtgcttatctgcatgggcttcgtcaggccggcttcaacctgaatgatgtgcaggagccgatgcccacgccgcagatgatcgcggaagacgaagagatgcgcaatgagcttcgccgcccgatgatgctgatcgtctctgcggaaaagccgcgataaaaaaactgccctggaccatgggcggtctgatgggcagatcccggtatccaaggcagtagttcagcaggcgggccgtacgctttcgtccagcacatcgagcagccgctgggtgctgtctgcggttgactgatgcatccctgcagcgaggatgatgctgatgcgctgcagggtcaggtcatagaaatgcttttcgctttctggaagctttcggccggaggcttcggcgctcatcttgtccgcatgcatcgtcttcagcaaggacagccatgcgacgatatcgttctgctccaggacgctcttgcagctgcgggcgatggcgttgcgcgtgatcttctgcatcggcagatcctggacgcggtggagcagggcctggcaggatgcgctgtccggcagcttctgcagatggtccatccggttttcgacagggacctggtactgacagtgatccgattccagagagtccagcaagtagcaggaccgcccgtccacgttgatgatgctgcgtatcttggccagcatcagacggtacaatacagtttcgtcttgttcaaatttcatgggaaccttctgaaagaaaagaggtgtttcacggcgtgcggcacacgggtgaaacacttgctgtacttatattttatcatgttcaaaaaaagcgtgtaagcattttttttgcgtcgtcttgcatgatctgcacgctgcacaggatcatatcgaaggaaaaagcagctgagcttgatcgcagagatgatggctttccgatctgaaaaaaaggccagagaccgtgctgaccgctcttgtgaagcgggcagacaaatgatctctggtctttcatcggaaatgagtctgatctgggaaaatcaaatcagctgctcgatgcattggccgcagcgaaggccgttgagcagttctcggatacaggcgtcatacagcgcaaacaggcggcgggccgcggaaggatagcgatagactttccagtatcccatcatcacgcattcgcgctgttcgatgaatccttccacatcatacagcggatagcccaggaagacgccgatctcgtgaggatagccttctgcttcatccagccggcggtccagatgatccaggatctcgctcaggccaagcgaaggatagccgtagcgctgaaggaagacacggacatcttcgcgctgaagcagcaaagacagccggcgccggcgatagacaaatacggtcactcgctctttgttctgctgaaacagccgcagacagatccctttcttctctaacttttcatgatagagagcaagcgtcgcatgaagatcttcaaaagcgtctttttccacatggaacatgttggatgccttgcggttcttcaataccggcgcgcagtgaagggcgagcagccgctcaaactggcgttcgtctgcacacatgacttacagagaagcgagcttttccttgatggccgcaatgtcttccggtgtgccggcgttctccaccttatacagacattcgacatcatgctcttccgcgatcttgtcaccggccagacagtaggcttctccatagccggtatctccagagacgacgactcctttcaggaacatggcgtttccagctaagaacgcctctacctctgcgggcacatcaccatatccgtccgtataagtgaacagcacatagtcttccgcaagcgtctcgtttccgctgtcgatgcgcacggattccatgtccagctgtgcaacgatagattcgacatttcccgttcttgatgcgtatgcgatcttcattcgattacctccttggttagctataactaacttatgcatctaacttaccatcgattgcttgatccgtcaagacgcagacgcccaaaaagttaacataagctaaccaaaaaaagcaggatgccggagattcacttcagcggcacactggcatgaatcatggtataatatctgcctgtgaagggggtagacatatgaagatcatgagaaaatttatccggtattatcgtccatactggaaagtatttctgttcgatatgatctgcgcgatgggcatcagcgtcatcgacctggcttttccgcagatcctgaattatctgaatgccacgctgtatctggaaagtgcagagcagatcaaagatgccatcgtggtattgctggtgatcctgctggtgatgtatacggtacgggcgctgtgcaaatattatgtgtccgcgcagggacatatcatgggtgccatgatggagagggacatgcgcaaggaactgttcgatcagtatgaacgcctgtccttttcctattatgatcgaaacaataccggcgagatgatgagcaggctggtcagcgatctgtttgatatctgtgaatttgcgcaccatgggccggagaatgtgttcatctcattattgaagatcatcggttcttttatcctgctcatgtatatccatgtgccgctgacgatcctgttgatgatcgtgacgataggcatgctgctgttttctctgcggcagaatcgccggatgcaggagacgttcatggaaaaccgccgcaagatcgccggtgtcaacgcttcgctgcaggatacgcttgccggcatccgggtcgtgaagtcgtttgcgaatgaacagatcgagcagcagaaattcgcccgcagcaatgagcattatctgaccagcaagatcaataactatcattgcatgggccgcttccagggcggaaacaacttctttcagggactgctttatgtcacgatcctagtcggcggcgcctggttcatcgcccaaggcacactggagccggtggcgttggcgacctatgcgctgtatatcaatatcttcgtatcgccgatcgaagtgctcgtcgaatttacggagatgctgcagaaaggatattccggcttcaagcggttcaatgaagtcatggagacacagccggatatcgtggatgcgccagacagcgaagagctgcgtgaagtgaacggcgtgatcgactatcaggatgtctgcttcagctatacggaaaatgagacggtcctggatcatatcaacatccatatcgatgccggccgttccatcgccctggtcggccccagcggcggtggaaagacgacgatctgctcgcttctgccgcggttttatgatgtgaacagcggaagcatcaagatcgacggaaaagatatccgcggactgacgctggaatcgctgcggcgtgccatcggcatcgttcagcaggatgtctatctgttcgccggcacgatccgggaaaatatcgcctatggccggccaggtgcaagcgatgaggagatcatcgacgcggcgaagaaagccaacatccatgaattcatcatgtcgcttccggatgggtacgacacctatgctggagagcgcggcgcacggctcagtggcggccagaagcagcggatctccattgcccgcgtcttcttgaaggatcctaagatcctgatcctggacgaagccaccagcgcattggacaacgagagcgaacggcatatccagaaaagcctggaagagctggccaagaaccggacatgcatcaccatcgcacaccgtctgtccaccatccgcaatgccgatgagatcatcgtgatcggagaaaacggcatcgaagaacgcggcacacatcaggaactgatcgacaaaaacaacatctacgcccgatattaccggctccagttcgaggggctggaagagtaaacggacaggcacggcctcatcaggctgtgcctgtcttttactgaagcatagacaatgtatattttcatcaagtatgatttgttctataatgattttagatattgtttacttggaggatcatatgaataaattagtattgggattagatatcggtatcacatcagtcggatatggtgtgatagacatggaaagcaatgattttgtcgattatggagtaaggctgtttaaagaaggaacggcagaagataatgagaaaaggcgaacagccagaagcaggagaaggctattgtcgagacgccatacgagaatagaagacatgaagaaactgctgaaacagtatggcatcatcgatgaagattatcgccctattcctcatgtctatgaattgaggatgaaagggctgacacagaagctgagcaatgatgagcttgcttcggctatcctgcatttggtcaaacatagaggcagcagtatcgaaacagtggatgacaatgaagaaggcgcaaaggaaacagagaaagcgaaagaagtgctggggaaaaatgcgaagctgctggcagaaggaaagtttgtctgcgaagtgcaatacgcccgtctgcaggaagggggaagcgtccgcggacatgacaataatttcaagacgaaggattatgtcgcagaagcggaagaaatactgcggcatcaggatatcgatgaaacgctgaagaaaaagatcatcctgatgatccagcgaaaaagagcgtattatgaaggaccgggaagcgaaaaatctccgaccccgtatgggcgctttatcttggaggatggcaagatcaagcagatcgacctgatcgaaaagatgatcggacgctgctctgtctttcctgatgagctgcgtgctccgaaattatcgatcagcgcggaattgttcaattttctcaatgatttgaacaatctgacgataaaagaagaaaagatcacaccggaacaaaaagcagaagtgctccagcatatcagcaaaaagggaaacatcacctttaagcagttgttgaaaaaattgaatgtcgatcaggaagatgtgcatggatatcggatcgataaaaacgggaagccgcttctgactgaatttaaaggatataagaaactgagatcgatatttgaaggagcaggggagagcgtatcactggaagacgttgaattgcttgacaaggtgatggagatcgtcacgaagtgcaaggggatcgaagagcggaaacaggccttgcaaaagcttggtttgacgtcatcggtgatcgaactgctttctgaactgacggggatcacagggtatcatgccctttcgttcaaggcgctgcggatgttgaatcaggagatgtaccagtccgatcggaatcagatgcagcttttgcacgagatgaagctgtttgatcagcagcgcaaatctcacaaaggggaaaagaacatcacggctgatgatgaggccattctttctcctgtagccagaagagctcagcatgaagcgtttaaagtggtcaatcagctccgccggatctatggtgaattcgattctatcgtggtggagatgacgcgcgaaaagaattccagcgaacatcggaaaaatatccaggagaggcagaaatatttcgaaagcagaaataaaaaggtcgatgagttgctgagcgatcgaggtctggatcctgaaaaagtcaatgggaagacaaagctgaagatccgtttgtatcaggagcaggatggcaagagcgcttatactttgcagccgcttgatcttgaccggatcatcaaagatcagacatatacagaaatcgatcatatcatccctgtctcgatctcgctggatgattctcagaacaataatgtgctgatcacacggaccgaaaaccaattgaaaggcaacctcacgccgctgggcgcttatcagaaaggaagatttgctggcttgaactgtacgatgtcgcattacatcgaaaccgtaaaagggatgaagaacatcagcagcaaaaagcgcagaaaccttttgttcagtgaggacatcacaaaatacagcgtcattcagcagttcatcaacagaaatctggtggataccagctatgcttgtcgtgtcgtattgaatacgttgagcgattatttcaaagataatggaatagatacgaaggtacatacgataaatggccgcttgacagataaattccgccaacagatcaatctgcccaaagaccgtgatgaagattatctgcatcatgcgatcgatgcgctgatcgtagcctccatcaaaaaactcaacctgttgaaagggtatctttctcagttcaccttggatgagatgtatgatgagaagaccggggagataaaagaaataccgggagaagaatcattctttgaccctgcgtatatcagatacatcagtgatctgaagacgatataccagcaaagcagccagtattatcgcggaatcattgatagatcgatcatggcctatccgccgatcaagatttcccataagatcaatacgaaaccaaatcgccaagtgtccgatgaaacgatctacagtacccgagaactggatggcaaggagatgatcattcagaaatacaaagatatttatgatcctaaatttaaagcgctgacgcaagatatcttgaatggaaaagctgagaagtatctgatggccagaaacgacccgcaaacttttgaatcgatcgctgagatcatcaggcatcattatgaacagtttaaagattcgaaagatcattacaaaatgaaaagcggaaaaatagagttagttggtgaaaatccgctgactgcatataaggaagaatttggaccggttaaaaagtattcgaaaaaaggaaacggaccggtgatcacttcgatgaaatatgcagatggaaagctgggcagtcatatcgacattagtcagaattaccgatctgatcataaacgggtgatcttgaaacaagtcagtccgtaccgtactgatttttatctgtgcagcgatggaaaataccgctttgtgaccatacggtacaaagatattttttacaaagcagaaaagcagaaatatgtcattgacagagagtggtatctgcaggaaaaagcccgtaagaaaattgacgataaagcaaagtttgtctgctcgctgcatagggatgaactgatcggcatcacgaaaaaatacggagataagttcatttatgatgaatcgacagaaaatggcggagatacgctttatcatgatggggttcatccggagatcttgaagtttactgcgacgaatgatgatgaaacaaataagattgaagtaaagccaatacatacatattgtaaagatcggttaaaggtcactgtaaataccattgccaatctaagaaaatttgcaactgatgtattgggtaatctgtatgaagtcaaacaaaatgtcttgaaaatggagtttgaataaggtaagataatagtggtcatattctagcaaaaaaccacatgacctaacaaaacaagggtttatcccggattcggctcttcggagccttttctttttatatttacatgggacatcgggtcatttatgtggaaaagtgtgagtatcttcatctgtatcttgataatctgaaagtggagatcaagggaaatgatatcttgtttcctattgcagatattcagatactggttatcgataattataaatcaaatatgagcgtacctttgatcaacaaactgacagaacacaacgtctgtacgattttatgcggagtggatcatttgcctaagagctatattttgcccatgaacggacatttttcggccagtggcaatattgaaaagcagatagcgtggaagcccgaacgtaaaggggagcttcatgcacaaatcgtcaagcataagatcctaaatcaaatagagattttaaagcaaaatgccaaaagcagtgatgtgacgaaaaaactatatgaattttcagactcagtttcttttgatgataaaacaaatcgtgaaggccttgccgcaaagatgtattttcgtgaattatttggcgatgattttattcgttttgatgaagatgtcatcaatgcgggtttaaattatggttacagcatattccgatcattgattacttcgatcatcgttgctaaaggatatcttcccaatcttggcatattccacaagggaaaacagaatatgtttaatctgagcgatgatgtcatcgaggttttccgtccaatagtggatcactatgtatacaccaacatgcgggaagatctgttttttaagcagcagcataaagaaaacttgatccaattgaccaacaaaagagtaatgatcgatgagcgaaaacagacaatcagcaatgcgatcaatgtgtatttggattcgatcttccattttcttgaccataccgaagagaaattgctgtttccacagcctgtgatttatgatctatgactttatgaggttaatactattttttgatctcccagtaatgacgaagaccgacagaagaaattatgcattatttcgcaagtatttgattcaaaacggatatatgatgatgcagttttctgtatattgcaagatttttgcgaatcgtgatgctgcagtaaaacatgcggccatgttgtatcagaatattccgccaaaaggacaaatacgtcttttgttggtaacggaaaagcagtacgctaaaatagagattatttccggagggaagtcattgcaggaggaaatcgtaaatagcgaatctttcattaagatatgaataagatgacagtttcggacggaatgagaaaatgggagtttttgattgatcgggtcaagtttatcgtaggaagcaatcagaaagaacgtcatcagattcatcaagcgcttcgtcttctgcaaagcaaaagtgaaagtgaatggcgaaaggaaacgcatagcgaagcctctcttttgatcgatgatgaacagcttgcgttaaaaaaagtgaaattttttgaagtgaacttgaacttttctattgttgaagattgtaagatgactgctaagtcactgatacaaagatatttggaaattaaactaggcaattcagagattcaagagaccgtaaatacattggaaatcctttttcaagcactggctgaagaagtcagtgatgaagatgtgatcaaattgatatttgatggcataaatggaagatcattgcttaaattaatgaaaccatattatattgaggagtatcagaaagatgaattcgatcttacctacgatgaactgattttattacaattgaaattgatgcagtatataatagacgctgaagtttcaaaagaaaagaatttagtgatcatgcagattccaatgctcaccgagtctttggtaaagcagatttataagatgagtcattgtctggttgttgcttttgcggacgaaattactgagaatatgcatatggatgatttatatattgtggagcaggataaagtagatgctgcagatatagaatcattgttttatgagattgagaataaaacaggaaagctgtatccgcttgaggagttaaagactataatggaaaaatgtattcgtgaacagtacgctcaacgcacatttgatttaattcatacgattactcacacttcatcagaataattttctatctaaagttgcaggactagtcaaatatcagtaaaagtgctatgatatttgaggttttgttaccatatggttttttgctagaatataactgtaggtgaatgcgttcgttgtcacgtcttgttttgttaccatatggttttttgctagaatataacgacaagatcagacagcagtatgcggaagaagttttgttaccatatggttttttgctagaatataacacactggactgggctgagcgcatgtgctcagttttgttaccatatggttttttgctagaatataacggtacgtgacatactgcaccactgccggccgttttgttaccatatggttttttgctagaatataactgaattgatcatctgcagccggcgttattagttttgttaccatatggttttttgctagaatataactcatggctggcgcaagaagcttccgttacagttttgttaccatatggttttttgctagaatataactatcctgtccgttctcttttttaactctttgttttgttaccatatggttttttgctagaatataactccgcgtaggtgaagctattgaccagcggcgttttgttaccatatggttttttgctagaatataacgcgtcgtgcctaactctatccttgcagacagttttgttaccatatggttttttgctagaatataactgagcgtgagggggcaaccaccgtttagccgttttgttaccatatggttttttgctagaatataacaaaagattgtgcctatgttcaaggatatttgttttgttaccatatggtttttgctagaatataactgagcgtgaggggatgaccaccgtttagccgttttgttaccatatggttttttgctagaatataacggacaaaccaagtattcacgtacgagttgggttttgttaccatatggttttttgctagaatataacatgaatggaacacgaccatcccagagcatggttttgttaccatatggttttttgctagaatataacttatttctaggcttgaccctgtggaagttagttttgttaccatatggttttttgctagaatataacccgcgccgtatgctgtatcacgcattccagagttttgttaccatatggttttttgctagaatataactgatgtctacttctgattttcccgtctatagttttgttatcatatggtttttttgctggaattagtcattttaaatcgttaaatacgttgtaaatcgaagcatcttaattatcatgtgatgatggttaacgctcaatgcagatagctcgtatcacattatgctgcttcccaatatgacggctttttgatggccatatgacgaaaatgtttatttttacatatgttttgtgttttttattattgaaattgcgctttgaaaatgatatcctgtagctagaaagggctttcatttcgaaagtgaaggatgagaacatgaaaaagagaatgaagagtgtgctctgtggcgcgctggcattgtcaatgtgcattccgatgtccatgactgccatgcatgcagaggcgacatcccgcgtggatgagatcttggccggcatgacgatcgaccagaagatcggtcagatgatcatgcctgatttccgtaagtggcaggctgagggcgaagacgcgcagtctgacatgaccgtgctcaacgacgaagtggcagagatcatcgatcagtatgatttcggcggtgtcatcctgtttgcggaaaacgttaaagaaacagaacagacgctgaagctgacgacggatatgcagaatgcggcgatcaccaatgaagctggcaacggcgacattccgttgctgatcacgatcgatcaggaaggcggcatcgtctatcgtctgggaagcggaacagcgttgccgggcaatatggcgatcggtgccaccaacagtgaggaggatgcgcgtctcgccggtgagatcatcggccgtgagctgagcgcactgggcatcaatgtcaactttgcgccggtatttgatacgaacaataacccgaacaatccggtcatcggccttcgttccatttccagtgacccgcagcgggtagcgcgtctgggcgtaccgatgatgcagggcatgcaggagtataatatcgctactgcagcgaaacacttcccgggacatggtgatacggctaccgattcccataccggacttccgctggtagacaagtcttatgaagaactgaagaacctggaactgattcctttccaggctgcagtggataatggagtggatatgctgatgacggcacacatccagtacccgcagatcgaaaaggatacagtgatctccaaggcagacggaagcgaagtatatgttcctgctacgctttcagacgatatcattacgggcgtcgtccgtgaggatatgggctttgacggtgtcgtggtgaccgatgccttgaacatggatgcgatttctactaattttggcgaatctgaagcagtcatcatggcgatccaggcggatgtggatatctgcctgatgccgaccatcctcagaagcaaggcagatatggcgaagatggatcagatcatcgctgatgtcaaggctgcgctggaagatggcacgatcactgaagatatgctcaacgattcagtcaagcgtatcctgacgctgaaagaaaagcgcggcatcctcgattacgcatctgatacgagaacatgggaagaaaaactggccaacgccaacgagcaggtcggttctgactacaaccgcgatctggaacgcgagatctctgcagacgcagtgaccgtggtcaagaatgacgacatggtcctgccgctgaatccgaaagcagatgaaaaggtactgctgctgggcgcttataacaatgagcttccaggcatggagatcggcatgcgccgcttgatctcagaaggcgtcctgccggagaatgtgcagtatgagagcatccgttataacagctcgacgacgatcgacgatctgaagagcgccattgattcttcagactatgtcatcgttatctcagaagtcggcagcgcttctcagctgctgatgagcagctggctgacccgcgtaccgacagaggtcgtgaactatgcgaatgaaacaggcaaagactctgtcgtcatgagcatttccaagccatatgatgtcgcaaactatccggatgccaaggccgttatcgccgtatatggcaataagggcatggatccgaccgaatccctgcgcccagatgctgcgtatggaccgaatatcccggcaggcatcgatgtcatcttccgcggacatgaagcagaaggcgaattgccagtcgatgttccggtcatcgtcgatcatgtgatggatacgacgcagacggcttatccggtcgggtatggactggattacaatgcgccggtatctggcatcgaagtcgttcttccggaatctgcgaaagcaggagagacctttgaggcagtcgttgaactgaagaacctcgctggtgtggaaaacgaagcatatgatgtgcagatcacttacgacagcgaaaagatgagcgtcgttgccagcgatgcctacacggtagatggcaatgtgatcacagtacataaggatgccgatgatgtcgatccgatcacgatctccttcaaggcagatcaggctgcagaggatgttgcgccgatcacttcgatcagcgtgctcgacagcaaggatcgtaccttcaccctgggagaaggcgcctatgcggatcaggtaatggatattaccgctgcacagaccgaaacgccggatcagccggatgaaccggaaaaggaaccaggacagagcgatgatgcggacacaggtctgaacaaggattacacggcgatgctgtcgctgatgggggcttccctgacagccggcgctgtactgctggtgatccgcagacgcagaagagcataaaggatcgtacggtcaggacgatattcctgccattagatgaaacaaaacacacgctgcagctgatgcggcgtgtgtttgctgtttagagatgagatgatggtgtgggtcatttttgcccgtgcaaattacgcgttttttcagttgttaagcgcatacgcttttggtatgcttgaattgatgaggagccgcacagctgtgcattgaccggctgatcctgagtggcaaagcgatgggagcggatctgaacgcactcaccatgaagatggcagatccagctgcatcgcgcatgccgaaagaaggacagcgtctttttgcgtgacctgtgcggaacgcgtgttgcgtctgcccggtagcggcgatgggctcatcgagcgaaaagagatatagacatgccgtatgcaggcaaagcgatcttcgggcagggatgtgatggccgaggtgagggagcgctgatcagacagcagcgcgcttccatgtgcctgacatcatgtctgatgatcagatgagatatcatgaagctgaaaagaggatacagagaggatgtgttgatcatgaacagcagctggaagggctggtttccgcccgggacattggaaaaaggactggatcattatgagtccggagccgtgagcgatctgaagacgacagaatgcggctatgaagcagtcgttctcggttcaagggaatatcatgtggaaatcgagctgaacgatggggagatcagcgggatgtattgcgattgtccttatgcggatgacggcagcttctgcaaacatatggcagctgtcctttttgagatagaggatcaggaagaagacgagacagaggatgagcgtgagccatctggaacatacagcatttcccaggcggtcggtgcgctgcctgaggcatatctgcgcaaattggtgatcgagctggctcagcatgatgaagcgctcaaggatcagctgctcagcgaatatgaggaacggtggcagcatcgcaggaaggaaggcatacgcagagagatccgccgcatcatgatgcgttatgtcgacccgcaagagggcgtcgcacatgagagctatgtggaggcgatgaagcggatcttacgcatacatatggaagtgttgatggaacgcggagattttttgagcgcgttcgaactggtctgcgcggtattcgtgcagagcggcaatcaggagctctctgagacagacggcgtggagcttgcccgtgtctgctgcgcgtgctgggagaagatcgtgttccgcggcggcagcggggtcaggctggtgatgagagaatggctgagcttgcatggaacggacggaacggtcaatgcgctgtttgaggaccatgctaggacattttatcgccagctgcttgagatcgaggaagctcaggcagggtcagccgcatgatctatacggtgaccgtcgatccatcgctggatcatcatccgggtcgatgacttcgctgaagggaccatcgatcatgcggtgtctgaacaaaggcttccgggcgtaaaggcatcaatgtatcgatcgtgcttgcctatcttgaccatgagaatgccgcgcttggctttgtgggcggatttaccggacgaaagatcgaagcgtgtctgaagccgatcggctgcgcgtggagcttattcatgtcaggggcggggattccaggatcgatatcaagatgaagtcagcgaaagagacacagatcaagcatatccgcgatagtgagccggatcggctgttcatgtgcctggatcatctgcaggatggtgatatgctggtgatctctggctgtgtccctgcttcgctttccgccgatctgcatgagcggatcatgaagcgggtgcagggaaaagcgatccggatcatcgtgaatgccgccggagagctgctgaacagggggctgaagcaccgtccgttcctgatcaaaccgaatcatcacgagctggacgatctgttcggcgtacggatcgatgcgctccaggatgctttcccttatgcccgtcagctgcaggcgatgggcgcgcagaatgtcctggtttccatgggcgcatccggcgctttgctgatcggggaagacggccgtgaatacgtctgtgccgctgcgcagggcgaaccggtcaatacgctcggggcaggcgattccagggcggtcggcagtgccggcgcgttttcagaaacgctggcagaagctgccggagtgtctgccctgctcgctgaactgaatgaagagaaaagagatccgtggggctcacctgcagatctctttgtgtctatttgcgctgcgccagcgtgtcttgcaatgagcggcggatatgcccttgtctgccgatgacggtctgcgcatgatccagcgcgctgcgcacggcttcttcgcaggcttcgatcccggcgcggaacacctcatccatgtggtcttcatgcaggacgttcatggtgcggaaggcttgtgtggaaaggtgcgggatcgggtttgcagtggaaaaggcgatgacgacatcgccgctgccgtttcccagatagcttccggtccgggcgagcgcggcaggcatgcgccggcacagccgcttgagctgacgagattccagcgggatgtccgtcgccagcacgataatgatcgagccttgttcacggccttgccgttgagcctgggagaaatctgctctggcatggatgaagtccgctttctgaccgaaattggcaagcaccagcgcgccgagcgtgaatgcctgtttgtccagttccacgatgcgggaagcagagccgatcccgcctttcatctcaaaacagctcatgcctcttcctgccccgaccgcgcccagttcgaatgcttcgctggcattttcgatggcctgccacacatcctgctccgtgatggcgcatgcgcggatgtcattgaggtaagcatcattgcattcggtgaccacgacattgaccgtcccgcttatcgtgccgatctccgggtgttccttcaacatatatttgaccagcgcctgctgcaccgtgcctacgctcaatgtgttggtcatggcgatagggctttccagcgtgcccagctcttcgatctgcagcaggcctgtcgatttggcaaagccattgatcacatggcaggccgcgggcagcttgctgcggaagatggagccgggacatggcatcaccacactgacgccggtctggatgtcttcactgctgatggtggtgtgtccgacccgtacgccgggcacatcgctgatgagatttcgctttcctgttttcatgctgtgtcctacctggtatatcgcaaatgcctcgtctgtcggccatcgcgatatcccttttcctttcttcgatctgtatagtgtaagcataacagaaaaccggcttgaagagaatgcgtgagcaggctgttggacaaaaagcgctcagtgtggttccttgattttcgttgtgtcatcttatatgattatgctgttgaacatgagggcgatatggaaacggctgacttttgcgcatgccatccagcgcctgagcagtgactatggaggtgggcagtatgtctgaaacaaaacaaaccgcactcatcttggaaggcggcgcacttcgcggtgtatataccagcggcgtgcttgatgtgctgatgctgcatcatgtgaagatccccaatgtcgtggggatctctgccggttccctgaacggcctgttctatgtgtctggccagatcggaaacgcggcagagcttaatctgaattatgtccgggattcgcggtatatgggattctccaatctggcgaaggaacggaatttcttcaactttgactttgtgttccgggatatctttcatgatctcattccatttgattttgcggcgtttcatgattctgacatccggttctgggccggtgtgaccgattgcgaaagcgggggtatccgctttatcgagaagagcgaatacgatgatttcctgaaagtctgccgcgccagcagcagcattccggtgatgaatacgccagtggagatcgaaggcagggagtatgtcgacggcgggatcgcctgtgccgtgccgctgtttgaggatatcccatgtgagagcgaccgccttgtcttggtgctgacgcgccacaagggatatcggaagaagcctgtgccggagacggtgcagcggatctatcggcgtcatttccgaaatgcgccggggctggtggaccgtctggtgaccgcgccgcagcgctacaatgagcggatggacaagatcgacgccctggaggaagaaggcaaggcattcgtcatccgtcctcgcaagccggtgaccgtatcccgcatcgagaaagatgtggaaaagctgagcgcattgtatcatgagggccgaagagacgcggagttcgcctaccaggacctgctggcatttttgggctgatctgcgcttttcctgcggctcgtgacaggttttgccttttttccatgcgatccatgatacaatcagagagaggacggtgatcggatgaagaagctgtatctgttgctgctggccatgctgctgagcggctgctccttgctggatgtgctgaatgagccggcagtggatctgaacgacgacagcgtgacggcagaatttaccccttctgccgaaacgatgaactatcattaccatcagcttgatgaagagggacagcgggcatacgggctgctactgtctggcctggaagagatgaacagcgagatcgagctgggcaagattgacggacagacgctggaaacggcatttgtcgctgtgatgaaagataatcctgcgctgttccatgtgcagaatgactatacgtatgaagagtacagcgatggttcgatcacgatgaagccgcagtattattttgatgcgcaggaaaaagcagacatccagcggcagatcgatgagcggacgcaggagatcctcaacgatctgccatccggcacagaagaggcggcatggtatctgtatacatatgtggcagagcatgcggaatatgaaagcggaccgcaggatcagagcatggtcagctttttcctggatgggcggacggtctgcgcggggtattccaaagcttatcagtatctgatggaaaaagccggcattccgacgacttacatcagcggcgtgctcaattcggacgaggcccagacgcgctatgggacgaatgcgcatgcctggaacatggtggagatcgatggggatcactattacatggatgtcaccagcggagatgtcacccagtacggcccgcatgtctgtcatcagtatttcatgatggcatcgcaggagatgcaggagatgtatacggcagaaggggcgatggaggaaaccgcagacccgcagggcagctatgttcatcggcacgggctgtatctggagtcttatgatgaaacggtgctgcaaaacgccatcgatgagatgatcgaacggggcgatcaggtcctggaactgcgcacagcgccgcatcagggcgaacggctgcgggaagagctgctccaggacgaccggatctttacgcttctgctgcgcagcgggatcgttgtcaatgagctgggctgcgcacagcagccggcgcttggcagcatcgagttttattacgaatgatcaggaaagcaggggatgggatgaagaagacggaactgctggcgcctgccggcacgatggcatcgctgcacgcggccgtgcaatgcggatgtgatgccgtatatctgggcggaacgatgttcggcgcccgcgcttatgcgggaaactttgatgatgaagagatgaaggaggccatccggtatgcgcatatccatggcgtaaaggtgtatgtgaccatgaacaccctccttcatgagcaggaaatggatgcggcgttcagctacgtccgttttctgtatgcgcatgatgtagatgcgctgatcatccaggatatcgggctggcagatcgtgtgcatcgccagctcccgaatctggagcttcacgcatccacgcagatgcatatccataaccgcgccgggatagagactgcgcgcaggctgggcatgaagcgggtcgtcctgccgcgggaaagcaccatcgaggaagtgcgcgctgccgcacagagcgggatggatctggaagtgttcgtccatggcgcacagtgcatgagctattccggccagtgcttgatgagcgcgtcgatgttcggacgctccggcaaccgcggggaatgcgcccagccatgccggatgcgttatgcgctgtatcggcaggaaaagggacaagacagaaagatcgctgcagatggtgaatatttgctcagtccgcgcgatctgatgacgatcgatgagcttccggcattgatcgatgccggcgtgatgtcttttaagatcgaaggacggatgaagagcccggaatatgtggcgcagacggtctctttgtaccgccgtgccattgacgcttatctggctggacatccctggaagacaagcaaggaagatgtgcgcagcctggaacaagtgttcagccgcgggttcaccagcggtcatttgtttcatcagcccggacgggcgatgatgaatccggtgcgccccaatcatatgggtacgccgcttggcatcgtggaaggcgtgagcaaggagcggatccgcatccgtctgcaggatgatctgcgtcagggggatggcatccgcgtcttgcgcgatggcgaagatcagggctgtatggtgaaccgcatctggaaaggcgggctgctggtcagcggcggcacggccggtgaagtggtcgagatcgaccgcaagatcaaggcggctaagggaaaccgtgtggtcaagacgcaggatgcgcagaagcagcgcgagctgcgggcgctggtcgaacaggaggggcgcaagacagcggtggatctgcaagtgacgctgtgtccgggcaaggcgccgatctgccaggccagagatgaagaggggatcgaagcacggttcatccctgacgatatcatcgtgcagccggcccagaaggcgccgctgcaggaagaacgtctgcgcgcacagtttgaaaagatgagcgatacgccatttcgtctgcgcggcttcacctgtgtgatgcaggggccgagctttcttgcgatgaaagaggtgaacctgctgcgccgaaaggtcctggagctgttgcaggaaaagcgtgcggtccgtcatgaaaagcatgtgccgctcccgtatccttctgccgcgcagggaacttctgccgagccggtcggcatcctggtcagcgtgcaggatgaggcgcaatatcgggcatgccgcagccggaacatccataacatcgtgacgccggtgcgcacattgtactgccagcttcatcaggcgaaagagccgatcgggtttcatgaaggaaacatcgtccacgcgcatggcgaagccgtgatgggcggtgaaaacggcgcgctttccgccgggcgcaggatcgtcgacaggacgttgaacctgaccaattcttatgcggtcgccgccgcagcttctttcggcgcagagacgatggtgctctccggggagctggatgtgcctgcggtggaagcgctcatccgcggctgtcatgaacgaggcggaaagctgcccgatcttgcctgcatgatctacggtcatgaggatctgatgacatctcgcacttgcgtgatcaacacatgcctgcgggatgggacaaagaaaggctgtcacctgtgccgggatcaccaatactatctgctggatcaaaaggggcgccggttcatgttcgagaatgatgagcagtgcaacatgcgcatcctcagcccggagccggtcgatcggatcggcagcgtgtatacgctcaaagaggccggtgtgcgttcattctatctgcgctttacgctggaggatgaggatgcgacagcgcatgtgctggatgaggtgctcggtcaactggcttgagcaatgagaaaattcctttataatattaagagaggaggaatgaaacatgttggatcaaaaagtcgccagtctgttgaatgaacaggtcaacaaagaattctattccgcttatctgtatcttgatttttcaaatttctacaagagccgttctctggatggatatgccaactggtatgagatccaggccagagaagagatggatcatgccatgatgatgatccgctatctgcaggataacgatcatgaagtggtgctgggggccatcgacaagccgcagtgcacgctggaaagccccgaggatccgctgcatgccggtctggagcatgagcgctatgtaacgaagctgatccatacgatctatgatgcggcgaatgaggtcagagacttccggacgatgcgcttcctggactggttcgtcgaagaacagggagaagaagagaagaacgcttcagatatggtcagccgctatgcgttgtttggtcatgatccgaaaggactgtatgcgctggacagcgaatataagtccaggacctatgttccctctgcgcaggaataacagatagggcgcccttgatgagagggcgtttttttcatgggaacatatgtcttttgcggcgtgatgaagaaaaaaggttactattcacagtcagccaaaacctgtcaagtggaaaactaaagaaattgtttttgtttgaaggcgaatcaaagactttctggccgatgtgatctgtctggttgt

SEQ ID NO: 3423 - DNA, 32759 bp, Unknown
  16S sequences of unknown bacteria
attgctaccactagaacctgaatctagcgcgtctgccaattccgccatatccgcatacatttaagttgctttattataatatcagtccccggggcgtttgtcaactgttttttttgcatttttgcaaaataaaaaacggagcagaaatttccgctccgttttctgcttcctggatcaggccaggacatagatgtccactgtgcgccgtccgttcagacagctctcggtataggtttcatagaacaggtccacatcaatcacatcattgagcaggccggtaccggtatccgccgcaatggcatatccgtatacaaagctgccatctgacgatgtgatatacagcttggaaccataggggatctcagtggggtccactgccacatagccgtaggaaagggtcatgccgctggcaccccaggcgccgctccgggcagaatatcccgttgccacctggtcggtgagcttataggcatagttgaccggtgtaccgtccgcactcagctgatagccaaagtccagcggcgataccgggtccgctgtaccctggagaatgatctcagtcaccggctgttcggttaccacattgctctccagctcagtacgggtcacttccccgtccaccatggtcttgttataggtcagctcccgttcgccgtccgatcccacctggatcacacgggtacggccccggggcagcaggctggaaccacggtattcggtttcatgttcgatgggctcctgctccaccgactgctctactaccacttcctgatagacaatctcgtccccaggctgtacatacatacccggcggatagctgatcatatcattttcatcatactcaatgccattggcgttgagtacttccccgacggtgccgccggtggtctttaccaccatgctgccctcatcggttgtcagagtcacatcaaatgcccgggtgatttcgatctccggaatggctccgcgcagatcaaaacccgaaaaatccacatcgtcataggccattgtcacaatccctcgttccgagagaatggcatcagccgtattccgggtggtgtagaccagctgcagctggccattatcccgaatatagacagcatcagcggacagcgtaatccacagggtcagaaacccggtgatcgccgccagcatagtgaccagaaaggaccggctgcgcagaagcacagcggcctcagaggctttttgcctgaagttatccataaacatctccttcttgtttgccaaaactaaatccagccggcatttcagaacttcccacattatatagatcccaccattcattgtcaagaaattcccggcggatttgagttccagtaattggaaatcctttcggattttttgcggtgtttaccgtgattttgcccatctccggcacaaattatacgcattttccagccaaattgcaccaaaacttcaatcgttttgatttatgtgaaatctgctgtaaacactttgttcattttttgagatatttatggaaattcgccataaattttccggttatttccagctgccgccagagcctttcccctttgccgaattgggtcgaaaagggtggttttccgcatgggaacagggattttccacctctccaggggcagaaaaatccccctgtcccggacggaacagagggaggattttccggtatgataccctatgggggttaggccttgccagcgcagcccagcacatccacgatcttgtgacggaccatctccttgatggcagtccgggccggggtgaggtactgacgggggtcgaaatcagacggatgctctgccagatgcttgcgcacagcggcagtcatcgccagacgcaggtcggagtcgatgttgatcttgcacaccgccatctgggcagcctgccggagcatctcctcgggcacgccgatggcaccgggcatattgccgccgtacttgttgacctccgctacaaactcctggggcaccgacgaagcgccatgcagtacaatggggaatccgggcagacggcggcccacttcctcaagaatatcaaagcgcagctggggcttctggccgggcttgaacttgtaggcgccatggctggtaccgatggcaatggccagcgagtccacgccggtacgggttacaaactcctcgacctcctcaggacgggtgaacagggcatcgtcagccttgacatgcacatcgtcctcgatgccagccagagtacccagctcgccttctactaccacgccatgggcatgggcatattctactaccttgcgggtcagggcaatgttctcctcaaagctgtacttggaaccgtcgatcattaccgagctgaatccgccgtccacacaggccttgcagatgtcaaagtcggcaccatggtccagatgcagggcaatgggcagatcggtgtcggcaatggctgcttccaccagcttggtcagatagatatgcttggcatacttccgggcgccggcagatacctgcaggatcagcggggcacgctcctcagcggctgcttcggtaataccctggatgatctccatattgttgacattgaacgcgccgatggcatatccgccttcatacgctttcttgaacatttcagttgttgttacaagcggcataacgacagtctctcctctcaagggtgtttggatcgtatggctctgccggcagcggggaaatttcccactccggcacctgcttctattctaccaatccgggacggggttttcaagctgaatttgtccgggaagatttattgaatcctgtgccggactgtgttatgataaagacagatcaagcggtgcagacctgcccgcatcagaaggagctgacgcagtgtgtttaccctgaccaaagccatgcccggggacgaagccctctgcatggagattattgctgacggacggcagttccagcaggaacaggggtttgtccagtggaccgaagcctatcctgccctgccggacattgccggggatattgccgcgggcaagggatacctgctccgggaaggggataccgtgctgggatacctttgcctggattttgacggggagcctgcctacgccggcatcaccgaaggaagctggcgctgggaggagccctatggcgtggtgcatcgtctggcgctgaaccgggccggacgcggacggggcctcagcagccgggtatttggcctggtggaagagcgctgccgggaacagggcatccgctgcctgcgggcggacactgatccggaaaatgcccggatgcagcacattctcgaaaaggtcggctttgaaaagcgggggatcatcattttccagggcagcggaaagttcgcctatgaaaagcgcatctgaccacccggactgcgaaccgtcgccccattccggacaggtgctggctccatactccgcacaacaaaaaacaggacagcagccctccgggactgccgtcctgttttttgttttctcagccgatcaccactgacgggctccaccgctcctgatagagccggcggatcttctcctcccggcggggatcgcttgccatgcagcagagcttccagggacccgctgccagacggaaccgcagcagtgtaaagccgcaccgctcatagaagccgatgcgccgctccatcagccggcgttccccgtcgttttccgcaaagtccgggtcctccacctcaaagtagatggcgctgtgcgggtagcgccggcgcatcagggtcagtgcctgttcgccgatgtgctgtccccggaaccggggctcagtcgccagataggcaatgcgcagaaggccatgccggtcgggcttgccatggatcagatacccggcataggcgccgccggcctccacagccagtgccactgccttgccgcccagcacctcccgccgggcataccggtacccccgcagttcataggggtgaaaatcccggacaatgctccggcccagtcccagcacttctctcagcgccaatggacggaatgtaacagtcatagggtcttccctcccatttttttgtcgatggatataacttccccggtttcccgggaaataaccgctgtatcttcgctgccggtcattcctccggacggagattttcctcctccaccgggtccagcacgagctttccttcggcacgggtgcggttcatatcaatgatgcgctggttgcggctgcccttgtagatcagggtcaggtcccgctgggccagaataaaccgtccgtccaccagggtgtcggtctcctccagcagctgccggatgccctcatcggtcttctgcatctccaggagctcctcataggtatagccggtgtaggtcatcacgtccttgcccatggcatggacttcccggcagatgcccaccagttccccggcctggagaatggggtcgccgccggacagggtaattcccttgagcagcggattcttcttgaactcctccagcaccttttcggcagtgacttcatagccgccgtccagggcatggctctcggggttgtgacagcccggacagtgatgcgggcacccctgggtaaacagcacgaaccgcagtcccgggccgtccacaatggactcccgtaccacgccgcaaatacgaatcatagtgttcctcctcatattcttccgataaaaaacaggggacggaaaatctcccgtccccctgttttgttttcaaactgcggttcagatgcgctccaggccagtggtaaccgaatgcttgacacggtcggcttcctcagcacgcttggcattgttgaaacggtccagtgtacccaccagatagccggtgatccgacgaatccgctcaaactttacgccttcaccgatcataatatccttttcgctcataagaattgcctccttttattatcgcggcagtgtgccgtgatcgttgtgatgaattaactcagccgttgcagcagcccagaggattgggacggcggtccgcctcctcaaaccggtcaccgtgatagccgatggtatctgcgttcagattgcggtacagtcccagcttgtgcagcttttccaggctgacaccttcgccgtcccggcgtccgcaccggggacatacctcatcaataatgccggtataaccgcataccgggtcacggtccaccggatggttgatggaaccatagcccacaccgctctccttcatgcagcgtaccactgcttcaaaggcatccagattcttgagcgggtcgccatccagctcgatatagctgatatgtccgccgttggtgagcgcgtgatagggcgcttccagacggatcttctcaaaggcgttgatctcgtaatacaccgggatatggaaggagttggtatagtaatcccgatcggttacgccggggataataccgtacttcttctgatcaatgcgtacgaaccggcccgagaggccctctgccggggtggcaatgagcgagaagttgggtccggtcttcttggactcctcgtccatgcgcttgcgcatatagcctacgatctcgaggcccaggttctgggcttccttgctctcgccgtgatgcttgccgatgagcgccttcagacactctgccaggccgatgaagccgatggtcagggtaccgtgcttgaggacctcacccaccttgtcatcgggggagagcttgtcggaatccagccatacgccctgtcccatcaggaagggatagttgcgcaccttcttggcagcctggatcttgaagcgctccagcagctgctcgatgaccagatccaccttgcgctccagttcctcgaagaaccactccacattgccatgggcattgatggcgatccggggcaggttgatggaggtaaagctcaggttgccgcgtccgcaggtcacttcccgggtgggatcgtagacgttggacatgacacgggtccggcagcccatgtaggccacttcggagttgtaatcgccgggcttgtagtactgcaggttgaagggggcgtccaggaaggagaagttcggaaacagccgcttggccgatacccggcaggcgagcttgaacagatcatagttcggatcgccctcgttgtagttgaccccttccttgaccttgaagatatggatcgggaagatgggagtctcgccattgcccagaccggcgtcctctgccagcaggatattgcggatcaccatacggccctcgggggtggtatcagtaccatagttgatggagctgaagggcacctgggcgccggcacgggaatgcatggtgttgaggttgtgcaccagggcttccatggcctgataggtggcacggtcggtctccttttcggagtacttcaccgcgaacttctgcagccgctccacagcgtcctctccgacaatctccgccagatagggagcttccaggcggcagtattcctcgctggcttccagacggggcttcacgccggtttcatcggcgatcttctgcttgatctccttgaacttctcctccagatccggcttgtcttccaggatctcggcagcctttgccagattcttggtatacagcttggaataggtcttggctacaccgattgccatgccgtaatcaaagttcggaatgctctgaccgccatgctggtcattctggttggactggatggcgatgcaggccagtgccgaatagctctggatgtcattgggctcccgcaggaagccatgaccggtggaaaaaccgtccttgaagagcttgatgatgtcgatctgacagcaggtggtggtcagggtgaggaagtccaggtcatggatgtggatatcgccctcccggtgtgccttggcatgcttgggattgagcacatacatctcatagaactgcttggcactttccgaaccatacttgagcatggtgcccatggcagtatcaccgtcgatgttggcattctcacgcttgacatcgttgtcctccgcatccttgaaggtgagatcctccagggtcttcatcagacgggtattcatctcccgtacccgggtgcgttctgcccggtagaggatatattccttggcagtgcgggcatgaccattttcaatcagggtatgctctaccgcgtcctgtacctcttctactgtggggatacggccctgaatggtattctccacataggtttctaccttctctgccagatcctgtgccatttcatagtcgttgccgcccagtacctgtgccgccttgtagatagcgtcagcgatcttgacccggtcaaaagcgacttcacgtccgtcccgcttgatgatctttgtcagcattctcccttgctcctcactcttgtaatattttccggttttatccgttatgtacaatatctgtcgaatgacaaccgtttgtcacacaagatattgtgtcttttcctttatatattgtaaccacccgacccggttctgtcaatagcggtcagtcacataaatccggggacattttgtcatagtagctaaacttcccattccatataatcccaaatccaaagcgccagtccgacactttccgcccggctgtggattactggggagttataaacggctttccaccgacttctccacaaaaagaataatttccccaccataaaatacaccgagtataatacccgatgtcaaagatctgacaaaaaattttgctgctgtgtgaaatctcacaaaaaagcgccgatttattctctgtgattctaaggcagtttccgacgccgggaaacctctcccctgtcccgccaatcgggccggcccccggatgctgtgccgccctcaaaaacagcgcccgcttttgtggagcaggcgctgtgggaatcaggatttggtgatgtacttgatgtagataacgccctcacccgggtcgatccaggcaccccgcacctcactggagacggcatagtagctcatggaggtgtagaggggcagcaccacgccgctttggagcagcagctgctccgcctgggccagggtgcgcaccgcctgttcgccggtctcggccgcggcctggtcaagcagggcatcatactcctccgactgccagccggtgcagtagcggtcggtatccgaggcgaagtcctccagcagccccatggcggtggaatcggacaggggcagcagcgccatgtcataatccccggcatagacccgccgccacagctcgtccaccgcaagcggcatcacattgatgctcgcccccagggtgttctgccagcagccctggataatccccgccgcctgacggtcggtctgggtgtccggcaccagcagctcggtgaagggcagcttctgctccccttcggctgccagcccctcccggaacagcgtccgggcgtcctctgtgagggtcagggcagtgcggtgaccggcggtatcccggtagtccagggtgcgctcgctggcggtctccggcaccaggtcggtggtggtgctctgctcctcgggcagcaccccggctatgccctcccggtcgatggcgccgcagatggccagacgcaccgactcatttcccagcaggctgcggctggtgttcaccaccagggcataggtggtatcggcatactcggtgatgacagcgtcccggagcgagtccaccgactcccggggcacctgggtatagaagctgtccccctcggtgaaggcagccagggtatcggtgctgcccagggtgatgttgatgccgtagagctctgccggctgctccgaatggtagtttgggttctggcgcaggcggatctccttgccggcaccgtagaggctgatgacataggggccgttgtagagggtgcttttcacctccaggccgtagcggcccttctgctcggtgaagaagctctccttgcagggggcggtgtaccactgggccaggacggtggtgatgccgctgtccgccttttccagggtcagcaccagggtgtggtcatcggcggcccggacacccagtgtctcgggctgcatctctccggcgaggatggcctcggcattctgtaccgagagcagattctcggcatagggggacacgctccccgggccgaacagccgccggaaggcaaagacgaagtcatcggcggtgacagcgctgccgtccgaccagcaggcgtcctcccggagctggaaggtataggtgcgcccgtccgaagacacggtatagccttccgccacaccggggtgaagtccgccgtcggggtcctccaccagcaagccctcaaacacattggacgccaccagaatggagttctggttctcagcaaactggggatcaaaggtgccggctgtgccggagagagccagcttggcgatgtagacatcactgccgcagccggaaaacagccccaggcagagcatcaggcaaaggagcatcgcgctcaacttccgaagccaattcacacccattcctcctgtttctgattttttcactcttacgattttaccatgccgggctggtgggtacaagggcaaaattttgaagaagttctgacaaaataaaaaaccgggagcccggcgggaaaatcccatgggcttccggtttcggaattcatgttgctctaggttagatgagctcgatgattgccatttcagcagcgtcaccacgacgggggccagtccggatgatccgggtgtaaccaccattgcggtctgcatagttcggagcgatctcgtcgattaccttcttggcaaccgcttccttcgtaatgaaggagaagatctgacgcttggaatgaagatcgccgcgcttagcggtggtgatgatcttctcagcaaccgaacgaacttcctttgctctggtcactgtggtctcgatcttgccgttttccagcagataagtcaccatcgctctgagcatcgcggttctgtgatcggcagttctgccgagtttgcgtgtaccgggcatttatgttcactccttttacctgtgcctgaggaataacatcgatttgtgattattcttcgtccttgttaaagtccagaccgaggctgcgcagtttgcttacaacctcctcaaggctcttcttaccgagattacggaccttcatcatttcctcaggggacttgttgatcaggtcgttgaccgagttcacacctgcgcgcttgaggcagttgaatgcacgcaccgacaggtcaagctcttcaatggtcatctcaagtaccttttcttttccggtatcctctttcttctccatgatttcggtgcccgaaatctcatcggagagttcaacaaagtggttgagctgtctattgaggatcttggcggccagacttactgcttccttggcggaaatagtaccgtctgtccaaacttccagtgtcaacttatcgtaatcggtgatctgctctacacgggtattttccacagtgtagttcaccttgagaacgggcgtaaaaatgctgtccactgcaatggtgccgatgggtgccttggaaagctccagcaccttgttcttatcagcggacacatagccctggcccttcttcagggtaatatccatcgagagctttgcaccttcgcccagagtggcgatgtgcatgctcgggtcaagaatttccacctcagcatcagtctcgatgctgcccgctgtcacttcgcagggaccttccgcttcaatgcggacagtcttgggctcctctgtgaacagcttggcggtaaggcccttgatattgagaatgatctcagtaacatcttccttaacgccggggatagtcgagaactcgtgttgtacgccgtcgatctttaccgacagtacggccacaccgggaagcgaggagagcagcacacgacgaaggctattgcccaaggtagtaccaaatcctctgtccagcggctccgcgataaatcttccgtaggaaccgtcgggcttgagttcatcggtgataatcttcggctctatgatttttaccatttataaaaaccctcccttatctcgggcagcctttccgggaaaaatcccggaaagatcctggcccttgtgtttcgcattccttgctgactgcttagaggtgaattacttgttgtacagctcgacgatgagatgctcggctacatcgtagtcgatatcgtcacgggcgggcatagcaacgatcttgccttcgaaggcatcggcagccttctcgatccacttcgggcaggggttcttaccgttctgctcgatgagagccttgaacttctcggaagcacgggacttctcgcatacagcgattacttcaccgggcttaacctggtaagagggaatgttcacacggcggccgtttacagtgaagtgaccatgtgtcaccagctgacgggcttcgcggcgggtattggcatagcccatacggaacactacattgtccagacgacgctccagctcctgcagcagcacctcaccggtgttgccctgcttgcgctcggctctggcgtagtatccgcggaactgacgctcgaggacaccatagatgaacttaaccttctgcttctcagccagctgcaggccatattcagactgcttgcggcggttctgcttggggttgcggttggtttccttggagtaaccaagaaccgcgggggaaaggcccagagccttgcatcttctcagaatgggctgtctattcttagccattgattggttcctcctttgttatactcttcttctcttgggcgggcggcagccattgtgcggaatcggagtaacatccttgatcatgttaacttccagaccagctgcctgcagtgcacggattgcagcctcacggccggcgccagggcccttaacataaacttcaactgtcttcaggccatgctccatagcagccttggcagcagtctcagctgcggtctgagcagcaaaaggagtgctctttctggaaccgcggaagcccagaccaccagcgctggcccaggagagggcgttaccgttggtatcggtaatggtgacaattgtgttgttaaaggtggactggatatgcgcagcgccgcgctcgatgttcttgcgctcacggcgtctggtgcgaacagccgccttctttgttacagccttagccatatcgtatccctcctaattacttcttcttgttggcgatggtcttcttcggacccttgcgtgtacgggcgttggtcttggtgcgctggcctcttacaggcaggccctttctgtgacgcacgccacggttgcagccaatttcgatcagacgcttgatgttcagcgctgtatctcttctcaggtcaccctcaaccacgaggttcttgtcgatatactctctgagcttggtttcgtcctcgagagtcaggtccttgacacgggtgtcggggttgacaccagtggcggccagaatatcgttagctgtcttacgaccgataccgaggatataggtgagaccgatctcgattctcttttctctcggcagatcaataccggcaatacgagccatattattgttgcacctccatcttaataggtttgcagattagccctgacgctgcttgtgcttggggttcgggcaaatgaccatgacacggcccttgcgcttaataaccttgcatttctcgcacataggctttacggaaggtcttactttcatttgaaacttgcctccttatttcaaaaccgttgggtataaaatcttacttggaacgccaggtgatgcgtcccttggtcaggtcatagggggacatttccactgtgaccttatctccgggcagaatgcggatgtaattcatgcgcagcttgccggatatgtgtgccaggatcttgtgtccgttgggcagttccacctgaaactgtgcgttgggcagcgcttccagcactacaccttcaatctcaattacgtcgtccttcgccaagaccggattcctccttttccctgtttgtcgcagcctgcgccaaatcgcgcagggctcgcctcagctgccggtccgtccgcatctggctgggtgtcagcgtccatgcggtcggacgcagatgacggggattctttgccttgggactactgagcttccggtgctttccatcagcggtcagcacccggcggtcatcaccgcctgttacagccagcagtcttccccggtcttttccactgagggatattaccactgttcctgccattgccatacgcacaccttatgccttggtcagaatgaccgggccattctcggtgattgcgatggtattttcaaagtgagccgagggcttgccatcctgtgtcaccaccgtccactggttcttcagaacccggactgcgggagtacccatgttgatcatgggttcgatggcgatgaccataccgggcaccaggcgggtgccatgacccggacggccatagttgggcacttcgggatcttcgtgaaggttctggcccacgccgtgaccgacatactccttcaccacgccgaacccgaactgctccacatagctctgcaccgcccagccgatatcgccgatccggttgcccggaacagcggcggcaataccgcggcgcagcccctcctgggtggcgtccagcagctgctggacatcgggggcgatgctgcctactgtaaaggtaaaggcgttatcgccatgataccctttgtaataggcacctacatcaatgctgacgatgtcgccctcgcggatcacccgggaaccggggatgccgtggatcacttcgtcattgaccgaaatacaggcgcttccagggaatccgccgtagccaagaaaggacggctttgcgccttgagagagaatgaacttgtggatcttgcggtcgatttccgcggtggtaacaccgggcttgaccgcttctccgccgacaagcagagcctgtgctgaaattctgccggcgtcccgcattgcggtgagctcggcagcggttttaagcacaaccatgattacgcctccaggatcgagaggagctgcgcggtaatagcgctgatctcctgtgtgccgtccacggtaaagagcttaccggccttgcggtagtaatccgccaggggagcggtctgctcatggtaaacagccagacggtccttgatggtttcaggcttatcgtccttgcggatgatcagcttgccgccgcacttgtcgcagatgccgtccacggcgggagccttgttcactacatggtagctggctccgcagctttcgcatacgcgtctgccgcccagacgggattcgatcacttcatcgggtacatcgatttcgattacacggtcgatctccacacccatttcgtccagggcttctgcctggggaacggtgcgcgggaaaccgtccaggataaaaccgttcttacagtcgtctgccgcaatgcggtccttgaggatcgcaattacgacggcgtccggaaccagcgcgccggcgtccataaaggacttggcttccagaccggcctgggtgccgttcttcacagcttcccgcaggatgttaccggtgctgatgctggggatcgagagcttttcgcagacgatctcggcctgagtgcccttaccggcaccaggggctccaagaagaatcaacttcataacagaataccttctttcggcttactcaaggaatcccttgtaatgacgcatcatcatctgggattcaagctgacggactgtatccagggcaacgccgaccacgatgatgatcgaagtaccgcccagggagatgttgatacccataagctgagagagcaggatggggccgatggcgatgatagccaggaagatgcctcccacaacagtaaccttgcttaccacgcgggcaatgaactccgcggtgggcttaccaggacggatgcccgggatagtaccattgttctttctcaggttgttggcgatctccatggggttatactggatcgaaatatagaagtagttgaatgccatgatcaggaagaagtacagcacggcatacacccagtgatcatagcggatcacactcaggatcttacccatgatgccatcggggtccacattcatgaaaccggcgatggtggagggaatcgagaggatggagctggcgaagatgacaggcagaacgccggacatattcaccttgatcggaatgtgggtggactgaccgccgtacatcttacggcctaccacacgctgggcatactgaaccggaatgcggcgctcggcattggtcatgatgacaatgaacacgatggctgccaggaacagtaccagggtgaagggaacgatgaaccagtacttcataataccgttgatcgccagatagagctcggtgatcacagtgttcaccatagaagatgcgcgggatacgataccggcaaacaggatcatggagataccattgccgatgcccttgttgtcgatctgctcacccatccacatcaccagcatggagccagccaggaaggaagtgatgatgacaacagcggagaagtacattgcggggccctcggtataggtgagagcgccgtaattgcgcatcaggaagtagtatgccaccgactgcagcaggcccagggccacagtgcagtaccgggtatacttgttgaggatcttccggccttcctcaccctccttcgcgagctgctccagggccggaatggccacagccagcagctggatcacgatggaagcagtgatgtagggggagatacccagagcaaacagggtggaattgctgaaggcgccaccgctgagcaggtcaatgtagcccagccagttattatcgccgctaatataagtcttgagaatatccggcttcaggaacggaaccggaatcgctgcgccaatgcggaaaagcagcaggatcatacctgtatacaggagctttgcgcgaagatccgccattttccaagcattcttcagtgtttcaagcacttacatcacctcggcctttcctccagcagcctcgatcttctgctttgcggaagcagagaatgccttagcgtttacagtgagcttcttctgcagctcgccgtttccgaggatcttgataccatccagggtcttcttcaccagaccagctgcaacgattgcagcctcatctacaacggcgccgtcctcgaacacgttcagatcgctgacattgatcgctgcatacttggtagcaaaaatgttgttgaagcctctcttgggaagtcttctggtcaggggcatctggccgccctcaaagcccggtcttacaccgccgcccgaacgggcattctggcccttatgacccttgccggctgtcttgccgttgccggaaccgctgccgcggcccttgcggaaggccttcttgacagagcccggtgcgggagaaagttcatgaagtttcattttacctgcacctcctttggttatgcttctgttacctctaccaggtggctgatcttggcgatcttgccctttgtagcggcattgtcgggctgagtggtctcattcccgatcttgtgaaggcccagggagtgagcggtagcgatctgcttgtcgccacgaccgttcaggctctttacgagtttgatcttcagtgccatgttcgctctcctccttaaccaataatttcacggacgctcttgccgcgcttggcagcgatctcgtctacgtttctcagcgacatcagaccctgcatggtagcggataccatgttcttggggtttctggagcgcagagacttagttctgatgttcttgacaccagtaacttccagtaccgcacggacaggaccacctgcgatcaggccggtaccttccggagcgggacgcatcagcacgcggccggcgccataaacgcctactacctcgtggggaatggttgtacccttcagggaaaccttcaccaggttcttctttgcgtcctcaatgcccttgcggattgcatccggcacttcggaagccttgcccaggccgaagcctacggtgccgttgccgtcgccgactacaaccagcgcggcgaacttgaaaatacgaccacccttaacagtcttggaaacacggttaatggtgactactctttcttgcagttccatgttggaagcgtcaattcgagccaaaagtatccctcctaccttagaatttgagaccgccctcacgagcaccctcagccagttcctttacacgaccatggtagatataaccgctgcggtcaaatactacctcggaaatgcccttggcaagtgcagccttggctacagcctcgcctaccttgcgggcagcttccttgttgccgccgaagccttcgaagcccttctccatggaagaggcgctggccagagttacgccgttcacatcatcgatgatctgagcgtaaatatgcttggcggagcggaatacactaaggcgtggacgctctggtgtgccgctgatcttagctcgaactctcatgtgtctcttgagtcttgccttgttgctgtcaggctttttcaccatatcaattcactcctttacttacttcttgcccttaccggccttgccttccttgcggatgacatactcgccgacataacggatgcccttgcccttataaggctccggcggacgcttggcgcgtacttcggcagcgaactgacctacggcctgcttgtcgtaaccgctgatgacgatcttgctcggggagggaacatcaatggtgatgccgttgccctcagacatgataacctgatgggagaagcccagtgtcataaccaggtccttgccctgctttactgcacggtaaccaacgccctggatttccagctccttggtgaagccttccgaaacgccgtgtaccatgttggcaatcagggttctggtcaggccgtgcagacttctgtgctccttatcgtcggaaggacgggtaaccagtacttcgccgttctcaacagttacggtcaggtcggagttgaaggtctgggtcatggtgcccttggggcccttgacagtcacttcgttgccgtttacagcaacctctacgccggccgggatagcgatcggctttctaccaattcgagacatattgtttgcacctcctttaccagacgaatgccagaacttcgccgcccacgttttccttgcgagcctgcttgtctgtcataacgcccttcgatgtggatacgatggcaatacccaggcccttcataaccttgggcatatcctcgcagtttgtataaattctcagaccgggcttggaaacgcgtctgagaccggaaataaccgaagtcttgttctcgccgtacttgagaacgatccgaatgatgccctgcttcccgtcttcgatcagctggaagctcttgatgtagccttcatccaggagaatctgggcgatcgccttcttcatcttggaagcgggtacatcgactgtttcgtgctttgcggcacctgcattccggatgcgtgtcagcatgtcagcgatgctgtcggtgatatgcataccgttaacctccttaaactaacttaccagcttgccttcttgacgcccgggatctgacccttgtaggccagctcacggaagcagatacggcagatgccgtactttctcaggtaggcatggggtctgccgcagatcttgcatctgttgtaggctcttgtggaaaatttaggtgttctctgctgcttgttgatcatggacttcttagccacttaaattcccccttacttctcgaacggagcgcccatcagctcaaggagcatcttggcctcttcgtcagtcttagcggttgtaacaaaagcgatgtccataccgcgtaccttgtcgatcttgtcgtactcgatctcagggaagataagctgctccttcagaccgaaggcaaagttgccgcggccgtcgaagccatttgcgctgatacctctgaagtctcttacgcggggcagagccacgctgaacagtctgtcgaggaactcgtacatcatatcgcctctgagtgtcaccttgacacctactaccataccctcacgcagcttgaagttcgctaccgacttcttagcccggcatacgcagggcttctgaccggtgatggcagcaatatcgcccataatggcgtcgatcatcttctggttgtcgcgggcttcgccgcagccgacattcacgacgatcttgtccagcttggggatctgcatgacactcttgtagccgaacttcttgttcagagcaggggctacttcatttacatagaactctctcattctagccatgttctcaatcctcctcacttagaaagtttcgccgcacttcttgcagacgcgctgcttggtgccgtcagcgttcagcttgtgggccagacgggtgggcttgccgcacttggggcaaaccagcataaccttgcaggcatgcatggggccttccaccttcaggatgccgccggtttcgccggcacggcggggctttacatgcttggaaaccacattgattccctctacgattaccttgttctccttcgggcttacctcgagaaccttaccctgcttgcccttgtctttgcctgacagaacaacgacggtatcgccagttttaacatgaatattgttcatctgtcaaactcctccaattaaagcacttcgggagccaggctcaaaatcttgagataatccttttcacgaagctcacgggctactggcccaaagattcgtgtgccccggggttgtttgtcgtcacggatgataacggcggcgttctcatcaaaacggatgtaagtgccatcgtctcttctcagtcccttggcggaacgaacgataacagccttcactacatcgcccttctttaccataccgcccggggctgccttcttaacggaacatactacaacatcaccgatgttggcgtatcttctgcgggtgccgcccagaacgcggatacacatgagctctctggctccggtgttatccgcaacattgagataggtctgcatctggatcacagtgcattcctcctttcggttcaactcagtttaccagcttcggggattttcttcccgaggactgcctgcaaccgtttttatgcaggcgcttaaactgatgtgtttgtattcgtacaaataaagcgagaaaacagtgatcttacttggccttctcgataatttcggctactctccatctcttatccttggaaaggggacgggtctccataacctttacggtatcgccgatattgcagctgttgagctcgtcatgagccttcagctttacggtgcgcttgatgatcttcttgtagagggggtgacgaacgttgtcctggatagcaactacaacagtcttatccatcttgttgcttactaccttgcccactctggtctttctcagatttctctcagacactctgttgtcctcctttcaaagttacttgcgctcagcgagctctttctcccggatgatggtctttacacgggcgatgtccttcttgacagcgccaagacgcatggggttctcgagctggttgatcgcgtgctggaaacgcaggttgaaaagctcgctcttcagatcggagagcttctcgttgagctcctggacggagaggtttctaatctcagatgccttcattacttctcaacctcctcttccttctttacgaacttgcacttaacaggcagcttgtaagcagccagacgcatagcctcgcgggccagatcctcggaaacgccgccgatctcgaacattacgcggccgggcttaaccacggcaacccactgctcgggtgcgcccttaccggaacccattcgagtaccagcaggcttcttggtgatgggcttgtcggggaagatcttgatccaaacctgaccgccacgcttgatgtaacgggtcatggcaacacgggctgcctcgatctggttggaagtgatccaggccggctccagggtctgcaggccgtactcaccgttggaaaccttgtttcctcttgttgccacgcccttcattctacctctgtggacacggcggtattttactctcttaggcagaagcattacttgttgcctccttccttgcgagtcctcttctctgcgagaacctcaccagcgtagatccaaaccttgacgcccagcttaccgtaagtggtgtgagcctcggcgaaaccatagtcgatatcagcgcgcagggtctgcagcggaatggtaccctcatgatactgttctactcttgcgatctcagcgccgcctacacggccggagagctgaaccttgatacctcttgcgcccagacgcatggcacggctgatagcctgcttcatggtgcggcggaaggaagcacggttctcgagctgagcagcgatgctctctgctaccagctgggcattcttgtcgggctgcttaacctcaacaacatttaccagtacagccagcttttcagctctgttcttattgatcatcttttcgcactcgagacgcagcttttcgatctcggcgccgcccttaccgattacgataccgggacgggcgcagtgcagatggattcttaccttggtggcgtcgcgctcgatctcgatcttggcgatgccggcgtcatacagcttcttcttcaggaccttgcggaggttgtagtcctctacgagggtatctccgaacacatcgtctcttacaaaccagcgggagtcccagtccttgattacaccaacacgaagaccgtgcggatttactttctgacccatagtttacctcctcttccggttagtctctctctttgagagcgattgtgatgtgcgatgttctcttcagcactctgaaggcgcggccctgagcgcggggtctcattctcttgagaaccgggccaggagctacgaagcactctgccacatacaggttgttcttgtccatgttgtggttgttctcggcgtttgcaatagccgacttcagaagcttctccagcggctcacaagcagccttgggtgtgtgcttgaggatagccatagcctggtcaaccggcttgttccggatcaggtcaagcacgatctgcaccttacggggtgcgatacgggcatatttcagataagcccttgcttccatttgttctcctcctctcggctattacttaccggtgttacttgtcttggagccagcgtggcccttgaatgttcttgtgggagcgaactctcccagcttgtggcctaccatatcttcggtcacatataccggaacatgcttccgaccgtcatgcacggcgaaggtatgtcctacaaactccgggaaaattgtcgaggcacggctccaggtcttgagaactctcttctcgccggcttcattcatctctctgacgcgcttgagcagcacaggctgcacgaacgggcccttcttgatgcttctacccatcagttactcctcctttcagcgcgccttacttatcgttgcggcgcttcacgatgaacttgttggagcggttcttatgcgctcttgtcttgtagcccagtgcaggcttgccccaaggggtaacagggccgggacgaccaacggggctcttgccttcaccaccaccgtgggggtgatcgttcgggttcataacagaaccgcggacggtgggacgccagcccatgtgtcttctgcggccggccttaccgtagttcacgttctcgtgatcggtattgcctacctgaccgatggtggccatgcactctacgggtacatttctcagctcaccggaggggagccggatcagggcgtaagcgccttccttagccatcagctgagccataacgccagcggaacgggccagctgcgcgcccttgccggggtgcatctcaatgttgtggataaaggtaccaaccggaatgttcagcatgggcagagcattgccgggcttgatgtcagcgccggcgccggacactacggtgtcaccaacagacaggccagcgggagcgatgatgtagcgcttctcgccgtcctcgtgctggatcagcgcgatgtgagcggaacggttgggatcgtactccagggtgagaacggtggcggggataccggccttgtctctcttgaagtcgatgatgcggtactttctgcggttagcgccgcctctgtggcggacggtgatcttaccggtgttgttgcggccggagttctgcttcaggcttacgagcaggcttctctcgggagcaaccttggaaagcccggagtaatcagtcacagtcatctgacgacggctggggctggtgggcttgaactttttgatagccattgcggtttcactctcctcatattagttggcgggattatgagccaatcccatactggctgcgtacttgttcacgcggcctcttacagcatcgtctcgaagaactcgatgccattggatccctcggcgagagttacgatggccttcttccagtcagatctgtagccctggttcatacccatgcgcttggccttgccggctacgttcatggtgtttaccttggcaaccttggtgccagggaacagggactcgattgccttggcaatctcaatcttgttagcgtcgcaagcaaccttgaaggtgtacttcttggtggcgatgcccgccatgctcttttctgtgataacaggagcgataatgatatcctgcggtgccttcattatgcgtacacctcctcgagcttggctacggcgtccttggcaatgatgaacttgccagcgttcaggacatcgtaggtgttcagtgtgtttaccagagcggtctttacgcccgggatattggctgcgctcttgatgaactgctcgttcttctcgggcattacgatgagtgccttcttctcagcacccagagccttgagcatagccacaacggtcttggtcttgtactcggtcacatcaatgttgtccacaacgatgatgttctcctccagagccttggtggagaaagcggacttgatcgccagacgctttaccttgcggttgagcgagtagctgtagtcacggggcttcgggcccagggcgataccaccgtgtgtccactggggagcgcggatggaaccctgtcttgcatgaccagtgcccttctgtctccagggcttgcggccaccgccgcgaacctctgcgcgggtcagagtggactgagtgccctgacgctggttggccaggtagttaacgactgcagcgtgcataactgctgcattcggctcgatgccgaacacggcgtccgaaaggttcatttccccaacgctcttgccggtcatatcataaactgttacctttggcattgtgtactcctccttccttacgccttgacgctgtctgtgatggtaacgatgccgcccttgggaccaggaatggcgcccttaagagcgatcaggttattctctgcgtcaacctttactacttccaggttctgaacagtcacctgctcaacacccatgtggccgggcaggatcttgcccttgtatacacggctgggagtggagttggcgccgttggaaccggcatgtctgtgcacagggccggtaccgtgggtatccttcagggagtgagcgccgaaacgcttgattacgccctgatagcccttacctttgctgatgccgcagacatctaccttgtcgccagccgcgaaggtatcggccttgatcagatcgccgacattcttttcaccgcagttatctgcacggaattcccgcaggaacttcttggcagccacgtcagccttggcaaagtggcccttcatcggcttgttcaggtgcttgtcagtcacctcgccgtaaccgatctgcacggcttcatagccgtcgttttcgattgtcttcttctgggtcacgatgcagggacctgcctcgatgacagtaaccggaatgaacttgccgttctcatcaaagagctgagtcataccgatcttcttgccgataatgtacttttgcattttctttcctacctcctaaggttattggtcgactttacgccgacatgacccggtgaacaccgagatgctttttacagcttgatctcgatctcgacaccggcagggagctccagacttgtgagagcctcaacagtcttgttcgagggtctcaggatgtcaatgagtctcttgtgggttctagtctcaaactgctcacggctgtccttgtacttatgaacagcgcgcaggatggttacgatctcacgctcagtgggcagcgggatcgggccggacactcttgcgccggtacgcttcgctgtttccacgatcttttctgccgaaagatccaccagacggtgatcataacccttcagtctgattctgattttttccttgactgccacattcatcgcctccctaataatttgttttgcagcgacgcctcctactgaacaccctgccgggtgtttcatcgcccttcatagaaaaaaccggccaaaccgccctgattttcgagttgaaaaccgtgctgtttacccggaaccaccttttccctgccggacctgccggagggctgacgatgagaactcccgccggagaacaagttctccacaggatttcccgttcagtattcaaaagtgaagtcgcccggtttgaaatcggacatactcggcgaaaattccccgcattcttgcggcaacctctcgcttcatcgcatatcttgtgcagtcacgcttaattataatatcacggaggggtgccgattgcaagcatttttttcagaaatgcctgaaaaatcgcgttttctatgaatttctctgaaacgcacagaactgcactccagaattgtgcgatatgacgaaactggcctgcccggcacagtcgaccgggcaggccgggatttcatcgggtttacaggcggcgcatctgccgaaagagcggcaggaacagcagggtgagcacccccgccgccagaagggcgatggcgacatgggccgttttccagatcacccattccgccgctatgagcacggcaagcactgccaggctcaggatcggatgggagcagaacttctcggcgatccggttcaccgtctgccgccactgctccgcatcgccggcctgctgccagagcgtaccgccccagtagagcagatacgccccatagtagacggaggcaaaccccacagcctccgggaggcgggagttggtgaagggcaggggcggaaattctgctatctcgaagtagataaggacaccgagaaccacctccagcgcccccaggagcagacagttcctggacaccttcttccggctctgatcatactgttcccgcatggacagcccctcctttcgcttcctctctctttcagtataccaaccccttcccgggcaagtcaaggacagggctctcacccggtaccctattataatagtataccctctgtcacatgagcgggctgatccgggtgcggaacagaaaaaatcctgtcttttcgtataaaatgcagttgtgctcagccggttaaaaatggtataataaccgcagtggttattttactttaccgcagcggtctgctgtcccagcctgggagggagctggcccgggttccgagccccctgcctccaatgctgtacaagccccgggaatccccgggtgtccggctgcataggcccggcagacgctgttccggcgttttttattacaagccgtgtttgcgcggactaactatccgctgatttcatgacaaaaggtggtttctccatgaaaaaccgagcagtcctcaagttctttctgatctacttcgggttcaccataacctcgaactttgtccaccccatcaccccggccttcctgcagatgatcgaagcgccctcctatatccagggcgtggccttctcggtgatgagcttcttcaccttcctcaccgctcccttctggggcaagatgggtgaccgcaagccctatcccaagatgatcgccttcggctacttcggctatgccctgggccagacggtctttgcagcagcccggtcggttcccatgctgctggcagcccgtaccatcagcggcctgctcaacggcgcgctgcaggtcaatgccctggcctacctcatcagcgtcagcgactcggaaagccgcggtaagtacatggcttactatgccatgctccagtcggtgggtacctgcatcggctacttcgtgggcggctccatcggcgattacagcctgatgctcgtcttctatatccagatcgcgtcggtgctcttcctgggcgtcatctcgcccatcgtgctccgggacgcccccggacgccagctggaaaccggacgcatcaactatcaggagatcaacccggtggcttccatgttcacctccatgaagaaggtggatgccgccatgggtgtatatctggcgactgtattctgcttcggctttgccatgatggcctatgacaactacttcagctacttcctgcgggatcagctgggcttccccacctcggtgaacggctacttcaaggcgctcatcggcgtcattgccatcattgccaactccaccatcaacatgtggatcaacaagcacaccgatgtgcgcaagtccatcacagtgatcctggcgatgagctcggtttcggttgcgatgatggtttccttcaagtcggttctgcccttcatggcgtcggcactggtgtactacaccttcaatgccatcaccgtaccggtgctgcaggtcatgatgatgaaggacgaggacaagaaccaggccggcaccatttcgggtctgtacaatgccttctgggcactgggacgcactgtgggcccgctgattgccgcctttgtatatggcctcaacccgctctatcccttcatgctggcagcggcggtgtatatgctggcagctgtactgagcatctggaaccgcttccagtacaagaaccgcaagccccgtctggtaaccgaataagaattcccccggaaattacgaccctctgtctgcggacagggggtctttttttgtatgcatggaacgggtgggctttgtacagattcacgatttagagtgctaaatcggcaaagtattccgtcactatcccgaagttttgtccagaccttgacaaagctgtgaattatatggataatatatttcatattagcgaatgaaagcgctaaatcatgaaactgaccaaacaaggaggtgagggaatggcagacatcgggtattgcggatgtgacctatcggactttcgcggggtcgactcgctggtgggcgacgacctaaaaccctgccggaaccggctgccaatagcaggagctcccctggatgctgttccccacctgagcttctgcgccctgtaaaagctgaaacctcggaacagcgtttcacactcgaaaggtgcgtagtatatttatgagtatcgcggatctctcaatctggaacccagtcacctgttttgctgcctgtgccggtgtgtatgtcatcggtgaatgtctgtcccgcctcaccaagggcaatgtctcctcgctgatgtttgccagtgccatcttcctgttcggcttctggctgaacatcctcccggacaatgtcacttccgcccctggcttggctgctgccatgagcaatttcggcgtcggcctgctcatcgtcaacctgggcaccctcatcgacctggaggatatgatcaaggaatggaaaacggtcgttgtggcgctgcttggtatggtgggtgtcgtcatcggagcctttaccattggcgccatgctgttcggtcgtgagtgggctctcaccgcagtgcctgccaccgctggcggcaccatcgcagtcctgctggtgcagaccgccgccaacaccgccggtcgtccggaagtggctgcttttgccattctggtcatgtccttccgtaagttcatcggtatgcccatcgcaacctatggcatgaagcgggaactcaccgccaagatcgcaagaggcgacttctctgccagcgctgcttccagcggcaagaccttcaagctgccggatatccgcatcttcaagcccactgccaaggccagcaacaccaacaacatgaagctgttcaagctggcaatcgtagcgactgttgccaatctcgtaggtctggcaacccagatccctggcgctgacgccggcaactacttcctcaacccgaacatcagctacctgctcttcggcctgctgttcacccggctgggcttcctggagaagggtaccctgcagaaggctgattcctacggcctgatgatgctgggcctgatgctgatgctccccggcaccctggctcaggtggagccgatggacgtagtggagatgatcgttccgctggctggcctgctggtgatctactcgctggctacctgtgtggttgccatcatcatcggcaagctggtgggctactccccggcggtttcctgtgccattgcctgcaccagcatgatcggttaccccggtactgagatcctctccaacgaggtctgcgacagcctggactgtgatgacgaaacccgagccaaggctctggagtacatcatgcccaagatgatcgtcggcggcttcgccacagtcaccattgcatcggtggcactggctggcgtactggcccccatgatctttgcctaaatagaacaaaaacacccctggtccactgcggatcaggggtgtctttttataatcgggtcagaaccggattattcctctacgggctgcagggtggtctccaggttctcatcgaagttgtaccagatcttggtgatcgggccgatcttctgaccgttcagggtgtaggtcacgccgttcttgcggatctccagggtaacgtccttgcccttcagctcccgggctacactggatgggaaccacggcagaccggtaccgctcatctcgatggtatcgccttcctcggcagccgcgatctgagccttgacctcagcccactttgcattgccgaagtagtcgccgccggaacgctcacggtcgttctcttcctcctcggagggatcaacaacatcaaccttgacatcgtccttcatgctgccctggatttcagaagcagtgaaatcgccggccttgaagccctcatccatggtcaggctgcctgtgccgttgaacttgaatacatcactggcttccgcgtcgccggatacagtgatggaagcgccttccttaacagtcagtctgccgccgttctccagctccacagcagtcttgctgttagtattggagaagctgccgccgttcagagcgatggtggcacctgcgccgccgtaaacaacgcccttatccgtggagttgctgaactcaccgccatttacaacagtggtggaagcagaaccagcagcaacagcgaagcgaccgccagtgatgttggccttctcaacagtcatagtgccatagttggcaacagcgctggaagtgctggaggtgctggtaacagaaacaccgccatccagggtcagggtgccatcattgcggatcacatacttgtcggcactgccagtggttacaatcttgccgccgccgatgctatcggtgatggtaacaaccttaccgctctgtacagtcaggccagcatcgccagtcgaacgaccgtcggtattgatggtcagagtctgaccagccaggtccagagtcaggtttgcttcgatttcctgagaagcgctcagagtaatgtcatcggtcagcattacatagccttccttggacagagcagcaatcagctcgctatcgtccttgacagcagtggcatctgccggaacagtcttaacaccggacagatcaacagtaaaggtatccttgccgattactgtgccatccgaatccttccattcgagaatgtagctcttctcggtcttgtcagccgcattccagtacatggcaaatccagtgatggtgctgtcacgctcggtgttgatgctctcaacaggaacgtccttgtagctcttggtgccggtaatgtctactgtggcagcttcatcaggagcaaccagagcagcgcctacccagtaacccatggactcaggagtatcctgattctgatgcatcttcaggccagtggtggtgatagagatgacgttggtctcgtcgctgtatgttacctcataatcagtgtagagatcctcatctgcaactgcattttcgctgtcgctttccacacgggtgtcatgcagcttggctgccttcacatcattggcttccagagtgggagcagtggaaggctctgccagtgtggaaataccagcattctgagttgctgccggagtgctctcgtccgcgaaggcgaccacagttgtggaaacgctcatcatggctgccagcaccagggcaagcagtttcttcttgttcatttcgtttctctcctttagtataatccggggccgttgtgacagctctcctgcagatcacataccctttttcattatattcctgcgtctgtgacccggtcaaagtcggtttcgttccgatttcctgtatttcccggggttttgctccgcaacacacaagattttattgataattcgcaaaatttatcatatatttctgtgttttgctcctaaacccttgtcccggaccgccggtgtcctgcctgtgattctcagtcctggacaggctggagagtggattccaggttctcgtcaaagttgtaccagagcttggtgatcaggccgatcttctctccgttcagggtataagtgacgccattcttgcgaatcttcagggtgatgtccctgcccttcagctcccgggctacactggacgggaaccacggcagaccagtcgcgctcatctcgagggtgtcgccgtcctcagccttggcaatctgcgccttcagctctgcccacttctgattgccgaagtagtccccaccggtacgggaggtcttctcctccggctggctctcctcgccgtcgtcctcctcgccgccatcggcatcatcaggctgcacggtcaccggtgtgccgttctccgccgagctgcccggctgggtaccaactaccgcctctactgtgccgctctccgagctcaccagggctgccagctgctcctccaggtcgtcctcgctcatgcccagggcagtgtaagtgtcgtgatccacccacacctttgtgctgccgcccgactgcaccgccagcttgggggtgccgctgccggtcttggcaagctcggtctggcctgcggaagtaccgctgcccagggtcacattggcgccgtccaccagcaggtcggaaccggtgccgccggatacagtcacgccggtgagtgtaccgctggcgccatcggtataggtcagggcatattctgcccgatccccggcatcaatggctacattctcaaagttggcactgacccccgacacagtcacgatgctgtccccgaaggaacgcatggtgccctctgcccggatcttggcattggtgtccgccttgatggtgacagcattggagatggtcagctgggaggtgagcacgatatccgcaccgtcctccagctccacggtaccgcccttcgcaatggcggaacgcagctcctcctcgctcttgatgagaccgggctcctccggctcctcctcggtgacattcacagtaaaggaggcagtctggcagaccacttcatcgccgtccttttccttgatgagcaccacgatctcgtagctgccgggcttgtggaaggtgaccttgaaccggctctccatgggattgcccagcgcattgaaggggaagccctcttccggtccgaagtaattggagggcagttcatgccagccctgacccaattcggcagtttcataatattcgatggtcatatcgccatcggaacccagattcggctcactgctgttcacagtaaaacagccatagactgttgttcccagatcagtttcgccccgggtggtaacagtgaattctgtggtggtgcccactgtggtattctccagactgctcaggctggtttccaccgacttgtcctcctgcgtcactgcgacagaccctgtctgtacggcagtctggggctgtgccgccgcagccgtcatctgcgccggaacggtcatcatggctgccagcagcagagccagcaatcttgtcctgttcataactttttctccttcaaacattcgattctctgcatatcctttttcggacagca

SEQ ID NO: 3424 - DNA, 32759 bp, Unknown
  16S sequences of unknown bacteria
acgtgtgcttgtcttcggcgcccgcgagcgcagcgagcgggtgacgaggcggctctgccgcctcgtcagcgtagccgccgtacttgtatcaagacaagcacgcgtcccatcgtcacttacctaccttatctcggacttttcccgcgatttccctttgctgtgaacatgaaaaaaaagacgctcgaaagcgtctttttcagtactgatttttattaaaatatttgaaccgaaattcattatttggggttatgatttcctgtatatccgttcctcggaatgtcaagtaccatactgtataacgttcatattcgtttctgttttccattaaaaaatgtatttcaaattttttgtctgtgcggtacaactcggcggcaatcaccatgctccaaccgctgttggggatatccgcgttccatgcaaacagtttttcttcctccctttcgagtatttctccgtttttgataagcaatttatcgccgttgtcaaacagtaaatagatatcttcgttttcaaaaatgatatctgttaaaaaaaattccgtgtattcgcttaccccgagcctttttgtcttttgcaagttgatgtagtgtgtgtatctctaccgaggtttgtttagccgctaaaattttataaattgtagattgtgataagttgcatttttcacatatatcggttatggcaatgttttttgcttgcattaaatttttaaacgttccgccacggcttgtgctgttgtcattaagtttctctcctaaaattatttagtagatttaaaaatttaataaaacgttgattctggtaaacgttattttgtgttgtttgatatatactactattataaacgttcattgtgatgaacgtcggaggtaaaaaaaatgaaattgattgaatgtattggtaaaagaattgataacttattaaaagagcgcggattgactcaatatgagttatcagaaagagggggcattccaaggtcgacaataaatgtaattatcggagcaaaacgtaagactacacaaatagatacaatatatcaaatagcggatacattgggtatatctcttaaacaattttttgacgataatttatttgataatattagcgattgattactttgcagttgatgttgcatatattataacgcacaaaaatatatcggtcaagcaatatagttggtgtgccaatatattttaaaaatagtatcgtgtataatagcattatattgatatagcaatataatggagattactatgaaattagttgacgcagtttataaaagaatagtagaattagccaataaaaatgataaaagcatttataaagtagcgaaagacggaaacgttccatattcaaccattgcaacaatgacaagaagtaatacagtaaaactatcaacgctttatgctgtgtgcgacggattagaagtaactttgcaagattttttcaactcaccgctttttgataaaaataatattttgaattaaatcctatatataaaaagaggtctcaagacctcttttctgtttggataataaatcacgttcaatttacgatataggcactccaccaaatccgaaaaccacaatatatagtgtttgttgtttattttaacactatatattgtggtatttttgttttgaaaaaagtttatcctcattatcacaggggtgtgacgcctaatctctgagcgatgatatagtttttaaaaaattgcaagcaaaaattatctcttggtaaaaattgacaaaataaggtcatatgcccaaatacggacatagtaaaatataacaaacataactaaagaggaggttatattttatggagccgtatgaagcgctttttgagcgaattaaggaattgatgaaaaaggaaggacttactaaatataaacactcaatgcagagcgggttgcctcactctaccgtctcgaacattatgaaaggaaggacgaaaagtgcaggttttttaagtatcgtaaatatctgccgaggactgaatatttctgttattgaattttttcaatcggaattatttaccaccgaaaacctttctgatgattgaacttgggcaaagaaaagccgtttatgcttttcgatttggatactaataaaagatgatacgcggttttagggaaattgatctaaaataattaaaaacttggaaagaaatcctattgttttcagcagttttaaatggtattataaaattaggaggcattgagaaatggctaaaaaatataactactgtacaatgataggtaatcctgtgtattacagcgaagaatttcgggattacagtccgaagacgattgaaaaactgaaagattacggagtggataccgtattgatcaatatagcgtggtcccgaccgtttatcgatgctgttacgttggagcatctttccgtatccaaagaatttcctttgtttagcgacccagaaacggttgccgaaaacagcgcgaacataattcggcgtgtgaaaaacgtacacaaatgcgggctgcgcgccatcggtttgtttggtttgccgatctatgttgattattctaagttgccgaaagaatattcggttttaaaaggcgcgacggacagtacggtcagcgcagataacgtaacgtgtatcttgtcggaacatacttcggcttattacaaagatctgataaagcaggtgatcgaaaaaaccgatatcgacggcatgttggtatacagttatgacgaattggcagaagtatgcgatgaggattcagactgcccccgttgcaaggggatcccgctggaacagcgtttacccggatttctaaacgagatcaatgcattttgcaaacagatcaagccatctttcgaaatgtggtgggaaccttgggaactttccgcctctcaggtgtatctgtgtttggaaagtcttgaccgcgatatcgccgtttcgtgtcattcgaccatttatgaagtctatttttccaatcttcctgatatttggttgcgcaacatgggcatgatatgcgagcggcaaaaccggaaatttatcgtggagatgttcatttcgggcagcggagaagatttgggacccatcggtggatatccatgtccgcggcttgtgtatgaacagataaagtcgttggagttggtgaagggcgttacaggcatgaaagagtatttcggaactgccgtaccgtttatgtctgtcaatgaaaaaatgacaaaattgttgttgagggatgaaagcgacgattacgacatttgcattaattccatagctgaggatatcgtcaaactggaagacgatcgaaaaaaactgatcgaagcatgggaatatgcgtcgcaagcactgttgatgacgccgtgggatatcagttgggtattccgattttccaacttgcagccgtatgatcctgcatattgggggaaagttcctttctttattgcaatgcagacgccgtggcatacgccttcatggcaggcgaatcggcgttcgtattaccagatcgtaaaagatacaaaacttttgaccgagcatatgaagcgcgattttgataaacgcatagcgttggcgctttcatacgcgcaaagagccttggagttattcgggcagttagataaattggataacggcgaaatagcaatgcaaaaaaatgctgtaacgtatttttatttgattctgtcatcgcgccgcaattatatgaatctttgcgacctgttggagaaatattctcttggcgaagcaaatgcggacaagatccgcgcgttgttagtacgggataaaatcaatgctgaaaagtttatagaatttaacgaaaagcaaaatgtagaacactattttccgacggctaaatcccgcgaagggctcgcattgctgaaaaaaatactggaagataaaccggaaaatataaaaaaatattttaagttttaagatttcaagagcctttgccgattttgtcggcaaaggctcttgaaatctatctatttctcatgtttgcgggcgtcacgccgtaggcacttttaaaggccgcataaaatgatttcgtatcattgaatcccgctttttccataacgccgctgatggaaagatctgtgttttctagcagttgttttgcgtagtcaaggcgtttttggcgaataaaggtagaaaggggaatgcctgttttggatttaaataattttcggaaatattgcggactgtaaaacgtacgtttggcaagttcttcgagattcaaatcgttctgaaaggatttttctcggagataatttaaaactttttgcgatatttcggtatccgaggtgggatcataaaaataagcgcggaatattttaaccaataaaatttctaaatatccttttaaaaggttctgatagcccgcctttctcgcttgaaactcttgctgcatctcttcgaatatatgttggaattcctgcgcatcgttttgcagttcgatatcggagagttcttttgtgttataatgcaatgattccgacgaaatcaaaactttcagaatatccgtcgtgtccaccatatcgatgagcgaagtgctgatgacggaaggaaagaacaaaacgttgatccattcaaacgcctcggaagggtttgcggggagtaaattatgttcacttttgggcgtaattaaaaagaggtttccttgtttgatggtatgatggttgttattgataacatgatatccgttccccttggtgataaatgtaatctcaaaaaaatcatggctgtgctttttcagttcgggtttccataccgaagcgatcaccgctattttttcatcgtccttaaagaattcgctgtttaatgctttcatagttatagtatacttttatagaccgcaaaattaagccgtatttcggcatgattaagcggttttttttcgaaaaattacttgcttttcgaatatcaaataaagtatagatattttgaatcaagaaaaggatcgatttatattgttttcggcgcagttttgggtgcaataaggataattaggttcagatttcctaattaaaaggacttttttcctattgaaagttgatagtgtacatattataatgcaattatcaataatcaacggagggttgaaaatgaaaaagatcatatcaatatttcttgcgttggcatcaatactagcgctgcttgcttttacggcatgcggctcagataaagatggcggtggaaaaacagaaattgaatatccggatttggtgcaaagcgaatatgccggcacggaaattgaatttatgcatttttggcaggatgccgacaaagccattcaagatatggcaaaatatttttcggagggcacgggaatcaaggtaacggtaacgctttctcctgtttctactcatcttacgagtttgaatacaaaaatgcagaccaataccatgcccgcactttataccatgtggcctggagcaactatgcccgaatacgtcaattcgggatgggtaatggatttgaccgattacaaaggcgaatggatggagcgcatgaataaggatgcctacgcttcgtgcgtcacgaacgataaactctatattgctcctgtcaatatggcgtttatgggtatagcgtacaacaaaactatttttaagcgcaacaatgttgagccccccaaaaatatggctgatttcgagcgtatcatggacgttttgaaaacggatacgaatctatcctatcccatgatctggggcaatgactgttccgccaatatgatttacctcatggctttaagttctctgtatcagaaaactcccgatttcgatgcaaaggtttcggccggccagatgaatttcaaaaacgatacgatggtcgaaatttacgaaaaactgttcatcgattgggcagaaaaaggatattacaatgcagaaacctgcggcacgatcgaccgcatgagtaaagcggctgcgcagtttgttctcggaaaaacggcgatgatgcgtttgggcggttgggatctcgccgttatcgacgaattgatcgaagagagcggcggttctttggattacggaatgttcccgatccccggtgctgataacgatggttcggttcttgctgccgcgggcgaagcggttgccgtaaacgcaaaactttccgaaaaagaaaaaggcgccgctttggaatttctggatttctttttgcatcctgccgtaaacggtgaagtgtgcggaatcatcaacagtttatctccttattccggagtagaggtagaagccaaagattgcattactgaactgggcacttatttggatgatacttccagggggtggacaacatggccgctcgacgtgcagaataaaatgggcgaatgtttggatatcgtcagcgaaaaaggcgggaaagatgcaaaaatgaaggttttgaatgagcaccttgattatttagcgagcttgtggaaataagaagaaacgatcgggcggcgaaatatcatttcgtcgcccattttggaggtaagcatggcaaaagagatcactgttgcatccgagtgcgagacaagtatagattctcgaaaaaaaagcgatagacgaaaaaaatgggataaatttatccgaaaagacaaaatcgtgttcaatgataaatttgcacaggcagtttttttgcttcctgccatactcgttttttcagtgtttacggtttatcccgcctttacgtcgctgtattattcgtttacggactggacgggtatcgggaccaattataattttgtcggatttgcaaattatgccgaaatgtttcgggataaaaatttgttccaaacgcttcccgtaactttttattatgccgcattaaatgcagttacgctgttgtttgtggctttttttatcgcgctgatgttaaatcggcaaagcatatttacgggttttatgcgcgtgtgtttctttattccgatgttggtttctcccttgatcgtaggattcgttttcaaagagttttatgcgccgaccgtcggtgacgaaacgggttcgctgaataaaattttaatgcagataggattaggatttttatcgacgaactggctgggaaacgaatatacggcaatgatcgtcatcgtcttgaccggagtatggtatcaggtcggacaaacggcattgatttacctggcaacgatgcagggcatttccgcagaatattatgaagcggcaacgctcgacggggcaggctattggaaacgtacttatcacatcacctggaaactgatgggccccgctctgatggtcaatacgatcttgttgctgataaacagtttaaaacaatatgatatgattgctttgcttacaaacggcgggccgggcacatctacaaaggtgatcaacttggcgatcgtagaactatcgatcgcttcgcaaaaggttggtttggggtgcgccatgtctatggtcgtaacggcgtttacttttgtattggtatcggttacgcaaaaacttttatcgaggagggcgaccgcacatgactgagaaaacgttgccgacgagcattgaaacgaaaaagaaattttttacaaaaaaaagaatttgttcgatactgattactttattttgcttatgtatggcagttttcatgctcttcccgatgtatatgatctacataaactcgtttaaaaattttttccagtttataatagatcctttgtcgcttccaaaaccttggacgctgaaaaattatgaatatgcggtcgagagtttcaattattttcgtctgttgctcaataatctggttttcgaaagcgtttcgctgttttttatcgtattgttgggtgcgatggcgggttatacgatcgcgcgcagaccgagccggttcaaacggatcatctatatttatatcgtaatgggcattacgttgcctacgtacactgctctgtatccgcagatcaggctgatttccgatctcgggctgacggatacctatgccggcgtgatcgtgttgtacgttgccgcaggtatgccgatgagcatctttttattcaacggtcatttcggaggcgcttcttcggaattggaagacgcggcgaaaattgacgggtgttcatattataggcagtttttcagtatcttttttccgctttcaatcgcaacgtgcgcaacgctcgtactcgtgcaggccgtcagtatctggaacgatactacgtttactccgttagtcatttccaaggattcggcaaaatggtcgttgatgacgcagttgaataccgctatgggcaggatgatcgggcagggaacgcgatgggaaagactgtatgccattgcggcgctgtgtatgctgccgatgatcgtgctgttcttttttgtcaatcgctttctgatccaaggcgttgcggagggagcggtaaaaggttaggagaatacgaaattttgtatgtttgaaatagattataaagaatatctcgataaggtctatggctgttatctcggcgtgagtatcggaggattggtcggcgcgccctatgagggcgcgaaagaaatcatcgacgtgccgatcgatctttcgggcatcgatcagatgctgtttaacgacgacctcgatttacaagtgctgttttttcaagcggtcgaaaaattcggagtgcggttcaatgcgaatatgctggcgaatttgtttttgaagtgctgcccttattcgcctggcgaatatgcgatttttaagaaaaattatgcacgggggattcttcccccgatttcaggtacgtttaacaatgagttttatcatgaaggaatgggctgttgtatccgcggcgaactttggggttgtctgttcccaaacgatccgctgacggcgaaaaaatatgcttatttcgacggctgcatggatcacgccaacgaatcgatttattcggaatattttgtcgcttcgctcatcgcttacagttttgtttattcggatatcgacaggatcattcggttggctacggagcaggtgccgcaggaaagcaagttccgccttatgctggaaacggtatcttcttggtgtgacgaaacgtcacatcctgatgcgctgcgcgaaaaaattatccgggagttcggtcatccggactgtacaaatgtgttccagaatctcgcatttatcgttgcggggctaaaaatgtactttaacgattttgaaacattgatcgaaaagacggtgcgcctcggtttcgatacagactgtacgggcggtatcgtcgcggcggtatggggcgccgtgcacggcgcttcggctttgcagaaaaagtatgggatagatgaggtcaaacttgttttgggggtaaattgccccgattacagcggcaaggtttcgaagtttgcggaggcggtcgcgcaaaaaggcgcatcttttaacgacgaagaccgcagcggcgttaaaatcgtaaatgcgcccttgcctcacgaaatttgtaagcaaagcgttttatacgaactcgtcgattacgatcccgtattagaattcgatacgatgaaaacggtaaagatacgggcggatgttcccgagggaagaacgggcgaatttttttatgaaaatgaccgtttgaaaaccgtgttcttttccacggaaaaggagggggacggatacttgcttaccttgggagttttgcttgaaaaggcgccgcaaacgccggctgatctttgcgggaaaatagtttttgaaaccgctgacggaatcgacgaagacgattgtattccgttggggtttgctccgcccgtgatctttgaggtatcggcgccgatattcgatacgttcgagcacattgtttttgaaaagggaaaaaattattacggacattttgcaggggagcaagacgaaaacaagcgttttgaccgcatccgcgattaccatttgaattataagattccgctgcaagatgaacgggattttgccttacgcatttcgcggggagaaccgttttccaatcaaaaggtgattgtgtatacggataaattgtattccgaacgattgacgggataccgcgggccgtgtttgctgtatcttcgccgaaaattatacttcgggaacgattgcatctgtgcgatttggtgcggctgcgaagggcgcgcggaagtttggctcaacggcgaaaaattggcggaaaatcaccaaaatacctttttcacttatgaaaatttacatatcaatcgtgcgaaaatgaagtgcggcgaaaatgatctcgtcataaaattatggcgcgaaacaggcaaagaatgcttttcctgcaatattttgaacgaaggcggggtaatggattttcccgaacacgttttaaattttaaacaaatcaattaaggagaaaaatgttatgacggcatttaagtatgtgggaggaatggtgggaaatcctgatttgcctgccgtagagtggagcgatgagcaaatgcagaccctcaaagacatgggtatgaattttgcgcagttgaatatagcctggaacgggcgcccggggaatgaacctttgaatctggatcatatggacgacgagatgatcaaggtgtttcagtaccgcgtggcgcagttgaaaaaattcggaatgaagggaatgccgcatttcgggatgcccagaatgttgatgtctaagcacgacggaaacattacgccgtatatgacgcccgcgtgcatactcgaagacgaaaccatgcgcaataactgggcgatgatggaaaaactgatgcgtgcctgtccagagatcgacgattttatgttctatacgtacgatcagcacgcctggctatgcagcgagtttggcagttgtcccaactgcgcaggtattccgttggacgaaagactgcccgattttatcaacgcttttaaaagaaaaatggcggaagtcaacccgaactgtattttctggtggcagccttgggaactttcgctgggacagatcgcggaggttttgtataagatcgaaccgaacaatttcggcttgatgatcaacactgccggaagcgaatcgtattttaacaatctggataactattgggtgcgcggcataggcgcgatcgccgaagaacgaaatattccgatcatcggagaaattcaatccgcggggtccggtgtcgcgggcgtcccgttgcagcgcgtagcctgtcccacgctggttaagcgtcaaatcgatatcgtaaaaaaacttcccacgttcgttggcatcaaagaacattacggctatgcgtttgaaaaatattcctcgaatatgatctttttgactgaatatctgaaagatcccgaggcggataccgatacgcttctgcgccgtacggcgttgcattacggtaagaactgcgcggaagaactggtttcggcgtggaaaatcgccgaaacggcaacggattttattccttttgaatttgtgtatctgtattcgaatatttgcggatattctcccaaacacgattttaacgtgcccatggtgcaaggcgttcacgccgatacccccgcatgggagagcgaccgcagagccttctttttgattacgcatgatatcagttaccacccgtgggcgctggaaaatgctgcgctcaaatttaaacaggcggcaaaccgttttgaaaagatggtggatctgatgaacaaggcgttggcaaaagccgagtatagaatgaccgatctgaaagagacgatcgaagatatggaccgcgttatgcgtgcttgctacggtcagtattattactttaaagagagccttgcggcatacgatgcgcgcgtagctgtttttcaaggcaatacggaaaagatcgaaagggctttaaaacggttcgacgatctgatgcggggcgatatccgcaatcaaaaagaagatgcggttattgtagaaaaataccgcgaattcaaagaggattataaaaaattctttgaggaaaattataagcaggaagaacgtctttgggctacctcttatattgaaaaaatcgatcagagatattaagtctgggaggagaaaatgatgcgtaagcatatgctgaaaaagagtgcaatgctgattatcagtttggttttggctttctgttttttgaccgcagcggcagcgtgcggcggggataagaaaaaagatccccccgacaattccgtgaaagaagaggcggggcaagtcgaaatcgtgaaaaaagactggaagggcacggaaggattttgggagatcacagacaatgttttttaccagaaacaagataaagcagcggggcggctggtttatcaaaagcaggtggatcaggattacataacgtttaaagcgcaggtaaaactgatgactgccgacgcttccgcgggaatcgaattccgttcccaaaaagaagttgaaacttcggatgcttcgttaactactttttcgctctccgtcgccgatggcgccgtgatgaaatttccgagcggctcagaccgctacggaaagggcaaaaaaaatataaaagcagagatcggaaaatggtactcgctggaaatcattttaaacggaaccgacgtttcgtattacgtagacagcacgttggtagaacagcgcacagattgtgcgatcaaaaaaggcaacaaatattttgctttgctcgcccggggtgccgatacgcgcattaaaaacgtgcagttcgaaatgttcacgcccaataatctttcgtgggaagaactgttgaaccgttccgaccttgtaaaacaggggtacgaccgttttagcgcagcgcatttcgagtatccctatgtcgggttcggaagaacttctctgcttgtcagcccttacggatttatgacgcccaaagcggagagaccttcctatataggcagcaattaccgcgacgatccgcagtttatctacgacctgtggtgggacgatacgatcaaggtggatccgtttactttttcgggcggatataacgtgggcggcgagttggtcgagggagatatgctcgacgacgatacctgcacatataaacaggcggttgacatcgacagcggcgtgcttacgaccgatctcacgttgtcggtgggcggcgagtatatcagatcctcgcgagaaatgatcgtaaatgaagacggaacggtgatttatcggatcacgaacggaggacaaaaacagtttatgtttaacctgaccgtccgcgattccgtattcggcgggttagaatatcaggttcaaaaagacgggtatctcgccaaatgcaatttgcgcaaggatactgaaaataaggcgtacgtacaggtaaaagccgtgagcgatgcgggctttacggtgcaaaacgacggtacgattctgtttaatgctaccgaccagcccatatatatttacattgcgcccgaatcggatctgacgttcgaagaaaatcacgatccgagcgcgaacgctgcggcgattgcggagaaggcggtcaaagcaggattcgacgctgcggttcagaacgccaaggattggtatgaagcgttttatgatgccggcagagtttcgattcccgatctcggcatggcaaaatggtatgtaaggtcgctatattatcacgccgtttccatggcgggaacgcgtgttccgcccggatgttattcgaacaatgttgcgggattcttcggcggaccttgccccgaattcgacctttctctatcgcagtatatgctgatgatgaccaatcatacggacctggcgcagactacaatcgattggtacgcgaatacgcgggatacattgcgcgccaatgccgaaagcggatatgccgacaagacggggcattcgcacgaagcggttacgggcggatacctgatcccctggatcgcgggatgggacggttctcccacgcgcggtcccgaggtcgggcacgagcagggttgggtaagtatgtttgccggtgcaaacgtggccggtttcattttaaaccaggcggaatatttggatacggacaggacgcttgccaaagatatcatgcttgggcaactccgtatgatgatgtcgttctttaaaaagatagacggcatttgggtgcatgaaggcgtttgggcaggcggcgataattattctgcaggcagtttttccgagtcgatggcggcggtgtattcgttgatcacgatcagcgatctgcgcgaagagtatcccgaattatttacaggtgccgaaaacgcagagatcgacgagtggctcaaacggcttcccgatatgcctccctataacgatcagtttactgtgacgtacgatccggataaggcaatgtatacgattgggcatacaacggcaaaaatccccgaaatgatcactgagggtacgggttatgtcggcggtccgaccaataacgtgtatttttggtaccacctcttgccttataacgatcccaatctggcgggaacgctcgtttcgattgccgaaagcggacaattcgattatcattttaacacgggttggtccgctaccgttgcggcgcgcgcggggctgtcggatttcgcgtatgagtttaccagatatatgctgcggccgagttctctctacgatgattggtattttaccgagaacgtaaacgattcggaggattttaaacgctctcccgaactcggttcgcacggttcttacgttatggcgatcagcgccatgatgttcgacggggaaacggacgagtatataaaaactttcccggcaattcccagaaagtggcaggcgatcggggtggatttcgaccgtatgctggcaaaggggaaaatcgaggtttcgggtaagttcacgaatcagcaaacaagcgttacgctgaacaacctttcgggacaagaagcgatccgcgacgtttacgtcagggtacaggaaggcagcggcgctgcgaggtataacgggaacgaatatgagatcgtcgatggctgcatggcattgatacccgatgtacgtattcccgcgggagaatcggtcacgcttacggtcgaaggcatcgaaaaggacgtagaaatagaagagtttaaaggcttatcgcctgtggcgcagagcgatcgggtccgtacggaaaatgttccgttcagttggacggcggcggatcatgcttgttcataccgtttggtcgtttcgaaatattccgatctgagcacgccgctgttcgataagaacgtcgggctcacaacgctttattatccgctggatactgaggaacagatcgatctcagcgaaggaacgaaatattattggtctgtatacgccgttcacggcagcagcgaacgtcagatgtcgcagaaagtactgtcgtttacaacgaaaggcgggggcgcagagcctgtggatccgttacccgacgggactacgatcgaagtcttcggtaaaacctggggcgtaaatcagtatgcggctgcggtcgatgacggcattcaggttacgagcattgtcggatatcaggaaaataatcctacgggcgcatattttgaaacagacaaggattttatcgtcaccgtctctgttgaaatgggtaaactcggcaaagcgggcatcgaaattctgtccaacggaagttatcagttcgtgcgtacggaagacgggcgaatttcaagttacggaagtctcgccggcggagggatgtcgcccgacgacgggccggaagtcaccggaaaagttacataccgtttgagtcggttaaacggcgtggtcagtacctattacaaacttgaaggtgaaaacgactttacgaaaattatggaaggagaacttccctcggcgctgaacggtcaaaatatccgcgtttatttatgtgcgatttcttcatattacgatcaaagtacgcaggtcatggcaaaatttaccgattatacagaagagtttttcgaagcgggcgagccttcggagccgggtgaagagattcccgagggcgaaatcgttgccgcaggtcagacggtttcggtaaacggtattacgttgactgcctcggaaggcgctaatatcgtaaaagggcaaaacggggaagcggaaagcgttatcgtaaacagtatagagggcaggaacgatgccgaccctacgggcttttacttcaacatatcgcaaaactttgagtttactgcaaaattccgtaccgacggtttgggaaagagcggattgatgttacaggatcccgcagggaaatatatgtttatccgttcggaaaacggtacgatttccagttacggcagtatgcaagacggttgcgggagcggcaatgcggggaatatagatggctggatctatttcagacttgcgatggaaaacggagttttgtataccgcgtattcagcagacggtcaaacgtttacaaaagtcgtcaatgatattaaactgtcttacaatgccgataccgtattcaaattttggctgttcgcttcgcaagacggtgcgggcggggcggtaaaggctgcacagtttacagaactttcgttgattcagacgccgtatgaacaaccggaaacaggtataccctcgggaagtacggttgatgtattcgggaggcaatttacgtcgacgagtgaaatcataaaaacagagaacgggtacaggatcgcgggtgcggggctgcccgataacgcgcctgcgggaatgtacactgttttgaacggggattttgttctcgaagcaaaactgaacattcaccttgacggagcgactgccggactgacgtttctgaccgaaaaaaacaattatatgtttgtccgctcgacaggtgactataaactggaaagttacggcaatctgaatacgggcgcaagcggcgtcggcggtacggaaatcgggtatacaggcggtgaaatcacattaaaaatcgtaagaagcggcaatacggttacgacgtattataagttaggggaaaaagagtttaaacaattcagcgcgcttgtgatcgacgaacaatacataggcgacagcgattcgctgaaagtatattttgcagtcaacggcggcgggatcagttcttcaatggagatctccgaatgtaaaataacacagtgatataacgttcaataaaatcccccttatgattaatataagggggatttttgctgaaaaaatcatgtcggtattgctttacataacctgttgggcagtccatattgattacttttttaacggcaatggtgatttttatttcagatcaatcgtcgtcagaaatattttccagatcgaacagtgcggaatcgtagaattcccgataattcatattgaatgcgcggcagatgttcagaatggttttacttcggggatccttggtcttgcatgataagagcacagagatcgtggggtgcggaacgccgctcattttcgaaagtttgtagaggttgacgcggttttctttcatgagttgtttgatgcgcgttgcatatgcctgacttaattccatagaagatttctccttttttatggatatactactatgttatccaatttacatatgtaaaaatactaacaaacgcgcaaattttttcggaacattcgggaatcgttgtaagagcggttttttcagtttaaaataaaaggaggtttccgttcggaaacctccttttttagaaaattaaaaagcagattcgtatgaatccgcttttttgttcttagtaacggtctgaaccgtacggttttctgccgtagccgccgttgttgcgctgagccttgcgggcttttctgcaatcggggcatcttacaggttcgttgtcaaagcctttttctttataaaaagcttgctcggcttcggtaaagataaaatcatttccgcaatccttgcatttgattgtcttgtctgccatacaaaaagcatcctccttttaaaatttcatatgggtaagtgctttttttgtgacaaacattgttcagacaaatatgcaattcctatatgctaaaattttaacataaatcttaagaaaagtaaactatttttcggaaaaatttataaaaaatttaaaatcagttccacgagatagacggaagcgatgctcgcgagggaaacgacgagcaaacttcgcttaaaaaaggcgaggatgagcgcaacgatcgcgccgacaatgcccgaaacgagaaaactcgtggaaaaaaagatgccgggaaacaccatgaccgccagcacgctgtacggaatatagtagagaaacgattgaacgaaccgatttcgtatcttttttctgagcagcaccatgctcacgacgcggcaggcataggtgacgagcgccatcacgaggcagccgagcagcatacttttaagcgtcatcgtctttctccttcggctcgctcgtttcgggctcggcatgcgggaacaggagcgatacgactgccgtgcagacgacggagcagagaatgatcgtccaacccgacggcacgcggttcagatacggaatgaaataaaacgcgcaactcgctgcgacggataagagcacgagaaaaaggatgctcttgttttcccttgcgggcggtacgatgatcgcgacgaacatagcggagagcgcgatgccgaacgcgctcatcagcgcgtcggaaaagatgtctccaagcgcggcgccgagcacggttcccgaaacccaaccgaaataagagcaggcgataagccccgaaagataggggaaagtgagtttgttcggttggcgcaccgccacggcaaagttttcgtcggtcacgccgaacgccacgacgagcctctgccaaagcggaaacccttcgcccattttctgggaaagggacaaagacattaccgtataacggatattgatgatgagcatggtcgtgaacagttccaatatgcccgcgcccgccgcgatcaggtctgtgcccgccgcctgccccgtgcccgtaaagttggtcagcgatacgagaatgggaaaccacagcggaaagccgtgctcccttgcgagcacgccgtaggcgaatgcgaccgaaacatatccgagcgcgatggggatcccgtccttgacgccgcgcatgaatttcataaatttgcctctttgtatgtaatatcttacaaattatagcataaccgcggaaaaaacgcgacaaaaatcgcgccccgcggcgaaaatttgttttccgattgtaaaaacgcggccattatggtataatttaccgaagaaggagtaaaggtatgaagacggatcggctcttgggcattctgacggtgcttttgcggcaagacaaaacgacggcgagagaactcgccgaaaagttcgaagtatccaaacgcaccatcgtgcgggacgtgcaggcgctgtgtctcgcgggtttccccgtcttgaccgaacagggcgcgggcggcggcatatcgctgatggagggtttcacgctcgacaggacgctcctgaccgccaaagaactgcgcgccgtgctgacggggctgaaaagtttggacagcgtgagcggcgacaacaagtacaggacgctcatgcagaaactgggcgcttccgcgcccgaaacgctcgccgcgggggagcacgttctcatcgatctctcttcctattataaacagtcgctcgcgcccaaaatttctctcttgcaggcggcgatggaaaattcgtatcgggtgcgcttttcctatttaaaccgcggcggggagagcgaacgcgttgtcgagccgtattatcttatctttcagtggtcttcctggtatctctacgcctattgcgaagcgcggcaaggataccgtttgtttaaactcaaccgcatggacgcactcactcttctccccgaacggttcgagccgcgcgcgcccgcgccgcccgatctgagcgcggagcgcgtattcccgaccgcgatcgaggcggaagtgctcttcgatgcgtcggcggcttggcggctatgcgaggaattcggccgcaaaagttttaccgtgcgggaggacggcagattgtacttccgtttcggattcgcggatgcggagaacctgttcacatggcttttgagcttcggcgccgcggcgacgctttgcgagccgaaagcgctccgcaatgagtttttgcggttcgtttcgggcattttgcgaaattatgaggaaagatgacatacagttgtcatctttgccgtgctataataagcgcatgaagtacgaaatcatacggacggaaacgatgcggctcgtcggatttgccgcacgcaccaacaacggcgcgcccgactgcggcgcggtcatcggctctctgtggcaaaaatattttaaggcattcggctatgcgcgagcctcttactgcgtctataccgactatgcgggcgacgaaacggacgattacaccgcctttgtgggctgcgagggcgatgccttgccctcgggcgggcgcgctgtggaaattcccgcggggctgtacgtcgccttttcgctcgcttgcacaacggagaacgcgccgcgcgccgtggcgcagttctggcaaaaactttggacgggcggattgccccgcgccttcgtcgcggatttcgaagagtacggcgcagaaggcgtgcgcgtgtttatccgcgtgaatgaggaggatctcgaaacatggcgacaaacgatcgggtcataaaacagatttgcgaggcgttcgcgcccgcgggcgtcacctgcaaaaaaatgttcggcgagtacggtttgttcgtcgacggcaaggtttttgcgctggtctgcgacgatacgctgttcgtaaagcccacgccgagcgcgcaaatgatgcttgaaggcgcgcgatgcgccccgccgtatgcgggcgcgaagcccatgcccgttctcgacgattggtcaaacagcggctttctgtgcgaactcgttgcagccgtgaaagacgaacttcccgcgcccaaaaatagaaaaaggagttgaaaatggcgttcgattataaaaaggaatataaagatctgtatatgcccaaatgtgcgcccgtgcaggcggacgtgcccgcaatggggtatttctgcgtgaggggaaaaggaaatccgaacacgtgcgaagattataaagcggcgctggaaatactttacggcctgtcgttcacggtcaaaatgagcaagatgagcggcgacacgcccgcgggctattttgaatacgtggtgccgcccctggaaggattctggtggatggaagaggacggagatcctgccgataaagataaatattgctggctttcgatgatccgccagcccgaattcgtggacgggaacgtgtttgcttgggcgaaagagcgcctttttgcaaaaaaaccgcagttggatctgtcgaaagcggaattccgcgttatccgcgagggactttgcgtgcaggcgatgcacctcggaagttacgacgacgaacccgctacatttgcgcgcatcgacgcctacattcgcgaaaacggcttggagcgcgcgggaaggtatcatcacgagatctatctgggcgatccgcgcaaaaccgcgcccgaaaaactgcgcacggtattgcgggtgcccgtacgcagaaaggagattctatgaaactgaaaagtatgctgttggcggtgcgcgatttgcaggcttccgtcgccttttataaagaggtgttcgggctgcgcgtcgtcgccgatttcggcgcaaacgtgacgctgacgggcgggctcagcctgcaaactctggatacgtgggaagcgttcatcggcaaaaagcaagtcgttttcggcggcaacgacgcggaagtgtacttcgaggaggatgatttcgacgcgtttttgaaaaaattggaaggggccgaagtccgctacgtgcatccaccgctagaacagtcctggggacagcgcaccgtgcgcctgtacgatcccgacgggcatgttttggagatcggggaaaatatgcgcgccgtctgccgccgctttgtacaacaggggatgagcgcggagcagatcgccgtccgcatggacattccagtaaaagacgtgcgcgcgctgctgcgctgaaaaattcctgccgctccgaaaacggggcggtattttttacgtaaaataagttggcaaagccgccgttttgtggtaaactgaaagaaaaacaaccggtaacccttttgaaagttacaaacagttacggatgaggcgggtatggaaaagaaacagaaacaaagacaaaaagtacgcagagaagacgtagccaaagaggcgggggtatcttccgccgccgtttcctatgtcttaaacggcaccaagcgtctttcgcccgaggtggaagagcgcgttctcgaaacggcaaagcggctcaattatctgcccaaccgcatcgcgcagtcgcttgcgggcagtaagtcgcacacgctcgcgttcatgacggcggatatcacaaacgtctatcaactcgacgtcatcaagggcatgcaggaagcagcgctcaaaaacgactatatcgtgtatatattcgatgcgttcgggaacgtcgatcggtatatcaaccatctcatcacgcgcagggtggacggtattttcgtttccgccgcgcccgattttttatcggacgaactcctttgcgaacttcgcgacgcgggaataaaagtacttgcggatttttcgcgcagcacttatcttcccgacgtttcctatatcatgtcggatatgtacgacggctttatgcaggcggtcgcctatttaaaggaactgggacacaggaatatcgggtatttaagcgcgttcgacgagtcgtgctattacgacgtgcgcctgcccgcgttcaagatcgccatgcgaaaacttttggacgcgggcgtgcccgccatcgaatacggcggctggccgtataccacctcggaggaactgggcggcagactcatggagcgcatgatggacgaacaccccgaagtgaccgcggtcattgcgacgaacgatctgatggcgatcggcgcgatgaaggctgccaaaaaccgcaataagcgcgtgcccgaagattattcggtcatcggcgtggataatatcggaaagagccggcagtgcgaaccgccgctcaccacgctcgatcagagcggcaaggcgtacggcgcgcgcattttccaaatattatacgacaacatcatgcaggatactacgggcaaatacatcgagcccatgcgccttttaaagcgcggctcgacggcgcccgtttctgacggaggcaggaaatgaacggatttcaaggcatacgggattttatgcgcgaaatggtggaaagcggcaaaatttcgggttgcgcagccgcggtttaccgccgcggggaatgtctgttccgcgaattcgtcggatacggcgacgcgaaaaaaacgatgcctctcggcaaagacagcgctttccgcctcgcctcgatgaccaagcccgtcactgcggcggcggcgctcgtctgccgccagagggggcttctgcggctggatgcgcccttatgcgaatatctgcccgaattttcgcggatgtttctcgcccgaaagacggaaaacggctttgagcgaggagaggcggcgaaaacacccgtgacgcttttgcaccttctgacgcattcttcggggctcggctcgggtcctgcgggcgattttcagtactcctctgtcaaaccgcgggaaggggatacgctcgcctcaacggtaaatcgttacgcgggcgtgtggctggatttcgagcccggatccgcgcagatgtacagtcccgtgctcgggctggatacggtggcgcgcgtcgtcgagatcgtatcgggcgagccttacggcgatttcgtgcagaaaaatatttttgcgcccctgcatatggatcatacttcctatcgtctggaagatttcgaaaagaaaaatatcgttctttcctgtgcctgtcacgacggcgtgctcgaagatttcgaaacgcttcacaatttcgatgattttcccgcaggttacacgggcggcggcgcgggattgctgtctacgttggacgactactcgaaattcgccgaaatgctgcgccgcggcacagcgggcggcggcgaaattttgacgaaagagagcgtcggtctgatgaaaaaaccctggctggacgatacgatcgaagggatgtgcgacattttcaactgggggctcggcgtacgcgccctgcgcgcgcagagcgaagcgcagccgctttcaaagggttcgttcggttggagcggcgcctacggaccgcatttttgggtagatcccgaaaaacaggtttcggcggtctacatgcacaactccctgacctacggcggcgcgggcgcgccgcacacgctccgctttgaaaaagaggtcatgaaagcgctcgaaaaataaagaaatcattgaattgtccgctgaccgcccgcatagggaacgttccctatgcgggcggtctttttattacaaaattttcacaaattattttttcataacgtattgacaaaggctctttctcatgatatactttgggtaagttatacgtgtaaacgaaaaataaaaattattaagttaccgtagtaaccaaatatttcctttttaaattagggtaccctaattttttcttgtgccattggcacaagaaaaaacattttaacggtttctcgggcggcgcggtttccgtgcggcttggaataataaaaagtaaggagtaaaggaaagtgaaaagagttctggctttgattctgactatggtcgtcggcttgggcttactgactgcctgtgcgcccgatcaggacacgtgcgatcataactggtcggaatggacggtcgtgacggaagcgacgtgcacggtggacggatcggaaaagcggacttgcagtatctgcaaaaaggaagagacccgtcctattactgcggcgcatcaatggggcgaatggaagattgtcgagccggcaacgcatgaaacgcccggactgaaagagcgcgagtgctccgtcgaccatgaaaagcagcaggaagaaattcccgcgtacggcggcgagcatgagtataagttggataaaatcatcgaaggcgactgcgttaccaaaaccgtctacgagtacaaatgttccgtttgcggcgatatcaggaaagaagagggcaacatcgttcccgataagcacgtcgggacaaaatacgactgcggtctccactgcgaattctgcggaaaagatatggaccatgccgcgacgacttgcggcgtggaagggcattttaaatgcgacgggctggatcatacccagtgcgccatcgaaaaggcctccaacatgaaactcaccgccatcgacgatggtaaagcgtggcgtctcgacggctttacctccgcgggggacaggacggaagtattcgtgcccgcctttgtagacaataaacctgtcacggagatcggagccatggcctttgaagggtatctggatgccggcgacgatgaatctgtcatcgattggctggatatggtcacctatatttacatacccgataccgtcaagacgttgggtgaatatttcgcttatgatatggacgctttggaaaccgtgcgcctgcccaaatctgtcgagaactgggaacagcatactttctttgccgtaccctctttaaagaccttgaatattccccgcggcacgacttctttgaaaggaaacgtcggttcgccttcttcggatacggaatatgctttggaaagcattactcttcccgttacgtttgccgatctgaactgtttgaaaaatttcttcctgaacagcaaagtttcggcgatcaactacgaggggagcgaggaatcctgggcggctctgcttgcgaaagtgacggattctgagtacaaagggaaactggaagaaataacgcccgtttataattataattacaataccctgtacgccgcggaaactgccgatatgcaggtgcgcctggccggtttcgcgttcgaagccgtggaaggcggctacgcgatcacgggctgcacgggtacggttacggacaccctgaccattcccgccacgctgctcggtaaacctgtcgtggcattggcgaacgacgcgctcagcggtgaaccttatggaaacgacgaagaggggacaaactccaatcctctgagcaaggtaaaaacgatcgtgttcgaggcgaaacttacaagtatcggcgattataacttctacggaatggacgcattgaccgaagtcgtattgcccgcaacggtgacgtacgtcggttcgcagtgcttctataactgtaagaatttgaccaaagtcgttatccccgacggagcgacggtagatatgagccgcgcgcccttcgcaaattgccccgcgctggtcgaaatcgaattgcccgccacgcttaaaaatcagagtgcggaaggtgcgtttgccaatgccaacgaggctttggcgatcacctttggaggaaattccaatctttggtattatttgacgagcgcggcgtctgccaatcttgcaaaagcgacaatgacgtataacggcggaaagaccatcgagcaagacggcaacggcaccgaatttatcttaaatgacgacggcgaatcttataccttggtcggcttctacgatacggtcaaagcgggcgaacctttggcgcctgtcggggcgtatacggttcctaccgagtttaacggaaagccgataacgggtatcggtgcagcggtattcaatgccaaagcatatgcaaacgaagagatcgctacctggatgaagacgatggtcgcgctgatcatcggcgtgatgacgccgaacgctgccggtgctttcgattattccgataataacgtgaagaatatcggtagtcacaattttgttgcgatggaaagcgttgcgcaacttcgcgttcccaccgaaatcgacgataccgttatggtaggctgctatatcgatatcatcggggcaaacttcattcgcgttccccgcggtgtggaaaccatgaccgattgtttccagtggtccaatgcattctttaacggcgtggctgcaagatggctcgtgttgccttcttcgataaaagagtttaacggcaacagttggacgggtaaagcaaacggattcggcgtagttatggattgcgcaaatgccgatgcgggcgctgaatttgaaaaagtaattgatgcaagccattgtacgcgcagcgattgggagggagcggtcgttccgttcttcaaaacgttctccggagcaagcttggtcgtgggtgaaggcggtgctttcaattatgatttattcttgactctcggattctaacacatgatcatcgttcaaagggggaaggtgcttttcaagaggcgtcttccctcctcgatgaacggaaatttcggaaaaaagtgtatgaagatcaaaaagatattttctctcatgacggcatttttgtgcttgttcgcgctcgtcgcgtgcggagaaaaagaggttccgccctcgccgccgcccgaagatagtttcgaacagtacagggaaatccccgtcgattataccaagatcgacgcaacgtacgaagacagcgcgctcaacttgtggttctcgcacgccttttccaaaacggcgaaaggcgatacccattctacggggcgcgatacgtataaaatctatatgggcaaaaacgaaaaggaaaattgccagttctttttgagcgccgccacggaaaaatccttttcgctcgcggcgagcgatttccgttcggaaaagggcgacatcgttcccgtttccctcttctatcagtattattttaccatgcctttcgaaaacatggagcaagaggtgcccgacgcgatccctcccgtcaaagagggcgcaacgtttaccttaaacgccaacgaatctgtcggattcgtattgcaggcgaaaacttccgcggatacgcccgcgggcgaatataccgcgacgctcgaagtattcgacggggcggggcgccagatcaagaccgccaaagtatttctgcacgtgtgggatttcgtcctatcggacgacaccgtctgccgcacggcaatgtggatcgacaaaaatactttgatggggcacgattataagacgctctacgattatctgttggataaccgcgtcaacgcttacgatcttccctatgcgctcgacgatccgcgcgtggacgaatatctcgacgatccgcgcgtcaacgctttcaatattttaggattcaagttcaataaagaatcgggcaagggcgacgaacagatcaaatccgccatgcgcgcggcgtataccaaactttccgtgaaagaggaatggaacgaaaagggctacttttatctggtggacgaacctaacccgagcgagattcagaaactggggtggatcaaaatgtacggcgagtggctggaagagtgctaccccggttaccgccaactctctccctttttcacagatcagtggtacgacaccgcaaagacgcaggactggatcgagtttttgcgtccctatatcaatatctgggttcccaagacctacgcttacacgacgctgcgcgaatacggacagatcgtgggcgggaaatgcctgtataaagaggggcaggaagcggaactcgacgcgaaattcggcagttatccgaaacgcattcaaaacatggtcgaacaggacggcgacgaggcgtggtggtacgtgacttcccaacccaccgatccctatatcacgctgaacacgaccgaacccggcgtggcgtaccgcattctgttctggcagcaaaaactgaacggcgtgagcggttttctgtattggagcgtcaattactggtcgggcgacggctggaacaaccgcgaaggcgagtggacggagggcagcaagacctacggcaacggacaactcatctatccgggcgcgaaagtgggcgaaagcggtcccgtcggatctctgcgcctcgaatcggtgcgcgacggcatcgaggattatcaggtatttaccatgctggaaaaactcgtcggtaaggaaaaagtaaacgaactgatccgccgcacgaccactcacgcggcggtctgggagcgcgacgaagatcattttgcgggcgagcgcgtgattttgggaaattatctcgaagcactctcgtcgaaagcataaaaggagaaagatacaatgaaaaaatggattgcgtttacaatggctctcgcaatgtcgctcacgctcgtcggctgcggcggcaacggcggcggcaatacgacggacgagcgcatcatgcacattgacgggcttgcggacgatctgtatcccaacctggaacgcatggacgcgtcgggcgacaacaactttgcgggttccgtcgacgtggatatcgtgttcggcaagaccaaacccggctgggaagcggtggaaaaagcctacgaaaaaattcagacgggtgtggacgtgcgcctcaacgcccattcggacggcacctatctcaacgacgtgaccaacgccgtgaacaacgccaataccgattgggatatctttcagggcaaccgcgtttccaacgtgagcagcgcggcgatcaacctttcctcgcagttgttcgacgaaaatcactatgcgggaaaggagatagacgatcccgacgtagaggagggcgcatccaaaatgtggcagagcgtgctctcgaccgacgcgtacatcaccgataagtcgggaagcaacaccgcctgttatatcatgaacagcgaatctctctccaccgcctggttcgtcaacgaaacggcgttcaaagcggcggtggaaaatggctataaaaacgaggacggaaaagcggaaatgcccgttacctgggacgatctggtcaatctttgcgccgctttgaaagaagcgggttacacaaatcccctgggccttgcgggcgacagcgcgtccgtcaacgaatcgcagtttgcctggctgttccgcgtctacggcgaccaatattaccgcgatctgtatccgaatatcaacgtacaggaaggggacgcgatctatacggattccaatttggaattcgctttcgatctcgaagatccgcagcccgaatccaatcagggttacaatcccagtcacacgcggttctggaattccctcctcgacgaaaacaacgaatacaatcaggggaaaaacatatcctacgtgggcgcgaacagcgataaattcgcttgttttctggataatctctataaaatacgcgactatctgcccgacaatttcacgaccgtgaaattcgaagaagtgcgcgattctttcatgagcgcgaccggaaaatcgtcgcccgtcgttcttctcgattacacggggttcgggctgacgttcgggacagaatcgcgcgggttcgacatcgatttcttcgattatccgtgcatgacttgcgatcacgaggaaaagcacgtgacgaccgatttcgtgcgcgacgtgggcggcaacggcggatacctttccgtgctgcgccataagagcgacgccatgcaggaaaaaatgaatattgactttttgaaattctttatgtcgccgtacggccagtccatttactacaacgccttgcagggcaacaagatcgcgcccgacggactgtccaccgtgctcgatttcgccattcccgaaacttggaaacagtttttcgagagcgataagatacagttcaacgggctgtgcgacgtgaactggtacaacaacaactttatttatcacgtaaacgggcagagcgacagccgcgaagcgcacgtgaacgtggtgcataagttatacaagacgggaaaatacgattcggcggcggatgcgatcgcggatttccagaagacctgggacgaagcggtgcgcgcgggatacaataaactgtgcgaaggcatgaattggagcaaagaactttggaaaaagcccggtaccagcccgatcgtctgacggaggactcgcaatgaaatgcaataaaaaggcattcgtgaccatgctcgtttccgcaattttagcgctcgcgctcttactgacgggcgggatccttctttcgcgcatgccgcacaacagcgtcgtcgcgtcggcggagggcaccacggtcacgaagatcgcgcgttcgtacaccgacgacggttggtattacggcgacagcgcgggcaatctcgtcaaactcagcgaagagggcgaaaaactggcggaaacggtcataaccgaggggcagggcattcgttccgttgcctccgatcccaaactggacgggttgctggtgctcgacgaagcatacgatcttttttgggtgaaagacaaggggaactcgctggaaaagcaattcatccgcgcttttcccgggggatatctctcccttgccgtggacgacgatttcgtgtatttcgccgtgcctgcctcccgttacacccgttttgccaaatacgataaaaacgatctggcgggcgagcccgtcgcgcgcggacaaatgtacacatgcgtcaagcagggcgcaaaatattcctttcagcccgtcgtttccggaacggtggtgggaatgtacgcggacgaagaccatctctttgtcgtcacgggcgaggggcagtaccaccgcatcgcaaaagatttttctttgaacgattttccctttctctctgcggacgagttaaaggatctgaacgccgaaattgcgggcgacggcaccgtgacgctcgacgcgggttcgtacgacgcggcgaaataccgcacggcgcgcaaacaactggcggcgaaatccgtatcgtacgacgaggcgaacgcccgtttttacgtggcgagcgcggacgcggaatttgcggcgctggacaaaagtttcaacgaaatagaagggtattcccataaacttcccaatacgcccgcgacgggcgcgatggcgttccaccgcgagagcggcaccgtatatatcgcctataataatatttcttcggtgaccgcgatcgatacgaacgcggggcgcgtcttgtatcaggcggacgtggcgttctatattacgaatatggcagtgccctcgggaggcaaccgcctactggtcatctgttcggggagcaaccgcgacaatcccgattacaaggaactctattccgcggatatccacacgttgagccgaaaggggacgatgaacacgttgggcattttgagcctcgtgttcggcgcactggcgctcgccgtcgcaatttttgccgcgttggcggcgttcaggaaagggtatgcggagcgctgcgtcgtaacgctcaaaggcatggcgcgcaactgggtcacgtacctgatcattctcgggtcgctcgccatgctgatattgttctgctactatccgggcatttcctccatgctgatgtcgttcttcgactatacgcgggataatccgacgatgcacttcaacaatttcgaaaattatatcgaaatattcacgaactcggataatcttcttgcctttcggaatatgctcatattccttgtgtcggatatcgtcatcgcgctcgtgccgcccgtcgtctttgcgttctgcctgtcgctgatgcgcaacaaatcgtacggcactttcgcgcggatcgtgctctttctgccctccgtgcttccgggtatcgcgacgctgctcatctggacgcgcggcatctacggggtggacggcgtgctcaatctcgtatataagatttttgcgggggaagacgcctcgtccattctgtttttacaggattacggcatcccgtcgctgatcatgatgggtttcccgttcgtgggttcctatctcatcttctacggcgcgctgatgaacgtcccgtcctcctattacgaggctgcggagttagacggctgtccgctcttgaagcggatggcgatgatcgaccttcctatgatctcttcgcagatcaaatacgtgttcattctcgcgttcattcaatccgtgcagaatttcgggcgcgttctgatgacgactgacgggcagttcgggacgaatatccccatcgtgctcatgtacaaaaaattgcaggcaggcgattacgggctttcttcggcatacgccacgctgatgttcctggtgctcatcgtcgccaccgtgttcaatatgaaaataaagaccgaggagtgtgatatttgacatgaaacgtgccagaatcaaacaatccgaccg

SEQ ID NO: 3425 - DNA, 3665 bp, Unknown
  16S sequences of unknown bacteria
attgcttctatctttatggagcaggacttggaaatagagccgagcgagggacgattgcagaataacgcggcgtacatacagtcttggaaagaagaaattagggaaaacccgaacgcgctgtttacagcgattacagacgcggacaaaatcgcaaagtacgtttcggaaagaacgcaagaatatcggcacaccaaagacgtgcagtattacgcgattatcgaggaaacgaacgcttattcggagcaggtatataaatgctgtatctgcgacgaagaaggcagagtaaaaccgcttatcaattacggctttgccgaccgcgacgcgctcgaaaaagaaattgacaaaatcaaggaactcgacctttggaaagacaagacgtttgaagaagtgagtatcgaagaactcaaagaaaaaggcgcgacgggcaaagtggagcaagagaagtcaacggaatacatacgaccttccgaacttgttgcgacggaagttgcggcgcgagcattgcccgtcagtatggacggcaggggcaaggcgagccttacgcggatgagcgaccgtgaaacgcttgaaagagcagaaaaacattttggaacggacgcaaagttttccgatctctacaatgggaaaaccgtgttgggaagcgaggaaaagagcgaatatgcgttgatgttgcgccttgccttattctgcggaaacgacgaagagcaacttcttcgcttattcaaatcgtcgggacaattccgcgacgaaaagccgaacgcttactatatgaaaatggcagaaaacggcttgaaattcattgcagacaaacggagtgctttcggcggagcgaacgaagcgggcggctttaccaaaggcaaagtcggtatcaattcaaaaagatgaagtatcaggcgaacagaagctacgtttcaaacgacgttgtaatgacgccgaaatctttggcaaaggctttggtcgaacattttcagccgaaaggaaaaggacttgagccatgcgcaggatgcggaaatatgcttcaatttttaccgaacgccgagtggtgcgagattgaaaaaggtcgtgattttttcgactatgacgggcgagtcgattacatatttactaacccgccgtggagtcagattcgtaaatttttagcgcactcgatggatgtagcaaacgaagtctacttccttattacaatcaatcatttatggacaaaagcgcggctgaaagacatcgaaaacgcaggtttccgaattgctgaaatatgcgttttcgatacgccgaagaattttccgcagagtggttttcaagtggggatgattcatttgaaaaaggggattcagggcgatataaaatacactcggataaattacgaaaataaataaaaaacagggagtaaaaaacaatgagaaacaaatttttcaaattcaacgagaactatgcaaatgtcatcaaacatctcgatgacaaacaggcagggcagtatgtaaaagcaatttcggattatgctttcgagggtaagacttacggcggcaaagacacggcggtgaaaactgcgttcacgcttaccaagcagatgatcgacgacgaaaaattttatcgcgaaaagggcaggctcggcgggcagaaaatcgcggaaagaaagagaatcgatgacggacagatcgaatccgatacgatgttgaaatcggttatcgaaacggtggttgcgagcgaacttttgaatagtcttctcggcggtcagggcgaaaatactgaagccgagaaagcgtgaccacgaataaaatcttgatgcattctgcctcaaaaacataaagcaggataaggaaaatgcaacattcggcattttcggacggtgaagcaagcgggatacccgcttcttctttgggaggtggtaactattcgaggagagagaaatacagacaagaaaacccgtaaattcataaccataacggatatgtctatgtgggaatatatcgacaaaattatgactcatccggactacgataaaagtttcaataaggtcataaattccgctttgttgttcggcttgcctatactgtataagcggctgttcgatacggtggaaatcgacggggaagaaacgcccgtaagcgttccgaacgagtataacgaggacgcgttttatttccaactgatacggcttatgaaagaaatgctcgcaaacgaagtgatcacaaaatcggtcgtatgctcgctattcaacgagcgagcggcggcattgcaagacggaaaatcagacgttgattcgctcgtgaaaggtttttatcaggacacgccggactatctcgtaaacgaggaaatacgaatgttaaaggacgtggggaggtaataagttacggacaatcaacctattattctgaatataaagtatacgccgtatgaactcggcagaaaagcaagcggacttgaaagagaagcccatagagcggaacgttcctttttcgatatgacgggcggcgagaacgtatataagtacataacgacggagggtaaagtcgcaggcaaaaagacggggaaaataaccgcgctcgaatacctgcaaaagtcaacgggcgtattcaatggcaacggacttttatcggaagaaaaagtcgcggagatgaaagaacggctgaaaaacaacaagggcaatatatggcacggtttcgtgtcgctcaataaagagcagtcgtataaaatcgacacgcccgaaaagtgtatcggtatgataaaagcgacgttcggacaattttttcaggacgcgaagttagataaaaagaatatcgacctgatgtgcgcgttgcatttagaccgccccgaccatctgcattttcatttcgtgttttgggagaaagaaccgaaatacaaaggcaaggacggagtgctttcatacaggcgcaaagggaaaatcgaaaaaacggcgatagacaatttgttcgttcggctcggaatgtatgtagacgacggcagggacaggctgtataaatcgagagtggaggcaatcagagtgcttcggggtatgacggcaatcaaaagagtaatggtaagcaaggatgaaatcaaacaagagataatctcgcttgccaaagacttgccgaaaacgggcaggcttacttacggcagtaaagatatgacggcatacaaagggcgggtagataacatagtcgcaatgttaatcggctatgacgggcaggcgcgcaaggctcacttaaagtttatacgggaactcaaacgcaaggaaatgctcataaaaagcatttgcggcaagaactttgccgtcacggataaaaatatatccgcagaggaaatcgagaagaatttttcaaaatatcacaacaagatagacgaaagcaaacttacgattttgcgggatatagaagcagattataaaaggcggcagggcaatcttgttttgaaccttgcaaaggctataaaacccgaactttgcgaaaaaccgaaatataaaaaattaaagccgaacgacaaaaagtacaaacgccgccgggcaatatcgagatacaacatacaatctcttttcggtaagtttttgcgttcttttaccgatgaaagcgaactgttggagcgggacttctcgcacaggttgcaggatattgaaaaagaaatggaagaacagcgtaaaagagaaaacggagaatacaaggaggtgaactata

SEQ ID NO: 3426 - DNA, 32759 bp, Unknown
  16S sequences of unknown bacteria
cggcatcgattctttgttaaaaggcgaactataagctaagcttaatcgtcgctttcgcttgcccaagtagtaaccgctttacaggtttccgtccaattctctttgaatgcctccgaaagagcgctccatttgaaagtgggaataaagatactctgttcctcggtccatcccgagaaggcgttgctgacgatgtagctgagattcgtaagcgtagcggactgaatgctcgtgcagccccggaagctgtttgcgtataccttttcgactgtaccgaagtcaaacgacgtaagagccgaacagccgtcgaaagccttttcccaaacaatttccataagcggacagtagactgttttgaggctcgtacatccttcgaacattccgtatgcacatctcaagttgatattcatggaaaccgattcgagagcagtacatcccgcgaacattctgacgtaactttcaaagtaataggacgaagtcgtatagtcgggattattgtaattatcggaggagccgagttcaagtttcggtgcattcactatccggagctttgtacaatttgcaaacgcttctccgtagagagatgtcaactccggcatatccgccgcaacgagtccggtatttcggaatgcgtagacatatatatttttaacgctgctgaaatcgaaggaagtgagagcggcgcagttttcgaacgcgcttccgtaaatactggatacgatgccgaatgtcgtgtcgctgagctttatacaatctttgaatgcatagttgtaaacatatttcgcattaggagcgcttacgacggtaagattctgacagtttgcgaacatactcgatccgacggactgcgacttaggcagagatacttcccgcaaagccgtacagccttcaaatatttcggtataggaggcattatagccggaagattcctgagcgccgctgtaaacgggaagagttatcttttcgattcccgcacagcctgcaaacgctctggcgttcagggtggtcactttgggaagaagcaactcgcccgtcaatcccgaaccttcgaatgcgtggtctttaatcgtggtgattgccgaaaagtcgaaagttttaagtgccgtacagccttggaacaatcccgtgttgacgttagtgacttttgccgggaaggtaacactggtaagagcggtacaatttgaaaacgtataagttccctgatagctggctgttgtggaaaggttaggcaggtcaatcgactttaatgccgtacagtcggcaaaagagtaatcggagagtctggttacgccgttgagatccaccgattgcaacgtggtgtttcctcggaacgcgtccgcgccgacaatcgtcagcccgtcgggaatctgataggaagaggcggagcctaagtatttgatgaatactttggttgtcttattgtaaatcgcatcttcggtgatcgtcgtcgcgcttccgtcccaaacgagttgtgctttgggacttccctcgaagatattttcgcctaaattaccgacggtttttaccgtcaccgccgtaagagcgggacaattggcaaacgcataatcgccgataccgtcataggcatagtaagaagtctggtaaagtttcacgttcgagaaatccaattccagcaaagaggcacatccgtcgaacgcgtgttcgccgataccttggagcacggtattgttcgtaaggtcgacgtcggcaagagccgtacacccttcgaacatataacttgcgatgtactttgccttcggcagctgtattgtttcgagcttcgtacaaccgctgaattgtcccatataagacgtacttgtaatgtaagagccgctaccgaggaatacgtcgagagtgaccttggtaagttccgtgcagtccgcaaaagcataggcggaaagagtggtcgtttttgtaagaacagccgaagttaaccccgtgcagccttggaacgcgcttgctcctatacttgtcgccaaaggcaggttcaattcgccggcaagaggcgtatcccggaatgcgcttgcggagatgttcgtaacggaagaaaaatcgaacgaagtaatttgtgtgccctcaaaagcattggcgtaaacatatttcactgtattgccggaaactgcagtaagcgattcgcagtttttaaacatacttcccgcaatacgttctcccaaaggcatatccgctttcgtaagtgccgtgcaaccgctgaattgtccgatgtaacttgtactgtaagaactggtacctacgaaggaaaggaggttgacttcttccaaagaagtacagtctttgaaacattcttttctaagttccgtaacggcatcgagtttgatggttttaagtgccgtgcatccttcgaaacaagatgtaccgatttgagttatgccgccgagttcaaccgattcgagttttgtacagccatagaaattataggtgccgagctgggacaaagaatttccgaacgtcgccttcgtgagcgaggtgcagcccgcaaagatatatccgtttgaggtgacggaagacgaagaggcgctgtttgttccgccgaataaagtcaacgaatcgggcaaagcaacttctgtcaaagaggtgcaattctcaaacgcatgccagcgaatgtcggttaattttgtaccgaaatcgacggaaacgagatttggacattccgcaaaggcatagatacgaatcgattcgacagacgaaagctcaatagaagcgagagggacggcgtagaacgcatagtcgccgacggaagcggcgctgcctgcgttgacgggagctgtgagcgcgtcgcagccgtaaaaggcgtacgatccgatttcggtcgtcttggaaatatcgaatgtcgcgtttgccgcagcgttaagagattcacatccgtaaaaagcataggcgccgatactcgtcacgttttcgagattaatcgtctgaaggagtgtgcagttataaaaagcatttgcaccgattgtttctgccgttgcgggcaaaacgatctttttcaaggtggcgttattcatgaatgcaccggcgttgatcgttttgattcccgaaggaagcgtaatttcctccgcttcgccgacatagaagataaattcttccgacgtatagatcattccgtctttggcattaacagcgctgccgtcggcggggacgagttcaaactgggtcccgttaaacgctccgagtccgatcgaacgaatagaatctatcagcaccttttgaagagaaaggcaatttctgaaagcataattcccgatgctttgaaccttactgatatccacggcgcctgtcgaaccgagttttccgcagccgttgaacgcataatttccgatagcggtgacgttattaaaattgactgtttcgagagccgtacatcctgtgaagcaataagtcggaatcgtcgtgatgttgtcgggaaaagtaattgatttcagggaggtacagttgcggaagatgtatccggtggaggtttccgaaaccggatatttgttgaaatccaaagaacttccgccaagggtttgcagcgaagccggaagaacaatatcgcgcagcgaactacagccgtcgaaagcataatagagaatatgcttcaatacgctgttttcagcgaaattgacggaactcagcgacgtacatccggtaaaagcgtcgcctccgatgagttcaagagaagcgggaagattgatcgttttaagtcctgtgcaattaaagaacgcataattgccgatcgtagttaacctcgaattttctccgaaatcaacggttgtaagatttgtgcaattgttaaagattcgatagccgagccattcgatgtttgcggaaagtttcacgcttttcagtgaggtgcagccgtcgaaaatataagaatttgtcgtgagggaaagggtgctggtataaggataagaggaccctattatacttattacggagtcgggcatagaaagcgattcaagcgccgtacagtttttgaatgcaaagttcaacaccgctttcaacgccgtcgtattttcgtttatcgtcacgtctttgagcgagatgcagttttggaaagcgtatgttcctataaaaccttctccggagccttcgccggtataggagaaggagcggagatcagcacagccgtcgaaagcgtaatttcctaccgtgatacaggatttaggcagactaatttccgtcagactctcgcaattttggaaagcatagttcccgattgtcgtaaagtttgcggaagaaccgaacgtcaccgtcgtaagattcgtgcagttttggaacatatagttactgacagccataaccccgttatacgttacctctgccagtgaagtacaattcgcaaaaacgtaggtacccgcttctttcaaagacgaggggagcgctatggaagttaacgaagaacaaccgttaaaagcgctgtttccgattgctctccatgcaggagtccaagaagcgtcctcactgccgtaattcactgtggtcaatgcctcacagccggaaaaaacaagacgtcccatcacttcgagattggaaggaagtttcaccgttttaagactcgaacagttctggaaagtatagccgccgatcatggtaagattgtcggaaagggtcgccgtttcaagactggtgcaccccatgaaagtataggtatccgtcgtgtaatatcccgcgctgctgccggtataatcctccgcaccgagcgaattaaccgtaatcggaagcgtaatttccgtaagcgccgtacagttttggaacgcacggacgccgattgacttcagctgactgttttccgcaaaggaaatcgtggcgagattgccgcaaccactgaacgcatacgcgccgattgcaaggacgttggcggggatttggattgattcgagcgccgtacagttttggaacgcataatccgaaatcgcgcatttaaagccgttttcaaatgtaacggaattcaacaaagtacagccatcgaaaatgtagggacccatttcagttaagcgagcaggcaaaacgatagattcaaggttacagcccgcaaatacgttgtcggcgatcgtaagagattccgtgccggcggcaaaagaaacttttttaagcgtcgtagtactcgcaaatgcgttcgccgaaattgttgtaaccgtagcggggatgataagttcggctgcctgcattttgggaagggcgacaacgaggatagtgttatcatagctgtatataacaccgttttcgtctttaatggattggtttgctactggaataataactgtttctatggctgtcgcgccgataatgagctctgtgagcattgtggcatccgtagattcggaaacattcaacgtcgtgagtgcatcgcagcccttgaacggttctttgcctatcgtcgtcacattagaaggcatggcaaaggattcgatatatgtgttttggaacgcgccgtctccgatcgtcgtcagtctgcaaccttccgcaaaagaaatatgaatgaagccgtttgcgtaacttgtagaagaacttgaacggtaagaatagagtgcataggcgccgatcgaagtgagccgtttcgggaatacgacgctttggagattggtacaggaaataaatgcttccgtcgaataggtatagctgtttaatgaaccgtcgctggtattgctcttattgatgggatatgcgtcggcaagataaaaatctgtttccgctgttccgtcgggagtggcttggaaaacgacgctttcaacgtttgtgcagaaacggaacgcacaaggaacgaacgtttccgcctggtatgcgatttctaccgttccttgtcttgcctgcgggcagaataccactttgctcaaccctgcggtatacaatacgccgtcgtaagaggcaaaatctccgccctcttccacattgatacgttgcaaggaggtatagtttgtgattgacgacgaagaagttccgataaagacgccgctgtatgcgtacgctccgtaggtcgaattagtcgtataggcaaatacgtcgtagccggaatagttcgtcaccttgtcgttcagccctttgggaattgcctgccccgccgccgcaatacggttgggaaggttgagttcggtcaaagaagtacagtcatagaacgccttatcgccgaaagacaaaggacgcgcggttatttcttctatttctgtcgcggtataaatctcggagagttttgtaaaagtaatatcggaaagcaaagaacaattataaaatgcctggactcctacgccgtactggaatacgccgtcgacggtatcgttgccgaccgtagtgggaatcgtaatagtcttcaacgcactgcacccgtagaacatattgtcggaaatatattgaagacgttcgggaaggatcactttggtaagggctgcgcatccatagaatgtcgactcggcaacataaagagaaaccgattccgcggcttttgccgtaggggtgaaagtaagagaggtgagtccattgcaaccgtaaaaagcttccgttccgatctttttcactgtgctgggaatgacgacggagcgaagagtcgtaatatttttgaaagccgtatcgccgatttcttccagaccttcgttcaaagtgatcgcggtgatttttgttccgtagaatgcattattcccgatcgatttcgtgcgggaaggaagcgtgatttccgaggcaagaagtgcgcagttatagaaagcgttatcgccgatggcaagagcattgccgcccgacatatcgaagatgagttcttgcaactgtgaacagccttcaaacgcgctcacaccgatgctttcgacgctcttgggaatattgatctttttaagattcgttttgccttggaatacggcgcccccgatggtgataaccgtatcgggaataacataatccccggtatagccctcagggaagtaagagatagccgttttctttttattataaagaactccgtagttatccgtggaatagtaaggactattggaatcgacccggatggtggcaagcgaggtgcatttatagaacaccgaggcgaaagacacatatccgacattttcggtgatttctatattcgtaagtcctgtgcagccgttgaataccatatcgccgaattcaagcgtgggactgatgtgactgaaatcgagattgacaagcgacgtattggcgcggaatgcattgtcctcgatcgttaagagagtggaaggaagaaggagttttgtttctttgcagccataaaaagcgtcttcgccgatacttttaacgccgcagctcttggtatattcgaaatagtactgcgtgtaagcttcgcccgtttcgctttcttctgcggaaatctggcgggatttgagcgagccttcttcctcaaaagtgatcgtttttgcgagagtacaccaatagaacgcctggttgccgatcgaaagcccgagcggggcggtagaggcttcaaagacgatttcggttactttgcggttattatagaacgccatttcgccgatggaagacataccgctgtggaatacgagcttcgtaagtccgttatagcctgaggagggctgtgtggtcgaagtcgaaatggtacccgcgaaggccctatccgcaatttttgtgatttgggtggggacgacgtattcgcccgtttttccgatcgggcaataaaggatcgtgtcgcccgttctgccgccgctcgcgttacacaatacgccgtcgatcgaggaatagtagcgataattgccccccgtgacattaatattttcaagctttgtgagtttcacgaaagcttcggagatcgtcagatccgactggctatcgtatttcgcaaactcattaagacgagcgggcagattgatcgtggtaattttcgtgcagcccgtaccgataaattcgatattcagcgtcagattatctgcagtttctccttccgcaggttccaggaaagtgatttgtgtgagtttcgagcaactgacgaacgcatactgttcgattttggtgacagatgtggaaatataaacttctgtaagtcccgacatcgatttgaatgcgttttgagggattttttgaacgcccgaaggaaccgtataggcgcccgtcgtagccaaaggaatggcgatgatgcttatactgccgtcgcggtcttttccgaccagcgtgccttcgagagaagaatatttgggctcgagagaaccctcgtcgcggacggtgaaggattggatttttgtgcagccttcaaaagacgattcgtctatggaaacgatcgtattgggaatgctgaccgtaacaagagaggtgcagcctttaaaagcgcccgtcgtaatgtccgttacgggtttgccgttgtactctttgggaatatacaggtttgtaatttgagagatgctgtcgcccgctctcacgacgtaggcgttgcccgattcgacgtattccagaccgtctacataaaaggcgtacagagtgatatcgttgtcggtatttacccacgaaccgatgctttcgcccttttcgttcgtataaggaccgacgccgtttgcggaggaacaccagcccttaaacacttttcgtccgtcggtgatgacgggaacgggcagtctgtatttcttgttgtaggtgacttccgcgctcgtcacggaatcgtcggccgcataatcgccgtaattcagagtgaccgtatagaccttcggcgcccaatacgcgtacagggtgacgtttccgttccccgcgaaatattcattctcgtattccgcgccgtttgcttccgcgccgccgggaatgttgtaccagcccgcgaaatcgtagccggctctcgtgggaggatcggggaaagtcattacgtcgcccaccgctttatacagattgccgaccgcgcttcctccgcgggaatccaaggtgatcgtataggcgtaaacttccaacgttacccactcgccggcggtttcgccgtcgaagaagcggacggaaatggtgttatagccgccctgtgtaagttcgacgaaagcggaagtggagccgtcggtgacgctgacggcggcgccgtcattgactttgacctcgtatttcgtcgcaccgatcaccgcgcgccagaaaacggtgttgcgattataagtcatgctttgatagagggcataatagcgcgcgtcgagttcgtcgctccaaagggagtcgtttgcggtattcgcggcgagagctctcacggaaatctgataatctccgccttccgtccattcgattcccgtgccttccgcagagagatcgtacgaggtgccgttcaccttgaagatttgactgccgatctgcacttcgtaggaagaggcgccttcgacggcattccagcggagggtatcgccgacgatggcgatagaggaaggggtggccaaaatggattttgtataggaataggtagtggcgtcgggggaattataaccgctcgtctttgcatagacgctcacggcgatgttccccgaatagttctttaaactgaaactcgttttgtttccgatgtcgacgggagtgccgccgtttacgctcacgacgtaactcgcggcgttttccacgccgtcccaaaggagagtgtccgtttcttcgtccagataatagcccgtcactttgccgagcatattgttatatacgaacgtcgtcgcgacggaatcggcgtatccgtacgcctttgccgtaacggtgaattgaatgccgccttcctgcattttgcagttcgcaaaattgaaagtggtcgaattgccgttgtcaaaattttcgtgaacgtggccatcgtccccgcaatcgacggttacgatatatttttcggcgttttccaccgagttgaagacgagcagggattttccgacgacggagaactgccagactctcccgagcgctttattcctgtaatatctcgtcgtagtcgcgctgccgactgtcagactgatcgtgtaatcgcccgcgggaagcgcggcgaaatcgatcgcgtaggaagtccccgccgtcgcgccgatcgtttcgtcaacggtggtgaatccctggggaccttctatgcggagcttcgcggcggaggactgtttgttccaggagatctttgtcgaactcacctcaaccatgggggcgtcggtcgagctcgtcgatgcctcccagacggcatacagggtcctgttcgcgttgaaagcggtgccttcgtcgtatgcggcggtgagcttttcgccgtcttcgtaatcgctgagccaccaacctttaaacgtatatccggtgcgggtaggctcggcaatgtcgaagagcttaccgctgatggtcgtcagcgtttccactttttcgtcgtagccgaaatcgagcgtaatcgtatattccgactgcgcttcgatggctttctcccaacaggcgtacaacgtgatgttttcgacgatcggcatggcgccgaacgcgaacagcgtcttgtgggaaggatccgtataccaaccgatgaaatgatagccgtcctttacgggatcggcgggttttgcgagcgttctgccgttccaaacaacggcagtgctcaccgcgcttccgccgtctgtatcaaaggtaacgttataattgacctttttcaaaaagcgcatcgtatcgcttccgtaggtcagcgtaagtactccgtcctcccacgtcgccgtgacgtccgaatactcgtcggaggagaaattgaaacttaaagtaccgtcgtcgttgagagtatagctccccgattccgtagtgtctttcaccatgaatgtgaaattattttccccgtttaggtaaataaaatattctccgttatcggcgtcgtaatagtaagcccccgcttcgggaccgatctccgaaaccggctttttggaacaggcgacggcgaccgtcgatgttcccagggccaacaaggcaaaagggatgattttcttccatttctttttgtctttcataattacactccttaaaagattttttatgtgtcatgggcgaaaaacagaaaaacgaggtaagggcaacgccgattacgttaaaatattttatcgctgcaaagtataagagaaaacaatcatcggcttcaataaaaatgattgtgataaaatgatgattattatatgttaataattataatcacacccattcattttgtcaattaaaatcttagcaaaaattgaaaaaattgattttgaaatcgcttttttttccgtgaaaatggaatgaaataaaaaaaacttatagatgatataagcaaaaagagggggctttgagtcaaaacgcctccaataaggaaaaaaacggaaaagacgtcggctgttcgacgttaaaaaaaggtgaaatttctcgccgtatcgctaagttttggcatgaaaaagacaaataaaaaatgtttagcataattgtataaaatattgcataaaaagaggctgccgatcgcgggcgcaaaaaaatttcagagtcaggcaaagcgtgtcgacgcaacgcgggcgcagagctttttcggcaagttttgcgtcaaattgttcccgctcttcgggcgaagaggcactgatactctctcccggctccttgcccggcgaaaatcgctctctgttctctttgattttgtctgtgtgcgccgataaaaaaagaaacgttcccgtccgtaaagacggggcgtttctatttaagcggtcgggaaattgtcgcgcgggtaaaacgtatttctaaaaacgcgtcttgtccgcgcaaaaagaggaatttctgaatttttcgattaggggcggtggcggcgcgtttctatgtcgtttctcggtcttgcgccgcttttcaatacaaactcattcggaaagttcgatgctccaagtcgtctgatagacgccgcccgccctgagatggttcatgtccgctttgttttccaaagcgtcgatttttccgtccgtcgcaggcagagccgaccacggttccacgcagacaaagggcgcgtccgtcttgggcgtgtgccagattccgagatatttaaaatcgggataacgcaaggtgacggagcgggaatccgccttgtttttcaaagaaacgctgcggcaggtatttcccaaaatgacggcgtcgttatcgaacaactcgtgctgcaagggcaggcgcgtgccgttcgtgagaggcagcgggagcgtttctcccgtcatgaactttttttccgacagcgtatgcagagcgactctcgtctgctcggtaaattcgagataatagttttcaaagtttccgtgcgcgaaaggaacgttaaaaccgggatgaccgccgagcgcgaaaataagttccttctcgtcggtgttttccactttgtaggtgatttccagttttgcgcctttgatttcgtaagagatggtaaaaacaaagcggaagggataggctttcagcgagtcctcgtcttccgtaaggcgaaacacgagttttgtcgcggtgcggtcggcgagctggaaggaacgatagcgcgctatgccgtggcagagtagagaatagttgttgcccgcataggtataggtgtttttatacattctcccgatgatggggaagaggttatatgccctgcccgaccaataggcggcatctccctgccagagatattccgtttccgtcgtcttggaatagaccgactgcaattgtgcgcccgaagtgtccgccgctattttcaggactttgttttcaatggtgtaaagcatctttttctcctttcgcaaaatcttttttattattttatcataaaccggcgcttttgtaaagggacggaaattaaattttttataaaaaacggacggaattttccgcccgttttcgcattccgcgttctcgactttcccaaacgtctgctcccgaacgtataagaagagaggaaacgcttgcgttttatcggattgaagacttagggacggttttgtccttcgccggaaagcgacgttttttcttccgcgttctgccgccggcgcctttttcgccaggcgagaaagccgtatacgtcgttgatgagaaaaacgacgaacgtaatgagggtgggcagggaggaaacgccgtaatgatagacccgcagcccccataaaatcaacagaatgatatcgttgacgatgaaacaaacggcataatattcgctgcgacgaagcatgagataggcggcggatacgctcgatacgagggaaatcgtgctgacgatgagttcgtctgtgcccagcgctttcagcagaaaataaaaagcgacggtaacgatgcagtccgccattcccaggaggagatattcccgcgcgcgaagggagttgattctcacttccgcagattcgggatcgcggcggtggcgtatccaggatacgatacaggcgacgtgaatgggaatcatcaggaacagatatatgagcatttcgccgtaatacctcgattgataggataccacggaataaaagacggcaaaaacgatgctcagatattgcgcgacgggattgcctttcgccgtgaaaattacgcagacgattccgaaaacggaggataaaagcgaccagggatttttctccttgccgagaaaaaatatcgtcgcggtggcggcaaggcttatggaaaggagcagaatttcaaacagattccattttccgaaaaattttcggacggcggaacgaaaggcggcgttttttgccgcgggagcgtgattcataaaaacccttcttttgcaaagactaccaaagagaaaaaagtatattacaatcggtttcgatattgcgattgcaacgtttttcattgtatcatatccgggagaaaaaggcaagtaaaagtccgtttgaaggtaaaaacgaggagttgtaaaaaataagttacacttgtaacaaagaaaagacttatttattacgattttgttacaaaataatgcggttttttttacaagcaaggcttatgatataggcacaaagcaacaaggagataaaaaattatgaaatcgagaaaattcatggcggttgcaatggcggcaatctcaatcggtacgatggcggcgtttgcttcctgcggcggcaacgacaattcgggttcgtcagagaaaaagagcttgaacatcacgggcagttcgtccgtttcccctttgatggggaagcttgcggacgcctataaaaaggaacacggcgacgttaaaattacggttacgaccagcgactcgggtacgggcgtcaaagacgcgcagagcggactcaacgatttcggtatggcttcccgcaacttgaagacttccgaaacgggcgtcgtcagcaagcagatcgccacggacggcatcgcgctcatcgtaaacaaagaatccgccgtagcgaacgtgacgtccgaagaagtttacgaactctatgcgaacgggactgccattcagtccgccatcaccgcgggcatcacccgcgaatcgggctcgggcacgagagatgctttcggggaactcattaaaaattccgaggggaatactttaaaagccctgacgacgcttgcgagcgtcattacccagcagggaagcaccgacgccgtcaagacttcgattgcgggaaatgtgaatcagatgggatatatttccctcggctccatggacaacacggtaaaggctcttcaattcaagggcgtggacgccacggtagccaacgtcaaaaacggtacctatgaactttcccgtcctttcaatatcgtctatcagtccgaggataaactcagcgacgttgccaaagcgtttatcgagtatatcatgagcgcggacgggcagaaaatcgtcgaagaggaaggatatatcacggttgcgtaagcaaaaggggccgatacggctcggcaaattatttccgcttaaacggtaggcgtcatgaaaaaatttttatcacagggcaggaaggaggcggcgattgcccccgcttcgcgccaatccaacgaatcgaatacggaaaaatcggcaaaggtactcttctttgtctgcgccgcgttttccattgtcgccgtctttacgatcgtcttttaccttttgtatgtcagcattcccgtctttcgggaagtaggtctgtttaatttcctgttcaaacggatttgggcgggaagccactggtcggacggcctgcttccttccgaggacgctttcggcatcttccccgcgatcgtttcttctgtcgtcgtcaccgcgggcgccgtgctgatcggcggctttttaggcgtctgcgcggcgatcttcatggtccattattgtctgaaaaaaataaaggggatttacgtacagctcatcaatctcctggcggggattccctccatcgtctacggcttcgtcggattacaggtgcttgttcccctgctgcaaaaaatatccggcgcgcagtcgggaatgggacctctcgccgccgttctcgtgctctccatgatgatcctgcccaccgtcgcctccatctccaaaaacagcatcgaagcgatccccaaagaatattacgaaggcgcgctggcgatggggaatacgaaagcgcaggcggtgttcaaagtctgcgttcccgccgccagaaaggggatcttttcctcgctgattctcggcgtcggaagagccgtaggcgaaacgatggctgtccagatggtcatcggcaattccctcaattggttccccacggggccttttcagggcgtgtgcacgctcacgacgctcatcgtttccgaaatgccctattccgcgggcttgtggaatcaggcgctgcttgcggtcggcttcatattgctttgcttcatcctgctcatcaatgtggcattgggactcatgcagagggagaaaaaaggcggcgattcgctcttttccaaaagactgaaagaacggacggaggcgagaaggacaccctatgaatttcgccaaggcggagccgttcaggagggctttaaatacgtctgtatttctttggcgtatgccgtcatcgcggtgctcggcgtcatggtaatctttatcacggtgaaaggcattcccaatctgacttggaattttatgttcggcacagccacgaattccaacgcgacgctgaaatccgccttcgtttccacggcgatgacgatcggcatgacgctgctgatcgcgctgccgatagggatcggagccgccatttttctcaacgaatactccaagaagggaagcaaactgatcaaatgtatccgcctctttatcgatacgctctcgggaatcccgtccatcgttttcggcctcttcgggatggtattcttcgtggaaattttaaaagtgcgctgcattttggcgggggcgctgacgatggtgctgatcattctgcccaccatcatccgctccacggaagagagcttgcgggaggtgtccgacagtatgcgcgaagcgtcgctcgcgctcggcgcttcgaaagtgaggacgattttcaagatcgtgctgccctccgctttgagcggcatcgtcacttcggtgattttgagcgtaggcagaatcgtaggcgaatcggcggctttgatctatacggcgggcgccacgtacttgcagccggacggatatttgtcgccggggtctacgtttgccgtactcatgtataatctgtccagctcgggcattaccgacgaattcgggcagacgagccttcaaaaaacctatgccaccgcgttcgttcttctcgttatcgtcgtatgcctcaacttattggtcaccttattggaaaagaaaatcaagaggaagatgtcgggcgattcgaaagtcgaaaaacacagcaagccgaaagcgaaagaaaaagaggaagcgggcgaagaaacgacggcgcccgcggaagcgaaagcgacgattttttcgggccgcgcaacggacacggcgagcggcgggaggagtgagagaatttacagaggaaaggaagggaaacagacgatatgaaaacgatcgacaaatttatattcggcaaccatgtcgccatcgagatcagggaaatgaatcttttttacggggattttcaggcgttgaaaaatatcgatatgaccatccccgaaaaacagataacggcgatgataggtccctcgggctgcggcaaatccactctcttgaaatctctcaatcgcatgaacgatctggtcgaggggtgtaaagtggaaggagtcatccagatcggcggacaaaacatctatgaaaagagcctgaatctcgccatgctccgcaaaaacgtcggcatggtgttccagcggcccaatcccttcgccatgagcgtttacgacaacgtggcgtacggtccgagaacgttcggcattcggagaaagtccgatctcgacggcatcgtggaaaattccctcaaaggcgcggcgatgtggaacgaactcaaagaccgtttgggcaaatccgcgctcggtctttccggcggacagcagcagcgcctttgcatcgcgcgggcgctcgccgtcgagccgcagatcctcctgatggacgaacccacttccgcgctcgatcccatctcgacggggaagatagaggaactgtgcaccgaattaaagaaaaattttaccatcgtcatggtaacgcacaatatgcagcaggcggcgcgcatttccgataagacggcgtttttcctcctgggagaaatggtggaaatgggcggtacgcagcaaatattctccgttcccaaagacaagaggacggaggactatatcacggggagattcggctgatactatgcgcacgacttatttaagcgagttaaaagaactgaaaatgaatatgttgcagatggggtccgacatcgaagacgccatcaaaaacaccatgaaagccctccgcacggacgatcttatcatggcgcaggaagtcatcaacaaggactgcatcatcgacgatgcggaacgcaccatcgaaaatctgtgtttgaaactgctcctcacgcagcagcccgtggctaccgatatgcgcatgatctcctccgctttgaagatgataacggacatggaaaggatcggcgattttgcggcggacatcgcggaaattatcacgaagggaggacggacgggaacctcttacaatatcgacttcgtggacagaatgggggaagcggtgatccgcatggtggacagcgccgtgctttccttcacgaatacggatttggacctcgccaaacaggtctgcaaggcggacgacgaagtggacggcttgttcaacggcgccaaaaacgctctcttcgactgcatcagaaaggacgaacaattcgccgaacgcgccctcgatttgatgctggtttccaaatatctcgaaaggatcggcgaccacgctaccaatatagcggaatgggtgattttttccatcacgggagttcatgtcaataccgagaacggatattgataacctgttatcgataaaaaacgcaaaattcgatatttttttgaaatttttacaattttattacaactttgaggtgacattcgccgcgaggtattatataattaaaaaggtaaaaggaaagagttgtataatacgggtgtaatgtttttacaagggagtaataatggattacgtatattcggtgattaagattctcgcgggctgcggggcttttctcctcggcttcaagctgctttcggacaacatggaaaagttggcgggcaacagtttgaagtctttgttcaacaagacttccgagaagaagctggtgggcgtgggaatgggcgccgtgacgacggcggtcgtgcagagttccgccgtgacgacggtcatggtggtcggcttcgtcaacgcggggatcatgtcattgaatcaggctgcggctgtcattatgggcgccaatatcggcaccacgatcaccgcgcagatcgtcgccttgcaggcattggacattcagacttttttcatggcgctcgcctttatcggcatggcgctcgaaatgttttccaaaaacgataaggtaaagatctgcgggcttgcgctggcggggctggggcttgtcttcatagggctcagcgtcatgtcgggcgagatggtgtattataaggacgacgtcaacgtgcagcgctttttgacggcgatcgaaaatccctttttattgctcgcgttcggcatcgtgctcaccgccctggtgcagtcgtccagcgccgtgacctcggtgatcatcaccatggccgcgaacaaactcgtcatcggcgggggcggaaacgccgtgttatatatcattttaggctcgaatatcggcacctgcgtcaccgcgctgatttcctccatcgggacgagcgtcaacgcgcgccgcgcgagtatcgtgcatctgctcttcaacgtgttcggcgtgttcatcttcatggtgctgctcttgtgctggccaaatttccaggatatgacgttcgggagatggttttcctccgaagccacgcagatcgccatgttccatacggcgttcaacaccatctgcacccttttgttcctgccttttacgaaaggcctggtcaggatggctaccttcctcgttcccgacaagaaggtcaaagcgcctgtcgagggcgagatcacgttcatggataaacgtttcctctcgacgcccgcgctcgccatcaatcagttgacgaaggaaacgttccgtatggcggatatggcgatggagagtttgcagacggcgttcgacggttttgtggagcgggacctttccgccgtggacaaggtgcttgcttcaaacgagagcatttcccgattgagcgagcagatcagcgattatctcgtgcagatttccgcaagcgggatctctcttggcgacgagaagctggtttccgccctccataacgacgtgggggacatcgtgcgtatcgccgaacttgccgataatctcaccaaatatacgcgcaaagaggtcaacgacagtctggtcttttcttcggtggtgggagaaaagatcgccgccatgtacgatctgctgcgcaagcagtacgatttggtcaagcggatttccctcgaaaaggattacgcgctgatggcggattcggacaaggtggaggacgagatagacaatatgcgcagggatctgatcgcggaccacatcgcgcggatggggcggggagaatgtcggcccgaaaacaacgccgtgtttatcaatttggtttctaatctggaacgtatcggagatcacctcaattatatcgcgcacagtaccgacaatatctgaaacgttcccgtcggagggagtattccccgaggtaaataattatgaaaggtaccatttacgttctggaagacgacagcagcatcgcgggactcatcaaattctcgctggaaagggagcagctcacctgccgcgctttcggcagtattcaggagtttaggaacggcttgaaggaaaaatcgcccgacgtggcgcttctcgacatcatgctgccggacggcagcggtctggaagtgctgaaattcgtcaaggagcggtatcccagcgtctgctgcatcatgctcagcgctctggggcaggaaggcgacaaggtgacggggttgaatctgggggcggacgattatatcgcaaagcccttcggcgtcatggaactcgtggcgcgggtgcacgcggcgctccgccgtcaggcgggcagcaacgtcatcaaaataggggatttggaactgaacagcgacacgatgagcgtgacgctggaaggacgcccgctcgaactcaacaaaaaggaattcgagcttttgaaatattgtatgcgcaacgccgacattgttctttcgcgcgacgccctgctcaccgagatatggggatacgtcgatacggaaacgaggacgctcgataatcatatcgcccgtttgagaaaaatgggaatagataatttcgaaacggtattcggggtaggatacagatttaaaaagcgataagagttccgaacgggtagggcaggtgtgcgtctatccgttttttatcggaaaaattccttcgcggaacacggggggacaagaaaaaatgcgtaaaaaaatattgtggatttctcagctgatcatggcggtggtgctgctgatttatgcggtgctttccacgcaggtgttttacaacaatttaatcgcgggcacggagaagaatctgaaagtatatatgaacctgtttgacatcaaggaatatacgctcgacgaagagggcgcggatcgtttttccgcagagctttcggggcttcgcgtcaccttcttgaatgtcggcggggacgtgctggcggacagcgaaaaagaggaattgggcaatcatgcggacagggaggaagttcgcctcgcgctctcgcagggcgagggctattctgtgcgccgcagcagctccctgggcgaaaatatgatctattattgccgtaagatctccgcggcggacgggacggattatctcgtgcgcatttcggtgctcacctcttcggaatggcgggtattcaaagaaaatctgcccacgctcgcctggtttctgctgctggatttcctcatctgccttttgtttacctatatggaaacggagtatatcatcagtcccgtgcgcaaattggcgaaagacgcctccctcaatctgaaaatctccacgaaatattccgagttgcagccgatcgcggatattctcaacaggcgcaaccgcgaagtcaccgagcaatttgccgagctttcggaagaaaaggcgctcgtggaacgcgcccagcgctccaaaaacgactttatcgccaatatcacgcacgaaatgaatacgccgctcacctccatccgcggatattcggagcttctcgccggcggcgcgctcaacgaggagcagacaaagaccgccgcggcgacgctggtgaagcagagcgacagactttccaaactcatcgcctgcatcatcaattacaatgaaatagacaacgacgagcttcccgcgtacgaggtaaacgtttcccggttggcggcggaaacgctcgacgtgctggcgccggagatttcacagcgcggcatcgtcttatccgagaaaatcgagccggacattgtggtgatgagccgccacgagcggctcgccgaggtgctggggaatctcatccgcaacgcggtgcgttacaataaggagggcggcagccttttcgtgggcgtcgggcgcactgaggacgggcatccccgcctgacggtcgcggatacggggataggcatcgcggaagaaaatctcgaacgcattttcgaccgtttttttacggtggataaatcgcacagcggcaaaaacggcggcttcggactggggcttgccgtcgtgaagaagatctgccgcaaggcgggatggcagttagaggtgaaaagcaagctcggggaaggaacgacgtttacggtcgatttccgttaaaggagaatttcaaaaatcgggaaaaacaaagacgggaaaaaaggcgggtggggatgcccgtcttttttgcatacaaaatgcaaatcgcaaaaatccgaagtcgtaattttaaatccaaaaaacagagctgcctatgacgggatacggcaacgccgccgacatctattgggcggatttgtgtaaacaaaacaggcgtgaaaaagaggagccgcaaaagacaaccgctccttttttatgcctcgcaacgaaattttttcttttttttaacaaaaacgacatggaatgtattttgttttaacaaagtcggcagttaaaatatagatacaaaaattcaacaaatcgttcggcaggcgatttttttttcgggaggaagatcatgaagaaacaagtgttgctggcattgtcgttatcgctgtgtcttttgctcgccgcgtgcggcgaagcgggaaattcgtcggggagcggaagctcggcggacaacgggcattctgccgacggaagttctccgtccgacagctcgtttgatccgtgggacaatatgggcgggggcggcacggcggaatccgtcggcgcttctaaggtgagcgtcgcggactacgcgcccgactcttatatcgtcgtttccgacgagcagaaggcggtcggcgcggaaaacgcgacggcggtggatttatcctcgctttccgatgctaccgcgcccgcggggacctcgtttcagaaaaataaactcaccgtttcttccgccggcgtttacgttctgacgggaaagttaaacggctgtataagcgtcgaaggcgtggacggcacggtgcgtctgattttaaacggcgcggaaatttccacgacggcggaacagacgagcgcggcgatcgtgtttaaacaaacggattccttgcgcattctcacggtggcggaggggacgacgaacacgctttcggacagcgcgggcgatacggacgcggacggggacggcgccgcggtacaggccaagaagtgctccctcaccgtcaacggcggcggtaggttgctcttaaagggagtcggggagagcgccgcggggcttaaagttaaaaagcaactgaccattctcgatacgacgctggaaattcaggcggtcaagaacgggatcaaggcggataaaaaaatactcgtcttcggcgcggacgtcaccgtttcggcgggcaacgacggcgtcaagacggacatggaggcatcgagcgcggaggaagccgccgagtatgccgccgatccggaagcaggatatatctatgtggaaaattcctctttcgacatcacggcgggcgacgacggcttttcggcaaataacggcatttattttgccaatcgcgacgaggataccgtgaaaatacaatcgggcggcggcgctccttcccaagttaccgaatcgtcgtccgataacgcgagcggaaagggcatcaagacggacggaatcacgctggtcgagggggaatccgaaacggagatttccgcctcgtacgaagaaaattacagcctcgtcgtcacgggcgggaattttcagctcgactgcaacgacgacgcgctccattcaaacgggaaccttctgattgcgggcggcgtttttgcgatagccacgggcgacgacggcatacacgcggattatctgacgaagatcaccgacggggaaattgcgatcgatcaaagctatgagggagtcgaaggcgcgggcgtggagatctgcggcggaaaaatttttatcaccgccgttgacgacggcatcaacgcggcgaacgccgatttgaaaaattacgatttttatctctatatcgggggcggaaacgtttttgtcgacgcggagggggacggcatcgacagcaacggaacggtgacgatcgagggcggcaaaaccgtcgtatatggtcccacggggcgcgatgacggctctctcgattcggagaaaggggtgctcgtaaacggcggagaactggtcgccgtcggttcggtcggcatggtcgaaaatcccgcttccaattccgcgcagtgttatttgagcatccacctttcctcggcgcaggccgcgggaactcagatagccgtatacgacgcggacggaaacgagctgctctctctggcgccgggtaagacgtatcaatcggtgatcgtcagcctttcctccttcgaaaaaggaaagacgtatacggtgacgataggagaaacggcgtatacggctacgctcaattctgtcggcaccgcgctgggaagcaatcagcacggcggcggcaatcagggatttaatcccgattggggcggcggaaagtcgggcaggtaaacagtcgaaaaagagagcctctgcggggaaaaagatttccgcggaggtttttttatgtccggaaataaaaaattctatgattctcagacaaaatcgcggtcttcgttattgctttttttgtcgggataaggtagaataatagccgtaaagcgcattacgaatatcataaaaggaaattttgagagcgatggagaaacagacgataggcggttttttggctaccctccgaaaagccaacgggtatactcagcaggaggtggcggaaaagatcggcgtatccaataagacgctgtcgagttgggaaacggacaaaacctgtcccgatctgacccttatccccgttttggcggatttatacggcgtcacttccgacgagatcctccgcgcggggcgcaggcgttcggaaacggcggaaaaagaacaagctcccgaggagcgggcggcgctgaacgaaaaaaatatccgcgccgtgctcaaaaaacaaagccgctctttcagaaacagaaattatgtcctgcgcggcgtttccgtcgccgtgtggatcctgttggcggcagcggtcttgttttggctgtacgtaagcatggcggcggcaatcgtgttcgcggtgctgtttggagcgggaatggtgacgctgatcattcttctgcatatcttttcggacaacgtcctgggtttcgtttcggacagcggagaaaacggggagaagatagaggacgtcgcggcgtataaattggacgtttatagggaacggtacagaacgatcgcggctttctctcttcccttcggtatcattcccgtggggcttacggtggtttgctgggtggcctggatcgcgggaggatgggattccgtttccggaatactggctctgcttgcgattctgggaatctggatcaccgccctcgccgcgttcggcatatttcgggcgtaccgaaaccgaatcgaaaaatatcttctgagcgaaaaggagaagagcctcttttcattccatggaaaactgttgaaaaagtgtatgatttcgggcgcttgggcgagcgcggtcgtcgccgttttgttcgtgatggtttccgctttcccgtcgctttttatctggcgcgacgagctgtattccgcggagaaagaggactttcgccgttacgtgcagacggtggagcttccgacgggatatcactatccttccgagatgccgaaaggagaatattatttcgatatagcggccgccgtaaaagaactcagcgagaacaacaaaaagacggaaatcgaattggaaaacggcttttttctgagcggaacggccgccgaacgcaattcgcaagacggacttatgacctatgaaaatttatctttgtgttggaaggacgagaaggattcgcaggtggagatggattactatatcgtacaaaatatcgtatatgccgaaaaagccgacgcctttttgctgcgttatgcaagttatgaagcgtccgatctcttcgtcagggagaaaaagggcgtgtatacggtaggtacgcaaacgacgctggcgagaggtctgagaatggcgatttgctttttgggatttttgcccgtgcctgtctgtttttccgtatactgtataaagcgcagaagataagcttttgcggcggcgaacggcgaaattccgagtttttatctcttcgccgtgggggaaaattgaccggcgatcttttccgtaacgcagaaaatccgacttctttgcgcggcgtccgcgacatttcgggaaaagagaatcagggaaacgcgacggtaagacggaatacccatgggcgagagaattgtaaaagcacggccgaaagccgtgctttgttttatataaatcgaacggatcagtttcctccgttcccgctgttgtcgccgatccccggaatcgtgatcatgatgccgctgtcccccgtgacgacctggggcagcttgccgtcccatttggagatatattcgatgtatttcatgtattcggcgatatccgcgcccgtgtgcgtttcgtcgtaaacaatcgtgtagacggtttcggtggtttcgccttcggcgtctttcacggtttgggtcgtttcgttgactgtgtagccgagcatacgcgcgatctccacgcttttgagcatgatgccttttgcctcggctttcgcggcggctacctgagcgtccgcttccgcctgcgcttttgcaaggagggctttcgcctcttgttccgcgacgtaaagggctgtttccgccttctctctttctttctcattctcgtattccgcctgcaatttttcctgctgcgccatcatttttgcttccacggcggcctcgaaggcgtcggagaaagtaatgtccgtgaggacggcgctgttgaatgtgacgtaatatttatcgccgatagcgtcggagatggttttttccacggaaggggaaatggtgtttctctgttcgatcagtttttccgcctggtacttggaaagctcggctttcgtgcgttcgatggcgacgctttgaatgcggttggtgagcgcttccaagccgccgtaattgagcgctatttccttgacgttatcctggcggatctgaaactgcacggtcatggaaatttccatgggctggctgtcggaagtataggcggaagtggtaatttccaattgctgtactttggcgtcgtatttttcataactccgggtcagccaaaaatcaaaataggtacccggaagctccgtgctgacgatgacgccgagttctttgacgacggcgatttctcctgcgtttacggtgtggaaggatcccgggatcatcaccagcagcagtccgcccgccgcgatcatgggaatggagagagcgataggcgctccccgtctgcccgttctcttttttctctgaacgcgggcgtggataagaagcgccagccccaacgcaatgagggcgagaaaaagtacggctgtaatgaatgcgaaaatcatagttctttactccttgtaatatgataatagaaaacaaataaaataaaagggacaaagaccggtcgggaagaaacgctttccttcgggaggggacaaggggcgcaggcgcaaaaaaagacccataccccgcacaaaatatgcacgacgcatgagtctcattttttaaaaaccacccggacggctttatggcgccgtcgattgacgggtttcgttacgtttgccctgcgcttttccgcgccggggcagccgcaaattactccctcagcctgtcgcccccaaaagggacagacattttcttctattaatattattatagcacgatttttttattttgtcaataggtttggccgcaattttttgtgaaatcgtatgcggcggtaagggggcttgcaggtaaaaaactttttacaactttattacaaatgtttttttgttttctttggcaaacgtttggattttttttgggaatatgttacaataattttacgtataagatacaagataaggacaagtgtaaaataaagatgtaaccgataggtaatgaatttgtcggttgcgggaagcagacgggagaaagaggaatccatcagatatgacattatcccagtttattcagcagctctctacgacgccggcgctttgggtgacggcgctcctgacgctcggcgtcatcctcgtcaacggctggacggacgcgcccaacgccatcgccacctgcgtggcgacccgtgcgatgaagcctcgcctcgccatcgccatggcggcggtgtgcaactttctcggcgtgctcgtcatgacgctgttgtcaccgaaagtggcggaaacgatatataatatggtagacttcggtcccgacgcgcgggaggcgttgattgcgctttgcgccgccatgtttgccatcgtcgtatgggcggtgctcgcctgggcgttcggaatccccacgagcgaaagccacgcgctcatcgcgggactcaccggttccgccatcgccatgcacggaaatctgagcggcgtcaacggcgcggagtgggcgaaagtgctcttcggactcgtgttttccctcgccatcggatttgcgctcgggtatttggtgacgaaactcattcaaaatatctgccgcaacatgaattatcgcaaagcaaataaatttttcgataaggggcaggtggtcgccgccgcgggaacggcgtttatgcacggcgcgcaggacggtcagaaattcatgggcgtattcctgctcgggctggcgctcgcacagggcagcacctccatgggggcggtcagcgtacccgtttggctgatggtcgtctgttccctcgtcatggcgttcggcacctcgataggaggcatgaaaatcatcaagtccgtcggcatggatatggtgaaacttgaaaaatatcagggctttgcggcggatatttccgcgacggcaggacttttggtctgttccatgacgggaatgcccgtttccactacgcacgcgaaaacgacggcgatcatgggcgtgggagcggcgaagcgggtccgttcggtgaattggggcgtggcgagggaaatggtgctcacttggatcctcacctttccgggctgcggactgatcggctttctgatgactaaactgttcatctttattttctgaaaaatcaagcgggagattgcatatgaaaaccaaaaagaaaaattttgattacttcgaaagcctcgtcaatatgtccgtttacgccttagaagaagcaaatcttctcaaatccattttcgtcgatttcaaacccgaggaattggaagaacagcgttcccgtatgcacgatctggaacataggtgcgacatggaaaaacacgacctgacgacggcgctcgtcaaagaatttttgccgcccgtcgacagggacgatctgttccgcctttcgcacgtcacggataatctcaccgacagcgtagagagcgtagtcgcctttctctatatggcggatatcaagtcccttcgcgcggatgcggtcgcgtttgcggagctgatcatcgaatgctgcgagaacgcggtcagacttttaaaggagttccgcaattttaaaaagtcggaaaaactcaaagatatcgtcatcaccttgaacgatttggaagaaaagggcgacagattgtatgcggaagcggtgcgccgactgtcgcgggaagcgcagacgacgcgcgaggtcatcgaatggcgggatatttataggaatttcgaaaactgtttcgacgccgcggaatcgatcgcggacaacatcgaatcggtggtgatgaaaaatacctgacgatggacgtattttaaacgaaaagagcctgtttgcaactgtttgcagagaggctcttttttggtaagaaagggggcaggtatgtgttgaaatactattttagaaaactcattcgaaatacgcgcagggcgcgtccgcctttacgcgttcgagattgttttctttgattctgtccgtaaaagagagggggaggggtctgcggcgcaaacgttcggtgaattttgcggaaaaggcgataaagataaaataaatatagggcatcccgagattggtttcgagcagcgaattgacgaccagcgtcatcaattttgccgagaagctttcgaagcctgcgctgcggatgccgcctaaaagcagagccgcttcccagccgaactgcacgaggatgccgatggcgagcagccaggggatatttacccgttccgctttatcctttctggtgatattccacgcgatcagtcctaagtatcccgcaaagagaataagcgccatatatccgtggtaggcgcccgtcgtgcgctgaatgacgacgggattgccgccctgtccgaaggtttctgtaatcagcggacagcaaatccaccagcttaaaatgagaagcgaccattcgaagagatttttgtctttggagatccaaagccatatccatacgaaattggtgaatccataactcatcgacatccataacagtacccaaaaaagactatatccctcggagatctcgcgggaatgacagaggagatgaaagatgccgtaatcgacaagcatatagacgattccgaagataagccctaccatggtggccgcatatttctttttgatgacgagcagcgcggcaaatacgacgagaaacacgatgtccagccagatatagagcggatcgaattgtcggcgcgcgatgatttcaggcatgattgtatactccttacagaaaaggtattttttggattcgtaaggattataccatatattttcagattgtcaagagatcgcagccgttttttatcggtttatttaaaaaaacgttagggtcaggaggcggcgccaatttctcccgcccacttgaatgcgtattttgcgacgatgacggcgatgatctcgttgatgatggccgccgcgacgatcgtccccgaaacgacggccgcgagggaaggatctattccagtcaaagtttctacggcaattcccgtaaataccagcgatacgcccgagtggggcagaagcgtgagccccaggtatttcgttacggttttttccgctttcgtaattttaccgcccacataggcgccgccgatttttccgcccgccctcgacaggatatagacgagcgtaaatactcccgcgcccgcgatcagacggtaattcagcggcaaaccgagattgacgatcacgatgatcagcgagagatttaaaagcggcctgtaaagacggagtattttttctaatttttcttctttgagaagattggccgccgtcgcgctgaacgacataccgatcagaagataattgaggctgaacgaatgatagagataataatccgtcagcaatccgaccgctgtggaaagacataatccgacgatcagcacggcgaagcaaacgcgcgcgtctttgagtttgcggaggagtaaggccgttaagccacctgttcctatgccgatcgcgaacggcagaatcaccatgccgacgacggacaaaacggacgcggactgactgcccttggtcgcgctgatcacggagataacggtaaagaatacgacgacgccgattacgtcgtcgatcgccgcaagggggatcagcgtgtcggtgaccggacctttcgtgcggtattcgttaacgatagacaaagcgggggcaggggcggtggctaaggcgattcctccgaaaataaaggcgacgtatacgggaatatccgcgattaaaaaagcgacggcgaaaacgagcgaaacgaataaaaacgttccgatcgattggaaaaaggtgattccgatgatctgttttcccgaacctgcgatctttttaaagataatttcccgtccgatcattacgcccgcgaaacattcaaaaactttcacgaaaattttataccataaagcgttcgtaatttctaacgtgacgatttccgtaaggtaaggaccgaatacgatgcccgtgatcagccagcccaaaatggcggggagtttaaattttgcaacgatttttccgacgattatcgctatgcagatgacggcgaatacccgcagaatttgtatgatcataacatcgcctccaactttttgatgactcttttgggaggaacgagggagaaacacagcttttcaaaggttccgtccacaatgatttttacgacctctttttcttcttgcgtaccgattagcgcgttctccataatcgcccagatttgcctttgtttctcttcgacaaaagactgaatggccgcgttcagtgcgtatttattaaagagctcttttcttgtcatatacttcgaacgataataaacgaacagcaactgataaagtttatcgacatcgtcggattttgatatagaatccgctttcgccaacgcatccttgtagtattcttcataaatcgcccgcgcaaggtcttctttggtgggaaaatatttataaacggtctttttggaaattttcaggcgttccgccaatgtgtccacggaaaatttcaagccttccgttcgtaaactgacaatcgattctttgatgatcttttctttcatcgtcgccctccgttatggaaacaaaatattaaaattatgtttcctattataactcttaaagcggcgaaagtcaataaatataggtatagaattttattttttccgaaaataaaatacggcgtcgtccgagcgacggccgcggccgtagaaatagcttaaaaagcaagtctataaaaaatcagcgtcccgatatgcgggacgcttcaagattgaaaatatttacgcttccgtggacgtaggggcggaattgtctttcaacgattc

SEQ ID NO: 3427 - DNA, 1692 bp, Unknown
  16S sequences of unknown bacteria
cccctcattttcgccgaaaaatctgtcggcggctctcgacaacgccgattcgccctttttgaaccgagggctgctttcatacaatctcggctcgatttttaaaatctgcgtagcggccgccgccctcgaaaacggcatttcgccggaggaaaaatatttctgttcgggcagcgtcgactgcggaaacgttttctgctgtcacaaggaggacggccacgaagaaatagacatgagcgaggcctttgcaaaatcctgcaacacctattttatcaaccttgccgagaaggtgggcgccgaaagtattttcgattttgcacaaaaggcggggctttcggccgacgttgtcataaccgagggactgacggcaaaatcaagcctcggacagctttcgaaaataaaagaatcccccgcagcccttgcaaatttcgccataggccagggggatattgcggtgtcgccgctgcaggtgtcgcttctcgtaaatgccgtggcaaacggcggcgtttatttccctccctttctcgtttccggctttaaagacaaggacggaaaaaccgagtatcaaaagggaaccgagggacgtaggataatgtcgaaagagaccgccgtcaccctttcaaacatgatgacaagggtttttgaggacggaacggcggcggcaagccgaccgaaaagtggtctttacggcggcaaaaccgccaccgccgaaacgggttggaaaaccgccgacggcagcgcaggaaaaaacgcttggtttgcggggttttacgagttcggcggcgaaaagctttcggtggccgtgctcgccgagggaggcgaatcgggcgcagccgacgccgttcccgtgttcaaatcgctttgcgacgcgctgtcggatgcatcggcagactgagggccgccatttgcgaaatcggcattttgcccttcgccgttttggaaattcccgcccattccgccgcccatgcttcccatgtcggagacatttacgccgtcggccgacacaagatttgacgggtcggcggtctgtccgtcggacgtcgagggaattgtgccgccaagctgtccctttatgctctttgcccgaaggctgcagaattccgaaagggtaaggactcccgtttcaaactgctcataggtgcagaattttgtggggtccttttccacatagggagagataagctcttttgtatcgcttataagctgctcaaggtatccgccgtcaaaatattttgatataaattcagagaaaagctcatgataaagatttgtgtattcctcgcttgaaaatatccacgaaagcatggggcgggactccaccgttcccgacgaaacgggagtgtctatggggaaattcacgaggctctcggcgtcggaggagccgaacgtcccgaaagccaggttatagtcccaggggatcatggaaagcacgccgtcggattcgtaaagataatagttgtgaatcatggagccggtgtagctgtcgaaattgtcggtgaaattatgaaccacaaaatatcttatgaccgactcgacatcaaccgtgttttcagggtcggtctgctcggacagatttttgagagaatttataaggcgggatttgtccccgtcgtcggggtcggttttggcgttgtcaaaaatgttgggatagctgtcggcgctgtcgtcggaatactgcaacatgacatcggaaga

SEQ ID NO: 3428 - DNA, 27875 bp, Unknown
  16S sequences of unknown bacteria
gcgggcgccgtgcccgtgcaggcggaacagatcgccgtcgattacgaagaaaccgtctacgcgctctataaaaacgagttgtacgtatgcgcagatgcgcaggaaaaatattctttgagcaaaactctcgtatacgcccagactttggaaacgcaggcgatttcctttgcgttcggcatcgaggacggaggcgtctatctcctctacgagggcgattttgcgataaagacgtacgacgttcccctgcccaccgtaaaggcgattgcggtagacggcgcggacgaggatattttcagcaatgaaaacgccgatttctccatcgtcgaaacggcgggaaacgcgctgatggtagaattcgacattcagacgctgtcgggcgcgcaggtctttccctatctctcctatcgtcgggaaacgcagccgaagacggcgcttaaactgggggaaacggaaaaatacaacctcatcgccgtattcgacgaaacgaacaggagttattcgacggcgctgatcttgaagcgctattgcaaggagatccccgagagtgactatctcaaaccgccgagcggatttaaagacggcacgggctatctcaccaatgccgtgcccgtttataagtatccctatctcaccgaacttctcaccgtctgtaccccgcccaaaaacgcggccgtagaagtattgggggagatcgataggctggattataaatactattacgtttcctatacggacgaaacgggcgccgagcggaaaggctatattcccaaatcttatgtgacgaatttcaacggcgcgccgcccgaagcggaacgcgccgaatacggcgcgggagataccgaccgcgactccctctggcgcatggcgtttttgctcctcggctgcgcctctatctgcgtccttgtcgattatatgatcttgcataaaaagaaaaattgagtttcgtaaaatcccgcagtaaagcacggcgggatttttaggaggcggcgcggcgtccgataggtaaaagagccgtttttcctttttctgaggcgcaaggctcgatttgccgcgcctgtcggaaaaattcgtttttcgcaagccccggcgggacctaaggcacctttccgttgccgaccaaagccgaaaaagacatcttaggagaatttataaagcagtacggcgacattcccgcaaaaatgattttttcggcaaacgaacgccggggtcgcctgcggcaaagaatacaacttcacgcggacggatgtccccttatacggcgctttttcgtatcacggactatgacgacgatggaggcaggaattatcggaggcgacgattttttacgactttgcgaggagtcttcgaatcgacgattttcgggggcgagcaaagcgagcttatcgcagcgcttgcccgcatctcttcgaatgcgtagagcacaggggaaaaagcgcgccgttttgcggcggcttttcagggggtgcggaatgcagcgacagtggggcaggagtctttctatttccgtcgtttgttccgctcctcgccttttgcaaagttgtttataaaagaaaaaaacgcctctttcataaaaggcgtcacaaaattttaagagtcgaaaaaagagccgcccgtgttaaaaaggcagcccttttttgtacgtcggatcacccgttttcaaataaatcttccgagttcgcgcgcggcgcccccgttcaaagttcccgtattttacaaattttcgataaacgcatcgacgatttcaaaaagtcttcgatagccgttatcgttgggatgcagtccgtcgggcataaaaagtccgcgcatcccgggaacggcgggctgaatgcccgaaacgctccataaatccaatacgggaaaagaaaagtattccgcgttttcctttatcgcccgcacataatcctttaaaatttttccgccgtccggtttttcttgcgggatttcctctcccgctctgtgcaaaggcgtgaaaaagacgattctcccgctcggatatttatggaggagggacacggaaagcgcgtacagcgccccgtaaaaggtatgttccgtcctatcgcctatctttcccagcggcgcgtcgcccacgccgtaatcgttcgtgccgccgaatacgcagacgagatccgcccgttccggcattgccgaaacgcggctgtaaaacggatgcgcgcaggcgggactgaaaggcgtcttttgcggcgcgatgcgcgttccgcccaccccgcagttatgcaccgccgttttgggatgcgcggcggcgaacagggatacgaagtttttttcgggcgcgctcgccccgcagccttccgtaatgctgtcgcccaaaaaacagatttttttaccgtttgtcttcattctctcttctccttctgctcctcaaaagtcctttttcatataccgcgacggcgtcaccgcaaaaggcgcgcggcaggcattctccgcgctttccacagccgccgctctctccgcgtccgaaacgccttcgggcgcataggcgatttgcgaaatatccgcgcccgtcacagccgtcacaagcgtcaatcccgcgacataccttccgagcggtatcgaaagatggaagccgtcgcggttcaaggaatcgcccaaaaagctcgtgcgggcgttctggatcgccgttcccgacggaattaccgtagaaaaaacgtttgtaggcaaaattttcttttgcaccgtttttacgatcatctcatacatggtgccttggttttgtccgtaatttgcaaaagcttcgtgctcggagtccttggcatacgcccaggtcatatgccagacgagtttcacattcgggtttttcgcgcggcgctttataaagtcgatcaggaagaacaagtcctcgttgtacgtttcttccctgccgctaaaagggcttgcttgctgtaaggaaacgacgtcccaatcgcggaaagtcacgccgtagacaaggcttttgttttccgtccgccaaacgccgtccgtattcgtgcgaaattcgtaaacctccgcgcctgaaagggcgttttcccgatgcgtcgccagcgaacagccgcctatatagagatttccaagctcgattttcttaaagccgagagcggacgcgatttgccatacgtattccattgcgtcgtcggaaaagctgttgccgaccgtgagaagcttcaaagtatccatactcccccctgtttctctttatgcttttattataatacgcagacggattttgtcaagcgattttactcgccgctaaaaagaaaaatgcgataatcgctgacctggtatcccgtttacgctcaaaaaaactcccgcagacgtctgacttgcgagagtttttggacaaagggaagaccgctcggcatcaactttgaagacagagcttttccgccgtgacgatgacgatggtctgctgattgccgtatatacagtccatcgccgaataataaattttcaacaggctcccccccgaaagggcgtcgggagaaacgtccgtccagtcggcggaaacttcggcgcggatttcgcaggggacttcataatactctccgtttttatcatacacgccatagacggcaggcagcgcatagcccaagatctccccgcttcccgccgcattttcccgcctgaccgcaatcggagcgttcgtaaggcggacgaggagatactcctctgtatagtcggacagccggatctgctccaccacatccgcagtccgataactatccgccatcacggcatattcatagcagtaactatcctctccgacgatctttccgccatcgtctgctacccattcgtaggtatacagcatcccttcgttcgagcgaaaatcgattaccgtctgcccgatgggataggaagttaaatccttgatgagcatcccgttggcgatgcgtttatgctcggaaaatataaaatacacgccgtcgtaattttcatctacggaaaaataactcccctgctcccctacgacgcaaaggagcacctgatccgaaaaagtttccgattccatccaggcaatgatcacccgcagctctcccttcccgcatttttccgtcaaaaaggtgtccgcctgcgtattcacgtaaaattcaataccgcgcgagagaaatatcgacttcatgggataataatagatcggctttttctcgtactcgcccgaatgatagagccccgaaaaaatatcctcgccgctgtcttgtcccgggggcggcgcagtgctgctgtcaaagccgaagccgtaatccgaatcgctgccgttctgcgcaaagctctcctcccttcccatactgtccgcgtcatatgccgcgacgacggtttttcgcgccgcggaaaccggttttacggctccgttttcctctccccgcgcgttcctgtccatatagctgactaccgcggtgaggagagcttcctgttcgtatccctcggcgagcagagcgcgcagatcgtccgaagcgctgtttgtcggcgcgtgggtggaatccgatccgtttcccgtttccatgttgtctttatgaaacagtccccgaaaggcgaacgtgcacgcgaataccgccgccacggcgcaggcagccgccgaaacgagttttacggaaaagctgcgttttgcgcgggaagagctgcctttcgaggatttttcttccctctgcgcgctctgtaagcattctatttcgcgaagatgcctttcctccaagggctgttcccgatcctgaatcccggaaaataaatttttcaattctttcatctttcggcctccccgtaaaattttttgaatttttgtttcgcgcgccgatagcgcgtaaaacacatctttttcgtcattcccgtcagacgtgcgcactcgcttaaagaatatcccgcagaagcgatacacaggagcaccgtgcgctcctccgcgtccaatttttccaaagcgcgcagaacgtcgagtttttccgccgacgcgtccgcgaaagccgcgctcgccgccgattcccttaaaggaagctcctttcggcgccgcaacaggtcgatggcggaattataggcaatggtatttatgtatccgagcgggtttttgagccgcgccaaaagcggcgctttttgccatacccgctcgataacgatgctcaaaacgtcgtccgcgagcgacgaatcgtgcaaaatgccgtcggcaatgtatcgtacccgccccgaaacagtcgatacgaagcccgaaagcgcccctttttctccttcggctatcccgagaagataactttttgccttttcgtttgtcatcattttcctctcattaattataacgcggcaaagacgctcttcgttaccgccttttcaaaaatttttcggactttttttcggaggcttttttctttccgacaatgttcccgcgtcagaacataaatcgcttgcccggcatcaaaatttatcgggtgtgttttttatccgcgcgccgcttccctttcgcaaaaagactgccgataagcaaaacccgcctgcggccttgcgccatagacgggttttgttataataacataatggatgttatttttgaatcggggaacgaaaacggcaggcgccttgcactgttgcattttcgtttttactataacaaagcacggctttgaatcgaacggggcgaaaagatatttacgaaaacgcctcttttcgcttctaaaacgacaccgccgacattatgttcgcacagaccgcgaaaatgccgatcgacgaatctcttttccgcgtcttcgcttctatcctgttatcgctttacgcaatgtttgaatcgaacgcgaacatatttgtgcgagcgcatactttcgtttctgttatagcgtttgatctcgtcttagaccaattcgatgacggcggtttccgcaccgtcgccgcggcgggcgccgaggagataaattctcgtatagccgcccccctgctgcgtttcttcctttctcgccgcgtacttgggcgcgatttcgttgaagagtttgtccatcaaaggatgctggacatccttcgttctcgccttataagagctcttcttttcgtcgaagcccttgatctcctgcaagtcataggtcttcgccatgatggcgcggcgcgcggcaagcttcttggggccgtctttgatattggtcgccttgatctccttgcccttcttatccgtcgtggtgacttcgaactcgatattgtcgtcgtaagtattgacggctttcgtaattaatttttcaacgtaagatttaagctctttcgcttttgcggcggtcgtttcgattctgccgtaccaaaggagctgggatgcctgatttctcaaaagggcatttctttctttggaagttcttcccaatttgccgggcataattttaatcctcctgtttatttaatgaaagaccgtaagactccaatttctggatgacttcgtccagagattttctgccgaggtttcttaccttcaacatatcgtcttccgtcttcttggtcaagtcttctaccgtgtgaatattcgctctctttaagcagttatacgaacggacggacaaatccatctcttcgattgccattttgagaacctgctgctgtttatcgtcctccgtcttgacaagaatatccatgcccttgatcgtatcggaaagattcacgaacagattgatgtgatcctgcatgatcttcgcggcaagcgaaatgatttccttgcccgaaaaagtgccgtctgtccaaacttccaaggccagcttgtcatagtctacggcctgccccacacgcgtgggctccaccgtataattgactttctgaacgggcgtatagatagaatcgattgcgatatagtcgattacgggttgtttgttctctttggcgggcttgtagcctctgcctctgccgacggtcagttccacatcgaatttgccgccttcgtcgatcgtgcagatatactgatctttattgatgatctcgatctccgcatctacgttgaggtcttctcccgtcaataccgcggggccttccttatagatgtgcaaaatcttttcgtaatccttatcgatgactttcgtcttgattgcaagcgccttcaaattgaggatgatctccgtcacgtcctctttgatgcctgcgaccgcggaaaactcatgcttcacgctgccgtccaaaaactttatcccttccacggccgcacccggcagagcggaaagcaatattcttctaaggcagtttcctatggtaagaccgaaacctttctccaagggctcgcagacgactttcgcataaaagtcgtcgttttcgaggacttcgagtttgggcatatccatttcgatcattatgctacctccttatacttttcaattatttggagtacaactcgacaatcatatgctccgcaatctggctgtcgatatcctctctcgtcgggagtgccaatacctttccttccattttttctctgtcgaactcaacccatttaggcagatttccgcttgccttcgtttctttgagtgccgtaaaatacttattgccctttctgttctctttcaccacgactacgtcgcccgcctttacgatataggacggaatggtgaccgtcttgccgttcaccgaaagatgcgcgtgattgacgagctggcgagcctgcgtcctcgaaggggcgatgcccattctgaaaactacgttgtcaagacgtctttcgaggagggagagcatattttcgcccgtgactcccttcattctgtccgccatttcgtaatatttatgaaactgaccttcctgaacgccgtagatacgcttcgtcttctgcttctcacgaagctgcaagccgtattccgaaaccttcttcctgcccgcaccgtgctgaccgggagccaccggacgcttattgaacgggcatttctccatatagcatttatcgcctttgaggaagagctttgcgccttcccttctgcaaagtttgcattttgcttctctgtatgttgccataattctttatcttgcctcctgattagactctgcgacgcttaggcggtctgcaaccgttgtgagggatgggagaaacgtcggagatcaaggtgatctccaaatcgcacgcggaaagcgcgcggatcgcggattctctgcccgctccgggacctttcacgtatacttccacgcttctcagtccgtgctcttttgccgctttcgccgccgtttccgcagccatctgcgccgcgaacggcgtgcctttacggctgcctttatagccgagcgagccggcgctggaccaggataccgcgttgccgttcgtatccgtgatcgtcacgagcgtattattgaaagtggactggatatgcacctgtcctttatcgatctttttaagttccttacgcttacgaggagccgaggactttttgtttttattgtctgccataattcttatctcctcctatattacttcttcttgcctgcgatggcgcgagcgggtcccttgcgggtacgcgcgtttctcttggtgctctgaccgcgcacgggcaagccctttctgtggcggatgccgcgatagctgccgatttccatcagccgcttgatatttaaggaaacttcgctgcgaagttcgccttccacgcggatattatggtcgatatattctctgagtttggaaacgtcgttctcgtcgagatctttgattctcgtatcgggattgatgcccgtttctttcagaattttctgggacgtagtcaagccgataccgtaaatataggtaaggccgatttctactcgtttttctctgggtaaatccacaccggcaatacgtgccattgatttataacctccgtttgattgaaatggttaatttttttattttgatctatcgtcaacaaacgcgccggcaaagcagtggaaaatgctttccgcgcacgcccgtattgttttcggacctcttgcgccttgtttgcgctctactttttaagacgcaacaaaactgagtttccgtaaaaatttacggaaattcagcttgatttacgctattttttcggctgaatcgtgctcctttcggacaatccccgcattttcagtcgcataaaactattatacaactttttccagggaaatgtcaagcgtttttatcagccttgccgctgtttatggctcttgcttttggaacagattaccatgactctgccgtttcttttaataactttgcatttatcgcacatgggttttacagaaggtctgactttcattgttttttctccttgatttattgcttttccttcgcgcgccgaacaagttttacgacttgctgcgccaggtgattctgcccttcgtcaaatcatacggactcatttccagtttcacgttgtcgccctcgatgatcctgatgtagttcatcctgagcttcccggaaatatatgccgtgatggtatgaccattggaaagctgcaccttgaatgtggcgttgggcagagattcgattaccttgccttccgcctcgattacgtcgtctttggacacagaatatccctccgattttttctccccgggcgttttttgattgtgccgcccggcattcttttcctttttattttttcgcttttgccttcgtcgctttcttttcgtttaccactcaaagcgtcaggatttcgaccccgtcctcgcggatcaccaccgtattctcgtaatgcgccgcgggcttgccgtcttccgtcaccgcgccccagccgtcgtccaatagacgcacgcggtaggtgcccatcgcgatcatcggttcgatacagaggaccgtgcccgcgcgcaggcggacgcccgtaccctgctttccgaaattgggaacggaaggatcctcgtgcatttccttgccgatgccgtgtcccgtatacgaacggatgactccgtacccgaacgattcggcgtacttttgaactttatagccgatgtcgtagagcggcgttcccgccctcagcccttcgacgcccttgaaaaaacattcttccgtgactttgacgagctttctcgtttcgggcgccacgtcgccgatacaaaaggtgcggcaggcgtcgccgtgatagccgtttttatacgcgcacagatccaccgtgacgatgtccccgtcctttaaaatcgtacgttcgtcgggaatcccgtgaaccaccgtttcattgacggaaacgcacgccgacgcggggaagccgccgtagccgaggcaggagggataggcacccgccgatcggatataccgctcgacaagttcgtccacttccttcgtgctcatgcccgctttgatcctcgaagcgacaaattccagcgtgtcgcggacgatcttgcaggactcccgcatcaaatctatttcgctttcgctttttacgtgaatcatgttattgtttattcagctcgtcgagcgttttcgcaacttccgcaaagaggacttcggcgggcgcttcgctgcccgtaaaattgaggatgacgcctttcttcgtataataatcgatcaggggagccgtttgagccttataaacgtccaatctgcttttcaccgtttcgggattgtcgtccttgcgctgatacagctcgccgccgcagcgggcgcatttggattcgccgtttaacgtggaaacgtgatagctttctccgcagtctttgcatacccgcctgccgcacaatctgtccatcaggagggaaaaatcgatgttgatgttcaccaccgcgtcgatcttcgcaaatttgtcgagttcctccgcctgcgcgatcgtgcggggaaaaccgtcgaggagatagccctttttacagtcctctcttttcaaacgttcctctacgatcttacaggtgacttcgtcgggaacaagctgtcccttatcggtatacgactttgcaagaagtccgatcggcgtcccgttcctgatgttttctctgaaaatatctcccgtggaaatgtggggcaatccgtagcggtcggaaatcttcgtcgcctgggtgcccttgccggcgccgggggcgccgagtaaaataatattcatggattgacctctccgtttacacgcagtttcccgcggccttccttcccgcgaagggaagaaaggatacgcgattttttattatttcaggaagcctttgtagtttttcatcatcatctgcgcctgcaactgcttctcaaattccattgccaccgaaacgacgatgaggatacccgtcgtggagaacacgttgacgagatcgtaagaagcccaggcaaatgcaagggaaggcacaaacgcgaccaaagacagatagatggcgccgaataaggtgatacggttggatatctttttgagataggcttccgtagccttgcccgggcggataccctgaatgaaaccgccgttttgctgaatgctcttggaaacgtcttcgggattaaactgcatctgcgcgtaaaagaacgagaacgcgaaaatcaaaagacacagcacgaacgcatatagaatccgtcccgccggtacggaagattgtcccgaggacatccacttcgcccaccaaagggcaaatcccgattccggccaaaacaagctggcgatcatctgcgggaagctgatgatggaaaacgcgaaaatgagaggcatgacgccgctgcccgaaatccggatgggaatcacggacgactgaccgccgtacatctttctgcccttgatctgcttcgcgtactgtacgggaacctttctctcggaaagatcgacgtaaatgatcgcaaagaagatgacgacgcagacgagcacgaaagccacaagctcccaaattacgtttaagttggaggagatctcgctgatcttgctcacgatggactgacctgccgtcgcgaggatacccacgaaaatgatcatggactgaccgttgcctacgccgtagtcggtgattctttcgcccagccacatgacgagcagcgcgcccgaagtgtatacgatcgtcataaagagtcccgcgagccaggtctgatcgaagaacagcgaattttggatagcatgctttgaatttgcgaaattgacgatgatgccgaccgattggatgacggcgaggagaatggtgagatatctcgtatactgagaaatctttttctgtccctcttcgccctgtttggaaagtctttcgagcggagggatacccacgcacaggagctgcatgataatggatgcgttgatgtaagggccgattcccaaagcaaagagcgtgccgttagcaagcgagccgcccgtgatgctgttcatcagcgacaggaaatcgttgccgccgatctcctctccaaacgtttgtctgtccagcccgggcaccggaatatagcagccaatgcggaaaaccagcagcaggaggagcatcatccatacttttcgccggatttccttgactttgaaagcattgattaatgtttgtaacatctttttctccgatattgggtttttattgagcggacaccgctcaacgtaagccgcatatcgctacgcggcaggggagaaataaacgcgaatcacggaaaaccgccgtgaggcaatcttccgcgctttttgtttattaaagggtctccgcggtgcccttcgccgcctcgatggcttccttggcggaagcggagaacttcgccgccttcacggtgagcgccactttcaattcgccgttccccagcactttgagtccgcaattgtttttaacgtctttcgcaagcccgttttccatcacgaagccgtaatccaccaccgtaccttcgggaagatccgcaagcagggaaagattgacgatgacgtattcctttttgccgttatgattgaatccttttttgggtacgcgccgcgcgatgggcatctgtccgccttcaaagccgggtctgacgccgccgccggaacgcgcccactgtcctttatgacctttaccggaggtttttccaagtcccgaaccgatgccgcgacctaatctcttcgaaggtcttaccgctccctcagcgggagaaagagtatctattctcatgataaatctccttagatgttttctactttcacgagatgcttgactttcgtaatcatcccctgaattgcgggcgtatcttcgagttccttggaagaacggatctttttaagaccgagcgccgcgatcgtcgccttgacggacgcaacctctccgattgtgctctttacgagcgtcacttttatcttagccatgttgtcctcctcctatcagctcaaaatctcttctacggacttgccgcgaagcgccgccacctgctctgccgtcttcaactccgcaagacccgccacagccgctttcacgcagttgccggggttttgggtgccgtgggatttggtcctgatattcttgatgccgaccgcttccatgaccgcacgcacggggccgcccgcgataacgccggtaccttccgtagcgggcatcatcaaaacggcgccgcggccgaatttgccgatcacctgatgaggaatggtattgtcgacgattgcgacggagatcatgttcttcttcgctctcaaagtcgccttctcgatcgcttcgggaacttccttcgctttacccgttccgacgccgatttttcccgcgccgtccccgacgatgacgagggccgcaaaacgcatattcttgccgcccttgaccgtcttggaaacgcggtttacctcgatgagcttcttgatgagtccgtcgtcctccgcctgtcttctctgaggtcttctgttttctcttttttcgtctgccattgtcgtttctcctctcagaatttaagtccggcttctcttgcgccgtctgcgagcgccttcacacgtcccgtgtaaaggtagccgcctctgtcgaatacaaccgtttcgacgcctttgcccttcgctctttccgcgatggtcgcgccgactactttggcagcgtccgttttattgagtcccgcgatcttttccttgatttccttctccatcgtggaggcggaagtcagggtgatgccgccctttgcatcgcctgctctgtcgtcgatcacctgcacgtaaatgtgattaagactcctgtatacgttcatacggggcgtttccgcagtccccgtgatcgtctttctcacacgggcgtgacgtctttgtctgactgtatttttatcaattttagaaatcatactttaacgctccttatttcttgcctttaccggaggtcttgccttccttatgttctacgtattcgcccttgtagcggattccgtagccgtgataaggctcggggattctgaccttcctgatgttcgccgccgtctgtccgaccagctccttgctgataccggacaccgaaatttccgtaagagaagggcattcgaacttgattccttccggggcaacgatttccacggggtgggaaaagccgacgttgaggacgagtttattgccctgcacctgcgctttccagccgacgcccttgacttccagactctttaaaaagccgtccgtgacgcccttcaccatacccgcgagaagcgccctgtaaagaccgtgcttcgcgttggtatccgcgctgtcgtccaaagttttgagcacgatgttgccctcttccgtcacgatgtcgagattgccgacgacctcgcgcgtcaaagtgcctttgggacctttgaccgtcagaagtccgtccttaaattccattgttacgcctgcgggaaccgcgatgggcattttaccgattcttgacatagtatttaccctccgattaccaaatgtagcagagcacttcgccgccgacgttggccgcctttgcctgcttgccggtgaggatgcccttattggtggaaagaatcaccgtgccgagcccgcccagaactctgggcatatcctctacccccgaatacgcgcgaagaccgggcttggacttcctttgaagaccgttgataaccgattttttgtcgctgtatttgagcgtgatcgcaatcttgccgttgtagccgtcttcgacgatttttacgtccttgacgtatccttcggaaagaaggatctcggcgatggctttcttcatattggaagcggggatctccaccgtttccttcttcgccgtgattgcgtttctgattcttgtaagcatatccgcgataggatctgtcatattcgtttcctcctattaccagctcgacttcttaacgccgggaatttctcccttgtacgcaaggttacggaaacaaatacggcaaacgccgtactttctcaaaaccgcgtgaggtcttccgcagattgaacatctcgtgtaggctctggtggaatacttaggcgtcttctgctgtttattgatcattgacttttttgccatcttcgtttctccttacttcttgaaaggcataccgagcgctctcaaaagctcccttgcctcttcgtccgtgttcgcggtcgtcacgatacatacgtccatacctctgatcttctccacctgatcgtacgtgatttcggggaaaatcagctgctctttaagacctaccgagtaattgccgcgtccgtcgaaagctttttcggatacacccttaaaatctctcatacggggaagcgcgatggaaatgaacttatcgtagaagttatacattctctcgccgcgaagcgtcaccttgatgcctaccgtctgtccctctctcaccttgaagttggcgacggatttcttcgccttcgtgagaacgggctgctgaccggtgatcatcttgatttcgttttcggtcgtctgaatggacttcgcgttgtctttgatgtcgcccagtcccgtgtttattacgatcttaacgagtttggggcattgcataacggaagtgtaaccgaactttttcatcagaaaaggcacgacttctttctcgtacttttctttaactctgtttttatatactttttctgccatcttgttctacctcgttaatccttttccgtaggctcgggtgccttttccgccgaagtttcggacgcttccgccttctgagcgcgctttctcgtcctcttcttgggagcttcttccactgccgccgcagccgctttcgcgctcgctttcttggaatacgctttatcgagcaccgctttgcaagccgttccgtccgccttcttggcgccgcagactctcactttcttgccgtctacttcggcgtgcttgactttcgtcgcttttccgcaaacggggcagaccaccatcacgttggaagcgtcgatgggaccgggggcttccacgatcttgctcgtttcgttggcctttctcgctttctcgtgctttttctggatacgcacgccctccacgactaccgtattcgctttgggggatgtggcaaggacttttccctgtttgcctttatctttaccggctataacaagtacgttatcatttacttttacgttcattgtttcttcctcctgacgaattacagcacttcgggagcaagagagatgatcttcatgtagtccttatctctcaattctctcgcgatcggcccaaagatacgggttcctttcggctgtttctgattgtctatgatcaccgccgcgttgtcgtcgaatttgacgaacgtgccgtcggctcttctgattcccttcgcgcttctgacgatgaccgccttgacgacgtcgcccttcttcaccgcgccgcccggcgcagccgacttgacggatgccacgattacgtcgccgatattgcctgttttacgaaaggagccgcccaatactctaatgcacataagctctttcgcgccggagttatcggcagctttaagccttgtttgaggttgtatcataagtctttactctccttgaaaattacttagccttctcgacgatttcggcaactctccaattcttgtccttgctgagctttctcgtctcgacgattctcaccttgtcgcctacgccgcacgcgttctcttcgtcgtgcgcctttaagcgcttggtctttgtaacggtctttttatagagggggtgcttgcttctgtcggagatctccacgaccaccgtcttatccatcttatcggataccacaagcccgattctttcttttcttaaatttctttccatgattccttgtcctccgcgttacgctttcagctctctcgcgcggatttctgtatttacgcgcgcgatgtctttcttgcaggttctgatggaaaccgggctttccagctgaccggatgccagacggaaacgaaggttgaaaagttcgcttttgagcgccgcgagtttttccgtaagctcggcgttcgtcatctctttcacttctttagctttcattattgttcaccgccttcagcctgctccgccacggcgggggcagcctctttcttgacaaacttgcacttgacgggaagcttattgcccgcaagcctcattgcctccctcgcgtccgcttcggatacgcccgccatctcgaacatcactctgccgggcttcaccaccgcgacccaatattccacgttgcctttgcccgaacccatacgggcttccgcgggatgcttcgtgatgggcttatgagggaaaatatcgatccataccttaccgccgcgcttgatgaatctcgtcatggcgatacgggcggcttcgatctgattggatttgatccagccgcattcttccgctaccaggccgtattcgccgtaggcaacggtgtttcctttatgagcggcaccggtcattcttcccttgtgctgctttcttcttttcactctcttgggaattaacatttactgctctcctccttctgcctgggcaggcttcttcgcagcgcttttaagcacctcgcccttgtagatccagcacttgacgccgatcataccgaacgtggtgtgcgcttccgcaaatccgtaatcgatatccgcgcggagcgtttgaagaggaatagacccttcgtgatactgctcgcatctggcgatttccgcgccgtcaagacgcccgctgaccatcatcttgatgcccttgacgcccgcgcgcatactgcggccgatcgcctgcttcatgcagcggcggaaagacatacgcttttccagctgcgcggcaacgctctccgcgacgagctgcgcgtcgcagtccggctttctcacttccgtgatattgatgctgatcgacttgccgttcgtgagccgtgcgagatcctttttgatcgtttccacttcgctgcccgccttgccgatgatgacgccgggacgagcggtataaatggtgacgacgattctcgacgcggccctctcgatgaggatcttgctgatcgccgccgcatagtatttctttttgaggaaggtacggatcatgttatcttctttcagatatttggagaactcttttttatcggcgtaccactgcgtgttccaaccgttaataactcctactctcaaaccgtgaggattcactttctgtcccattataattctccttccaatttcttaacatccagaatcaccgtgatatggctcgttctcttcaaaatcgcatggcctctgcccttggaaacgggctgcattcttttgagcatctgcccgccgtccgcaaagcattccgcgacgacgagatcgtttttgtccatgcccatattgtgctccgcattcgcggcggccgacatgagaactttctttatcgcaagcgcgcttccgttcgtgatgctttccaaaatcgctttcgcttcctgatagctcttcccgcgaatcaaggcaagaaccgctcttaccttgtaaggggaaactctgacgtatttagcgaccgcataagggcgtttttctctgttttcctccaccctctgcgtctttttattcatgttcgttgccattttttctcgtctccttatttaccgggctgggtcgtctttgcggcatggccgtggaaggtcctcgtgggcgcaaactcgccgagcttgcagccgatcatgtcctccgtaatatatacgggtacgtgcttgcggccgtcgtatacggcgatcgtgtgaccgaccatatcggggaatattgtagacgctctcgaccaggtcttgatgacctttttctcgctagcggcgttcattgcctgaattctgctcaaaagcttggcttcgacataaggccctttcttaacgcttcttgacattttttattccctccgattagttaattctcttgagaatgaacttgtttgttacattcttcttctttctcgtcttatagccgagtgcgggcttgccccaaggagtttcgggacctgcgtgacctacgggagccttgccttcgccgccgccgtgagggtgatccacagggttcatgacggcgcctctgacttccggcctttgtccgagatatctcgccttgccggccttgccgagggaaacgatctcgtgatcgacgttgccgacctgtccgatcgtcgcgcggcatttcgcaaggatgagccgcatttcgccgctgggcattctgatcgtcacgtacttgccttccgccgccatgatctgcgcggacatacccgcgctccttgcgatctggccgcccttgcccggcgtcatttcgatgttgtgcaccatcgtacctacggggatgttttcaaggggaagcgtgttgcccgctttgatgtccgccgcggggccgttcatcagcttatcgccgaccgcaagccctacgggcgcgagaatatacgtcttgacgccgtccgcatacacgagaagggcgatgtgcgcgctcctgttcggatcgtactgaatgctcttgaccgtggcgggaattccgtctttcgtcctcttgaagtcgatgatgcgatatttggtgcggttgccgccgccgatgtgcctcgtcgtgatcttgccctgattgttgcggccgcccgaatggcgctggtcgtgcagcagggacttctcgggcttgtcgcccgtcagctcctcatacgccgataccgtcgcgaaacggtggccggcggaagtcggtttatatttcttgattgccatttttcggttcctcctctttaagccaacgagtcgaagaattcgatgggcttgctgtcctctttcaaggtgaccaccgctttcttgcggtcgggggtgtagccttcgtttctgcccattcttttgagtttgcccttgcttttcagggtgttcacgcttgcgaccttgacgccgaacagcttttcgaccgccgctttgatctgggtcttattggcgtcccttttcacgatgaacgtgtatttcttggacgcgatcccgtcgtatcccttctcggtgaggacgggctgtaaaatgatgtcttcggcaaacattatgcgtaaacctcctggaatttctcgacagcagccttggtcatgacgatcttattgttcgcgacgacctcgtacgtgctgagctgtgccagcggcagggtttccaaaccgggaaggtttgccgccgcgcgaatcacgttgacgtcgtcgttatccatgacgacaagcgcggttttatccaatttcaaagctttcttgaacgccgccatttccttcgtcttgggcgcggaaactttcagctcgtccaaaacgatgaactcgccgtccgccactttcttggaaagcgcggagaggagcgccgttctcttcgccgtcacgttcatcttcttggagaaatcgcgggacttgggagcgaacaccacgccgcccttgatccactgcggagcgcggatagatccctgacgcgcacggcccgtacccttttggcgccagggcttgatgccgccgcccctcacttccgttctcgtgagggtggacttggtgccctgtctttcgtttgcaagacgggtcacgactgcctgatgaatcaaagactctttatattcgacgccgaacacgttgtcgttaagttccatcgtgccgacttcggagccgttcatattgtatactttaataccggtcatgtccttcattctccttatttgctcttaacgctgtccgcaacggtgacgatgctgcccttgggtccgggaacggcgcctttgatgagaagcacgtttctgtttaaatccactttcactacttcgagattctgcaccgtcacgttctctacgccgtactgtccggcgaggtgcttatgcttgaataccctcgaaggatcgctgatggagcccatggaaccgggttctctgtgcacagggcctacgccgtgggtttctttgagccgatgctgattccatctcttgatgacgcccgtgaagccgtggcctttggatacgcccgaaacgtccaccttgtcgcccgcggcgaacacgtcggctttcagctcgtcccccaccgagaaagtttcggcgcccgccacgcggatttctttcaggaccttgtgaggttttacgcccgctttcttaaactgaccgagttcgggcttcgtgagcgctttctcgctcgtttcgataaagccgagtttgagcgccgcgtaaccgtcgttctccaccgtctttacctgcaccacggggcagggacccgcttctactaccgtgacggggatcatggtcccgtccgccgcaaaaatctgggtcatgccgactttgcgtccgatgattgctttattcattgataaagttcactccttaaaaatttatttattctcgaataccttattgaaaagtatttctcggcgaaatatgtttccaatcagagcttgatcttgatgtccacgcctgcggggaggtgtatggaatcgagaagcttcgcgttaggggagtagatgtcgatgattctcttatacgtcctcatctcgaactgttcgcgggaatccttgtacttatggggggaacgaaggatcgtgacgatttccctttcggtgggaagaggaatggggccggaaattttcgccccgctctttttcatcgtttccacgatgcgcatcgccgcttcgtctacgagttcgtgatcgtacgccgccaacttgattctgattttctgaactgccattttggtttctccttttaccgtttatactaacattttatttcgctgtatcaacatatccgtgtgtatcgaggttttaagcaaaataaaaaacactctttaaccgctgagcgtttttacgcaaagcctcggttagtcgcaggaatcgggttcccacttttgtcaacggaaattatctgccagggcggcttttgccccggattttcagtaacttcccgtctcaacccatacaacacatatttacacagcctaattataataccaaatcgactcggacaaagtcaagcgtttgaacacgcttttttgagtttttttcggttttttcgaaaaaaacggcatatttttttcgtgcggagcatagaaacggggtcattccttacggttattgcccgattttggcggaaatataccgcgccgtactttcctttccccttttcgcggctatccgcaagggtcttctttctctcttgcggacaaaaatattttttcccgctttccccgcctaaaaacggcattcaaaaagctccgcgaaaaatttttatatcggtttcgcgccttcccatgctcctaaaaagaaactcggcgctacgaagcgacggcgtcccgccccgcacagggcaaattccctttttttctgaaattttctctcctttcccttttattgtttttgttccgaatcccgctcggcgtcatagatcgcgcagttctttacttccctgcgcatctttttgacgatatccgccgagtacgtcgcctcgtacaacttgaaacggctgaacggttcgggcagaccgctgttgctgagatagagaaaaacggaatctccgagcgcgcctttttcctcccaagaggaaacgactccgaaatcgacggcgtacaggaaaaccggctttccgtcccgtcccgtttttctgacgctgtacacgcggcggatttttccttccccttccccgagaatcccgcggaggatttccgaaagaagttcgggaggcatatcgttaggggaaaatttatccgtgcgacgaacgccgatattccgttcccgatccatcgccccctgcatgatgcctgcgacggaggcgcggtattcgtccaatacgtcctgtctgcccattttgagagcaaacgtgccgatttcgtacattgctttttccgaaatgtcaaaattgtgtttcgccgctttatacaaaagcgggattccttcctcttgtccccgctctgccaggatctttcctttataataagcggcaaaatccgaatcgggatccatttccagaattttatccgaaatttccagcaccttatcgtcgcagattcccaaaaacgcatccgcgtatccgacgagttttgaggcggtaagcgggcggccttccgcgacggctttttcatattcctccatcttttcccggattctaaggtagacaacacgcttttgtttataatcgggcttaacgccctgcaaagcgagttcgtcctgcgtggcgattgcctttttacattccctcaaatagtcctcgtccgtttcttccgtcgtataatcgtactccgcgacgcccatatgctccatgcgcatacggaaggtgggatgactgtcgatgcgggcgggaatttcatggcgcagcacgtaattccaaagctcttcgttctttgcgagatattttcggaaattggaaagcgaacgggtaaaatagtcggcggaaggctcttccgattggtaaaagtcgaacgtcagttcgggtatttcggattgccgatataaagagagcagcgtcgctttggcggtggcgtttatatagatctgaccgtaccctttttccttcaccagctcgtcggcgcgtatttcccgcctgcgggaagaaagttccctatatagatcgttttcgaaaggaagcgtatggatgtagtagtttagaaacaagaaacgggcggctttacagcacagggataaaagacggctccattccacttcccgcacccatttttccacagtccccccgtagcggcgaagcttcaccgtatccgaatttttcacgtgggcaaattcgtgaagcatcacgctgaaaagttcctcttccgtcaacagcaaaatttcttccccgtcgatatataccaacgccattttatccctttccgcgacggaaaagccgtcggcggttaatagcagccggatatgacgcctgcaccccgccgcttccgcggcacgggaaacgagcgcgtataaacgagggtagtcgaggctaaacaacagttttttttcgttctccaagccgttttcataaggcggaaaaaagacggcgagcactcctatataggagagcggcaccaagattgccggcaaaaaaaggatcagcaatttaacgggcttcccccttccgaaccccgtcattcccaaagaaaaactcacgagaaagaagagaagcgttacgccgaccagccagcaataactgtggaaaatcttgctcttcaatcgtttctccgctttttcgtaatcctcttccactctctttttatgttccagacccatctctataaactgctgagcggtcatgtttttaaacgattttttaaagcggagagtgcgcacgatatttatcgccgccgcgagagccagcaatcctaccgacccgccgcacacgacccgccatatcgcctttccgtccgaaagaatgaagccgcacatccagccgccgagaattaaaaacatcgaaattaacgtcgcataggaaaggcgggcattctctttttgaatttgattcatattctctcatccccaatcaaaaccgcatgaatccggctttttggtctattatatcatacctccccgatttcgtcaatagccgaatcaacgtttccccttgacaaaatttaaaagttgtcgtataatgtctaaaaacagatcgggaggaaaatgaaatgatcgtgaaaaaagaatggttcaaagaaaacttagtcgccgtcgcggcgtcgggaatctctttcgtcttaggcgtaatcgcggggatactgctgagtttcagaccggacaaaaaaatgtgtactgcctcgttctctccttacaccatcaatatacgtttaaaatacgtattcgatatccgaaccgctatcgggtattggatttttgcgatcgtattgagcgcgatcgtatttttgctctgcaaactcatcaccgaccaaaaacggatccgggaagaaaggcgggagccgccgacaacctcggacgaacaatcgtaacaaaagcgcggcagacgccgcgctttttattttaccgtttaaatatatatttttcagaacggcggaatcaaatccgaacggatatgccgtccccgtcggaatcccttgcctctatcaaaataaacttgccgagtttacggcggcaggctttcaatactttccgcatctcctccgcggaggaaagaatctccgccttttcccgtcgcgtaaaaagggtcctcgttttttctcggcgggaatcctgcgcctccccgtccgtttttgcaacgccctcttcgccgttttccgaatccttccgcgcaatctgcgttttttcgccttcgtcgctgccctgccccttcgctttttctttttcgacaggcaaggcaagctttaagacaactttcagaagcagcccggacaggggcagatagaagcggtacgtctttccttcgttcgtgaggcagatcttcattccacccacacttccactctgtcgccgtcggcgctttgcacttccacgagtttccccgtcacgccgagcgaaataagggcaagaatttgattgaaatcgacggactgcacccattttgcgcccttctccccgcctccgccgatcttattcatcagcgtttcattgcccacgagaatctcgatgagctttacgggaaggttgacgtttactttgtcgccgtccgtactcaaaacgcgcacgcgcaggaacattttatccgtatcgggacgctctttggcgagccgggtgacaggctcgccgccgtcgtcgagaagttcgtcgacactgacgccgaacgcgcgcgacagaggctttaaaagcgttatatcgggataggaaacgtcgttttcccatttggacaccgcctgcggcgtcaccgaacagatctccgccagcgtttcctgcgtaatccctttttccttgcgataggcagcgatattttgtccgattgttttcataaaagttgttctccttttcttttcgttgtccccattatattccctcgcagcgaaaaagtccagataccatcggttgaatttgccccctcttttccaactttcggttgatacgcgcatcaaccggcggttgagaaggaaaaaagcgccctgttttgccgacggattccgcgtaaaaagcccgctcgcgccgccgtcaggcgcgcagagaggaaaatactctgccgatgcgttcggctagcacgagttccgcctccgcgcccgcctgcgtgggcgttttattgacaacgacgaggtgtttgcctttaaaatagcgaagaagtcccgcggcaggatatacgaccagcgacgtaccgcccacgacgagggtatccgcttcggagatcgcccggaccgctcccgccaccacttcgtcgttcagcatttccccatagagcacgacgtcgggcttcaccgtgccgccgcaggcgcagcgcggcacttcttctcccgcgacgatctcggacatggtatagctctttttacagcgcatacaaaaattgcgccagacgctgccgtgcagttcgaatacgtttctgctccccgctttttggtggagcccgtctatgttctgcgtgacgaccgcctttaattttccccgctcttccaagcgcgcgagcgccagatgacaggcattgggcgaagcggaaggaaagagcatcttctttttgtaaaaccgataaaattccgccgtatgggcgagaaagaaaccgtgagagatgatcgtttcgggcggatacgcatattcctcgctataaagcccgtcctgagagcggaaatcgggaatcccgctttccgtgctgacgcccgcgccgccgaaaaagaccatgtttttgctttcgtctattatttcctgaaaacgtctgatttttcgctcgtattcctcgtcgttctccgccatagagtcctcccttcgtgtcccataaagaaacagcgcggaaaaaacttccgcgccgtcaaaagccgtgggggttagtcttcgagtccttcgttgagcttttgaagaagagcatcgaggtcttcgccgtgaacggcgaccgcttccgcgaccgtttcaccgtgcgccatcgcacagccgaagcaatgcattcccgcttccatcaggatatcgggagcgttaggattgagttgtaaacattcggcaatcaaagtatccgccgtaattttagccatttgaaatttctcctttctgtacttttctattattttaacacatcgcaagcaaaaatacaagggcgcaggcagtattttttccattttttatcggattttcgcaaaattttatcatattcccgcccaagccgcaaaaatatctcccgagtcgctccctttctattccgtattttcgattccgacgaaagagtacggatacggaagtgtcctcccttcctataaacaaggcttttttatgcggcgattctttcccaagtaaaccaaagccctttccccgcccgcttctttccgctaaaaaatcccgtccggcaagaggaaaaactcccgtcgcatttttatccgatttttcgagaagaacttgtaaaaagaaggcaaaaacagttgacaaaagcaaaaaaaaatactatactatgaaagcaatttgttgaggaatcgctttgacggaaacgttttatcgcgggcgaaaataaattttccccccgcgaaagaaaaactccctctttcctattggcgcagaaagctttgggaaagcgagtcgaaagtgttttcttttggctttgccgacagaagcggcgccgagcgcctgctctttatagagcgcgggaggcttcccgatttcaaaacaaaatcctccatcaattttatatgcacctttagctcaactggatagagcgttggtctacggaaccaaaggctagggattcgaat

SEQ ID NO: 3429 - DNA, 2823 bp, Unknown
  16S sequences of unknown bacteria
cgcgctctgtcccgtctgccagaacctgacggatgagccggtgtgcagcatctgcagcgacccgcagcgggaccacgggcagatctgcgttgtggcagagcccaaggatgtcatcgccatggagcggacccgggagtatcacgggctgtaccatgtgctgcacggcgtgatctcgccgctgaatcacattggcccggacgatatccgcatccgggagctgctggaccgggtcggcaaggaggaggtccgggaggtcatcatggcgacgaaccccgataccgagggcgaggcgacggcgatgtatctctcccgcctgctgcggccgcttgagatcaaggtcacgcgccttgcctatggcatccctgtcggcagccagctggagtatgccgatgagatcaccctcttgcgcgcgctggaagggcgctgcgaaatttaaactttgaggtgcattatgaaagaggaagcaacgacgaatttgaccatgctctgcgatttttatgagctgaccatgggcaacggctattttatcaacggcatggccgataccatcacctattttgacgtctttttccgccgctgcccggatgaaggcggctttgccatcgcggcgggcctggagcaggtgatcgactatatcaacaacctgcactttaccgaggcggatcttgcctatctccggagccgcggcatgtttgacgaggcgtttttggactacctgcggaccttccgcttcaccggggatatctacgcggtgcccgagggcacgccggtcttcccgcatgagccgatcctgacggtccgcgccccggccatcgaggcccaattcgtcgagacgttcctgctgctggccctgaaccaccagagcctgatcgcgaccaaggccaaccgggtcatccgggcggcccaggggcggcgggtgctggaatttggctcccgacgggcccagggggcggacggcgcgatcctgggcgcccgcgcagcctatatcggcggctgccacggcacggcctgcaccatctcggaccagcgctatggtgtctttgccggcggcaccatggcccactcctgggtccagatgtttgactcccagctggaggccttcaaggcctattgccggacgtacccgacgaacgctgttttgctggtcgatacctacaacacgctcaaatccggcgtgccggacgcgatccgcgcctttaacgaggtcctcaagcccatgggcatcacgaaatgcggcatccggctggactccggcgatatggcctacctgacccgggaggcccggaaaatgctggacgaggccgggtggaccgagtgccagatcaccgtctccaatgcgctggatgagcatctgatccaggacctgctgcggcagggcgcctgcatcgatatgttcggcgtcggcgagcggcttatcacggcccgcagagagccggtcttcggcggcgtctataagctggccgcggtggaaaagccggatggggagattattccgaagatcaagatcagcgaaaacgttggcaagatcacaaatccgcattttaaggccctctaccggctttatgataaggaaaacggcaaggccatcgccgattatatctgcgtgcacgatgagaagatcgacgaagccgcgccgctgacgattttcgatccggacgcgacctggaagcgcaagaccatccgcaactttacggcccgacccctgcaggtgccggtcttccagaacggcaagcaggtctaccagagcccggagctggatgacatccgggcatactgcctgcagcaggtcgatacgctctgggatgaggtcaagcgctttgataatccgcaccagtattatgtcgacctgtcccagcggctctgggatattaaaaacgagctgctgcagcgcaatgcaggctgctgatgcgcgggcaggccagcgccatggccttttgcggcgtgacggccgcgctggcggtggtactgatgatcgcaggcggctggctcccggcggcgacgtactgcgccccggtggcggccagtctcctgctggcattcgtcgcgggacggtgcgggaagcggctggggctgtgttggttttttgccgtggctctgctgagcctgctcctgacgcaggataaggaagcggccctggtctttttgtgcctggggtattatccgctgctgcggccgcggctgcaaaggcttgcctgccgcccagtgcggcttgcggtgaagcttgccgtcttcctggcgggcagcgcggcggcgctggcgacggcatggctgattctgggcttgccctggcgggagacggcggggctgacggccgcgctgcttgccctggccgctgcggcctttgggctttatgacctgctgctggggcggctggcccgtcgttttgcgaagatgttacatttttcaaaaaatagggataaaaaccaaaaatcacccttgacaatttggcggattctagctataattatttctgccgttggaacggccctgaaagcacctggagataaccggtgcatcggagggagggaaatcaatgtctgaaattcgcgtcaaagaaggcgagtccttagagagtgctctgaagcgcttcaagcgtagctgccagaaggctggtacgatccaggaagtcaagaaaagagagcattacgtaagccccagcctgaagcggaagcagaagtctgaagcggctcgtaagaacaagagaaagttctattgattttcttctctaaactgcaaaagcaaaccctcttatcagaaatgataagagggtttaatgctgtcaaaaagccgcgcagagtttgcgcccgcaggcgcaaataaagt

SEQ ID NO: 3430 - DNA, 7178 bp, Unknown
  16S sequences of unknown bacteria
agcaaagattgtccgcaccgttcttttgcattctccgcgaatcaaacgctcaattgaaccttttcacccaaaatgtctttattcttttccaaaatcggcccaattacgtctcggataaattcttccgtctgctctacgctgcggccgacataatgaatcggtttgagcacaccagcaagttcctcttttgtgatctggaaagcaggatctgcgcagacccggtcgatcatatcgttttccagcccttcttcctttactctttttgcggcggccagtgcgtggacccgcagtttttcatgaagctgttggcggttcccgccttttttcactgcgctcatcatgatattttcggtagccataaacggcaattctctcatgactctctgttcaatcactttaggataaaccaccaacccgtcgcaaacattaatcataatgttcaaaatggagtccactgccaaaaagccctctgcaactgaaattcttttgttggcagaatcgtccaatgtacgctcaaaccactgtgttgccgcagtaaatgctggattcagtgtatccaccatcacataccgagccagagcgcaaatccgttcgctgcgcataggattacgcttataaggcatggcggaggaaccgatctggtgcgcttcaaacggttcttccatctctttgaaattttgcagaatacgcaaatcattggcaaatttactcgcgctttgcgcaattccgcccagtgtattcagaacttgtgcatctaccttgcgggaatacgtctgtccggacaccggcactactttatcaaaacccatagatgacgaaatgatctgatccagtttttttattttttgcgaatcgccgtcaaacaattccacaaagctggcttgtgtgccggtcgtgcctttggagcctaataaacggaaattgtccaaccggtattctacctcttccagatccatcaatagttcgttgatccataaagtggcccgttttcctactgttgtcagctgggccggctgcaaatgggtataagccagcgccggcatgtctttatatttcagtgcaaaatcagaaagcagtgaaatcacattcaaaagttttcttttgaccgctttcatcgcttcgcgcatcgttactatatcggtattgtctcccacataacaggaagtcgcacccaaatggatgatcccctgcgctttggggcactggactccataagcgtagacgtggctcattacatcatgccgcacctctttttcccgtgcttctgctacttcataattaatatcgtctttatgtgcttccagctcggcgatctgctcatccgtgatgtccagtcccagctctttttccgctttcgccagcgcaatccacaaacggcgccaggttttaaacttaaaatctgcggaaaacaggtactgcatctctttactggcataacgagtgctgaaggggctttcatagttcgtcctcatagttccttgattcctccattgattgcagccggtatgtcggcctttttcttccaggtaaaaaccgtttcagcaaaaagggccggccaagccagcctctcgcttttttgagattttttacaaaaaaccgatgcaaatgatgttgacattataccacaaatcccgccaatgtggcaatgcttattttgcctttcataaaagcggtggcataaggaaaatttaataaggcgggccttcgcaaaatgcatttgtcctggcatccgcaccaattctaaaaaaggagttgatgatcttgggaaaatgcaaaaaattttttcacgtacttagcgtttcccttttaagcctgaccattccccttttcggcgccatagggtatttggaccgtacattgcctgatctttaccgtggaggggatctttccttgttttcaattgcttcgcagccctacgtgcaggcaggtgaacttccaacatcagcgctcggcacccaagtgtccagttcaaaatccaatactgggatactggatttaaaactgttcggtatttttcctgtaaaaacagtcacagtccagcaaacttctaccgttatgctggctccgtgcggaacgcctttcggcattaaaatgtttactgacggcgtactggtagttggtatgagcaacttggaaacagatatgggttccgccaatcctgccaaggacgccggactggaaatcggagatattttatgtacgttggacggtcagcaggtatacaccaacgaagacgtatcccggattatctccgcttccaaaggtaaacaggtagaatgcacttatcgcaggggcggagaatataaaaccaccattttaacacctctgcaaagccgtgccggaactgcctaccgcattgggatttgggtgcgggattccaccgccggtatcggaacacttacctactgcgatttttccaatcaaacctttgccgggcttggacatggcgtatgcgatgttgacaccggagaactgatgcccctgatgagcggtgaaattgttgatgttaccatcaatgatattatcaaaggaaaacctggaagtcccggagagctgagaggcgtttttcacgaagatactcttttgggtgaattgacttccaatcaggataccggcgtttttggcaaattatttttcgattataccaacccttatgaacttcccatggcattccgtcaggaggtaaaagaaggccctgcccaaattttaaccacagtctccggcaacgcaccgcaactttttgatattgttatcgacaagatttcctttagccagaacaatcccaccaaaaatatgattatccgcattactgatcctatactcctggaaaaaactggcggaattattcaggggatgagcgggagtcccattattcaagacggaaagttgattggtgctgtcacacatgtttttgtaaacgacccgacaaaaggctacggtatttttgcggaaaatatgtattacagttcctgaaaacatttttcttttcccgggaaatagttaaagtaatttttaggtatttacagaatgatttcatacctcttctgcttttcatccgacagcagaatgctcctgttataaattaaaaattcctccaaatgctccttgggatgatagatgggcctgtaaaacgaaaacaggtcttttctttttttattcttcttttcgacaattaatataattttttcaattctttttgccagaaaataatgaattgtaacggcaacactctgattgtgtaaagcactaaaaagtgctatactataaaaatagtttgaaaaaattctcctttaattaagggacttgttacactgtggtgaatcaaaagatggcaattaccacagcattcaaactagaaacaaaaacctccatagcaggtggaaaggaggatccgggtgattgattcagtcaaacgaattaccattgttaccggacattatggtagtggaaaaaccaattttgcggtaaatcttgcagtggatctcagtcgagaaggaaagcaagtggtattggtggatttggatattgtaaatccctattttcgctccgctgattttaaagaacgtttgacagcaatgggaattgagatgatctgccccatctacgcaaatacaaatttggatattcccgctttgggtgctgatatttattcggtattctaccaaaatgatagccggtatgttatttttgacgtaggcggagatgatgccggcgctgcggccctgggccggtattctcatttgattcagcaggaaaattacgatatgctgtatgtcgtaaactgttaccgctatttgacccggcaaccagaagaagcgctgcaaattctgcgggaaattgagactaccgcacgcgctcctgtaaccggtatcataaataattcgaacttgggagaccaaactaccgagcaggatattacaaatgcaataacctacggagcagatgtcgctgccttggcaggtgttcccctcgtcgcgaccacggtacgaagggatcttgccggttcgctgatagaaaagtcagtttatccggtggatatttatgtcctgcccccgtgggaaaaataaaaaaattttgccaatcaaccgtttttcggttttggtcagtcaaaaagtaaggaggattgcaatggcaaaggtaacaatttcggaaaacatctgcaaaggctgtggcctttgcacaactgtgtgccccaaaaaaatcgtcgttttggcacatgatattctcaacgcaaaaggatatcatccggcgaaggtttctgatatgagcctgtgcattggctgtgcaatgtgtgcaacgatgtgccccgactgtgccatcaaagtggaaaggtagtgaaatattttggctgaacgtgtactgatgaaaggaaacgaagcgctggcagaagccgctatcaaaagcgggtgccgccatttcttcggctatccaattaccccccaaaccgaggttgccgcatacatggcgaaacgaatgccgaaaatcggcggaacctatttacaagcggaatccgaagtcgctgctattaacatggtgctgggcgcagcttctgcaggagttcgggttatgacctcctcttcttctcccgggatttctttaaaaacagaaggtatttcttacatagctggctccgacctgccctgcctgatcattaatgtgcagcgcggcggtcccggattaggcggtatccagccttctcaggcggactattggcaggctacccgcgccaccggtcacggcgattttcatattctggtattcgcgcctgctaccattcaggaaatggtggatctggtttataccgcttatgacaaggcggatgaataccggatgcctgctatgattttggcagacggcatgttaggacaaatgatggaaccggtagaattcccagaaaaagaagcgaaccatcaaattgaaaagccctgggctaccactggccatcaaaataaacgccctcataatatcgtcaattccctttatctggaccccaacgaactggaacaaaaagttgtggagcgttttaagcgttacgaaatcatcaaagaaaaagagccgatggctgaggaatatttggtagatgatgcggatatcgtgctggtcagctttggcgctaccgcccgtattgtaaaaagtgcggtcaacagtgctcgctctatgggaatcaaagccggtatgattcgtccgattaccctgtggccgttcccggaaaaagtaatgcagaaggctgcaaaaaacgcttcctgtttcctgagtgtggaaatgagcatgggccagatggttgacgatgttcgtttagcggtcaacggtgaaaaacctgtttacttttttggccggaccggcggcattatcccctccccggctgaagtgttaggagaaatccaaagaatcatgggaggtgcaaaataatggcagtcgtattcgaaaagccgaaaactctaaccgacgcaacgcttcattactgccccggctgtacccatggcatcattcataccttagtggcgcaggcgattgaagagctgggcattgaagggaaaactgttggcgttgcaccggtaggctgtgcggttatggcatataattattttacttgtgatatggtggaggcgccccacggacgtgcgccggccgtggcgaccggtttaaagcgggcgctgccggataatatcatctttacctatcagggcgacggcgacttagccgctattggtacagccgaaacggttcactccgccacccgtggcgaaaacattaccgttatctttgtaaacaatgcaatttatggtatgaccggcggccagatggctcccaccagcctgccgggacaagtaacccaaaccacgccctatggacgcgacacatctgttgccggatatcctgttcgggtctgtgaaatgctctctacccttgacggcgtcgcttatgcagagcgcgtttccgtggacagtgttcccaatatccgcaaggcaagagcggcaattaaaaaaactttcgaaaaccaaataaataaaaaaggattttccattgtagaagtactttcctcctgccctaccaactggggactgacgccggctgaagctttagactggcttcgggataatatgattccctattatcctttgggcgtttataaagatacaacaggaggcgaaaaataatggcattgaaaaactttttacttgccggatttggcggtcagggtattttgttttccggtaaagtaattgcctattctgggctgatggatgggaaagaagtttcctggctcccctcctacggcccagaaatgcgcggaggtactgcaaactgtagtgtttgcatctctgatgatccgatcggctctcctctggtcttgtccccggatgttttgatggcaatgaatctgcagtcttttgataaatttatcaatgcggttgtgtccggcggtactgcagtgattgacagtactttggtagataaaaaaaccgaacgcaccgacattacgtcaatttatgttccggctactgccttggccagtgaaaacgatttacagggattagctaacattattttgatcggtactattttaaaacatacggagtttgctgatttcgaggcggttaaaaaagcgatagataaatgcgttcctcccaaaaagcaccatttgattgaagcaaatctgcgtgcgatcgagttgggtatgaaatattaatcataattttatttttatgagcgttcaggtctttgttgcctgaacgctcatttgttgtttcccagtcttgcatctttcgaataaagcgcaataaaaaaggaaatggtttcacaaactgtaaaaccatttccaaataatttatgctgcttcattgcctgaaccagaaatatccggcacagtcgtctgttcttcaagagcatctgacactttggggaccaaaggattcgactatggaaaaactacttcttccccattcaaaaaagcgtcaaactgttcttgaaaacggctggcaaacgcacggcatctcgcaggatatgcttctggcacagcttctgcatactgttctacaaatgtatggaattcttccaaataattctctgcgaaagcttccatctcctcataatcttcatcatattctgtactgtcatcatagtaaacagatatattatccagcagctgttcgacagttaaatcatagcctaaacta

SEQ ID NO: 3431 - DNA, 9587 bp, Unknown
  16S sequences of unknown bacteria
gatagaaaatacaaagacgttgtaaataagtaccattgaggaggtaatcaaaatactttttcttaatagttgaggctttccgagagaaagaaagacggtgtttgccgcaagtgctataatgattaatagggataatagtccttgccaggatattgcgcccaaaactatcataatccccgcaaacaaaactgcggaaagatagcttgccttcgtgccttccttttgaaaataaaaggcgatatttcttacaatgcatacaatatttaatacaagacccgatcgcgcctctaaaaagaaatagccgatacaggtaaatatacaggcaaacgtttgtataatcaaaatccgtctctttgtatttgcctgataggaaaaaaatgtgacgagcgttgcgataataccaaaaatttgtcctatgatcatattcggcataatcgtcctcataaaaaacacgttgttagtagaaataaaaaataaaaacctaaacaaaaccgtaggcaggttcgatttaggttttattggtggacagaggtggattcgaaccaccgaagtctgagacgtcagatttacagtctgatccatttggccgctctggaatctgtccgtttggtgccttgaggtggaatcgaaccatcgacagagggattttcagtcccttgctctaccaactgagctatcaaggcgttgatttttcggcttgtccgccgaaaaacgagtaaaaaaatggcgacccaaacgaggctcgaactcgtgacctccagcgtgacaggctggcgctctaaccaaactgagctattgggccgtacataaaaagtataaaatttggtgggccttcacggattcgaaccgcggaccaatcggttatgagccgacagctctgaccactgagctaaaggcccacacgctgcttgggcgcagttttccgtcgcacaatgcttgtatatgataaactatttgagataaaaagtcaagcgttttttggtaaaatttcaaaaaaaattttcgacaaaaaacggcggcattccgccgaaaagcgcaaaatactcgtttgcgtatcgggtaaaatggaagcacacaaaatacgggaggaaaaagacatgaatctcgcggctcacttagcgaagggaattttatatattgtcatggacggagaaatcgacgagcattccgctgcggacgcgcgccgtatcgcggataaattgatagacgaaaatacgcaggcggaaaaggcggtgttcgatttggagaaaatcacctttatggattcgacgggcataggctttctcatcggcagatacaaaaaactcaaacgctacggaatccccatgtacataacgaatcccaatctgcccgccgataaaatactgtctttaagcggcgtttatacactaattccgaaactctgagaatcggagcggaacaatcaaaaaagagcaaggagaaagagcatgaaaaattatatgaaattggaaatcgcggcaatcgggaaaaacgagagtttcgcacggagtaccgtagcggcattcgcgctgcccctcaatccttccctttcggaactttcggacatcaagacggcggtgagcgaagcggtcacgaactgcatcgtccacgcctatggaaagaagggcgaagcggaggagcagacaaacgaaaaccgaattttgatcgagtgcgaaatagaagatacgccgggcggagaggactcgggcggcgttttacatatcggcatcaccgactacgggtgcgggatagaggacgtcgagcaggcgatgcagcctttttataccactttgtcggacgatgagcgctccggtatgggcttcacgatcatgcagaccttcatgacggacttttccgtcacgagcgagaaggggaagggcacgacggtgaggatgagtaaaaaattcggcgcaaaggacacggtcgatgcttgatgaaaaggaaacaatcgaatatatccgccgcgcgaaaggcggcgaccagaccgcgaaacaggcgcttatcgacggcaacgtatccctgataaaatgtatcgtcaagcgctatctcggcaaaggcgtggaatacgacgacctttttcagctcgcctgtatgggatttttaaaggcgattacgggctttgacgagagcttcggcgtgcgtttttccacatacgccgtgccgatgatcgcgggggaaatcaagcgctttatgcgcgacgacggttccgtgaaggtatcccgcgccatgaagcagacggcaaaggatatgaatacctttgtcgccgaatataccaccgcccacggcacgcagccgacggtggggcagatcgcggaaaaattcggactcgacgaaagcgaaacggtgtttgtgatggggtcctcgaaaatgcccgtttccatttacggaggatccgaatataaagacggcggcgaaagggaacttatcgaaacgctgcccgccgaggataatcaggaggagatgatagacaaattactccttcgcacagcgatcgaatctctccccgaacgtgacagaaaaatcattgtccttcgctatttccgcgatatgactcaaagcgaggtggcggaaaagatcggcgtgagccaagtgcaggtgtcgagaatagaaagccgcatcatcaaggaattccgggaaaaacttacggggtgaaaaatacaaaatccgacgcgtgacggcgtcggtttttttcgtgaatatagaaaaacgcttgaaaatcggtcgcgcgaaattttccgccgcgaaaagaaggcgggcaaaaacttgcatcggttaaaaaagcccgcaaaaaggagggattcgcaggcatattctctgtcttgctgaaaatgatttgcgtaaaataagtgcaacaagagaaaggcgaaaggcaggttgcaataggaaatctgtaaagcaaagattataacagaaaaatcgcttgactttttctttgttttagattataattttaactattcaattgcttttatatgtcttgtagcgaatgtgtatttcacggaacgagcgcgtgaaaatatttccctgacagactttaagcaagagaaattcaaatgatgtaaaaatatggggcttatcttcatctatcatgctcgttaggatgatgagaaaatagttgcgtgtgacttttagtagttcccctatgttccattgctttacacgacaaaatatcaagccaatagcgaatctgtattgttggctcgttttttgtggtgtaggcaacaggttagcgatgtgatccatgcacccaaagtatggattttttattcgcttggaaggaggtaaatatggcaaaaggaaaagtttcgggtaaaacgcatacgcaggcacaattaaatgattgggcaaatcaaaataattccaataacaaagcatataaagccaatacggacaatcgtgctaaccagctcaatcccaagcaaaagactcaccaacaacttcataatcaagaaagacgttcgcaaccatgggtagattgggcacccgattatattgattactcaaataattaataattcagagcagatgccgctaaccatctgctcttttttatgaaatgtataccatatccatatctcacgaggctacaagtagcctcgtgagtccacgaaatcaaaccaagaaaagacgtagtattcactacgtcttttctctgtcaaatttattaaattttctatttcctatggaacgcacccaaagcctgattttcctcttttgcaccgatcggataattttaagaaaaacgtcctaaaacgtccttccgcttattataaagagaatcaaaattccctcttttcctttgcaaaagccgcggcaaggcataaggcggaactcaaaaaggatgccgcggtaaacacgtaaaatacccaggggatattcagttccatagagatcccgctcgccgcgaccgccgatctgtccgccaaaaggggaatgagaataaaacaccagaccagcacgacgacggctgtttcgacgattcccgcgagggcgaagggttttttcgaatagaagcgcgctttgagaaaaagaagcagcgagaggatcgccacggcaaagaagtaaacgagaataagagcggcaatgagccgcctcttagacgtcagcgcagaggaagacatgacgatcgtaaccagagcgaaaacgaaaagacacgcgcagagtatgagattgcaaagcagcaatttatgccttttgtccatatcatatagcctcgttaaaaattataggacccgaccgcgcgcagcgatcgcggaaggattgaggaaaatgccgaaagcctgaaaaagaaatggaattttcatttcggcttgtccgcggctttgaaaacgcagtcgttggggtagggaagcattcatacgataaacagtatagcacaatgaaaatcgtttgtcaagaggcgttttttgtttgccttcttgaaaaaatctgctataatatagatatggaacaaaaaagaggacagagttcgtggctcggcgagatgaccgaggaaaagaaatcgggattggtatactcggcggcggtcgcggctgccgtgctgctttccttcgtgctgctgatcgtcgtcagcgcggcgggatataccgattcggcgcagtacgaaaacgccgaatggtatcgttacgtcagctttctcctggcgcccgtcggctttgccgccgtgggggcgatttattttttcaagacgaaaacgcccgtcagggaagtcgcgggaaagtgccgttttaaatattttgtcctcgccgtaacgttgcaggtcgggctgttgtccctcgcgcaggtgaatacgctcttcctcgaatttttggggcgcttcggatataaaagcccggagatccggcttccctcgttaaacggagcggggcttttcggcgtccttctcaccgtggcggtgttgcccgcggtctttgaggaacttatttttcgcggactccttttaaagggattaaaaaatttcggaacggtcgccgcagtccttctttgcggcgcgctgttttctctctatcatcaaaaccctgcccaaacgatctatcaatttttatgcggcgcggcgttcgcgttggtcgccgtcaaagcgggcagtattcttcccacggttctttcccattttttaaacaacgctttcatcatcgtgatggaaaaggtgtcgggcggagaaattccccgaagcgtacagattcctctgctcgcgttttccgccctctgtcttgcgggaagtcttgcctatctgatttttttcgataagaaatccgcttcggcaaagggaaaagaaaaagcggataaaaagggctttttcctctgcgcggcacttggaatcgtcgtctgcgccgtggtgtggctgagcgcgttcgccgcgggactcggaggctgagtatgcagaagctctgtttcgtagtcgtggggaaaatcaaagaagccttttatcgggacgccgtggcggaatacgtcaagcgtttgtcccgcttcgccaaggtggagatcaaagagcttcccgaaggcgcgaatcccgaagcggaagcgggggagattctccgcgcgatgaagggatacacgatagcgcttgccgtagagggcgaaaaggcgtccagcgaatcgctggcggcgcggcttaaaaaactctgcgacgagggcagggaagtgactttcgtcatcggctcctcctgcgggctttcggacagagtgaaaaatgcggcggattggcggctctccttttcggacatgacctttccgcaccagttgatgcgggtcattctcgccgagcaggtctatcgggcgtttatgatcaacggcggcggcacgtatcataaataggcgcctgcgcaaggcgggacaatgcaaaaacaaagccgtgcctgcggattttgcggcaaaacgtgtcccgaaagcgtccttttccacatatactgatatgtggatatttataaagagataagcgctttttacgaaagcgcggatacggaaaaacgaattttcgggaagagcgtcttcggacgcggactttacgccgtaaaactcggagagggcgcgcccgtgggaatcgcgcagtacgccattcacggtcgggaatggataacggcgaaactcgccctcgcgcattttcggcgggggataaccgtaggcagcgtgtggataattcctctgatgaatcccgacggcgcgcttttgagcgggtacggtgtcgatacggctttggaaagcgagcgcgccaagcttctgaaaatcaacggctccttcgatttttccctgtggaaagccaatggggcgggggtggatctcaacgtcaatttcgccgcgaattggggggaagggaagcgcaacgtccgcgttcccgcgagcgagaattacatcggtccctcgcctttttccgagccggaaacgcaggcgcttaaaaaatttaccgaggaaatacgccccgattttacgctcagctatcacaccaagggcgaagaaatctattggtactatcatcaatcgctcgcggcttgcgcgcgggataaacggctggcgctcgccctgtcggacgctacggggtatcctctgtgtcacgcgggcggcagtacgggcggctataaggattggtgcataaagaaattaaagattccctcctttacgatagaggcgggaagcgacggcttttgccacccgctcggagaggacgagtacggggatgtcgaggaacataatttagacgcgctgcgcgctttgacggaggcgtataaagcgcaaaagtaaacgacggataaggaaagaaacgataacggaatgaaaaaattgtcgagagaggaaaaattcatgcgcgcggcgatccgcgcggcaaagcgcgcgctgaaagagggcgaagttcccatcggagcggtcgtcgtttacggggagaaagtggtggcacgcggctataaccgccgcacgaaaatgcagctcgcctccgcgcacgcggagatgatggcgatcgactgcgcctgccggaaattcaagagctggcgcctgcccgaagggtgcgaattgtacgtcaccttggaaccctgccccatgtgcatgggcgcggcgctgggcgcccgcgtggacaagctctttttcggcgcttacgaacaaaaggggcgctcgctgacgaacgcgcttgccgagtcgaatcttctcaaccacaaaacggaagtgaagggcggggtggaggagcaagaatgcgcgcggctattgaccttctttttcggggaaatgcgcaggaaacaaaagcgcgaaaaagaggaaagaaaaaatagtgaaaataattgcgggagcggcgcggaaacggttgactaaaaatttcaaacaggctattatattactgtaacgaaatgacaaatcataaagaaatcaaagttcgagagaaatcgtaaggggtccgggaagtcatacggcagataaaaaaatccgttcgcgcaggacgcggcaaagcgtcttaaaaaagagcggataaaacatacaaggaaggtacttcatgataactcacggcaatgaaatcaagttgttctccggtaactccaaccgtcctctggcggagtcgattgcccgcaagctcaataccgagctgggcggcatcgaggttacctccttctccgacggcgaaatcaacattcacatcgaagaaactgtccgcggcagggatctgttcatcattcaatccacctgtacgcccgtcaacgacaatctcatggaattgctgattatgatcgacgcggcaaagcgcgccagcgcggggcggatcaccgccgtcatgccctatttcggctatgcccggcaggacagaaaagcccgttcgcgcgatcccatcaccgcaaagctggtcgccaatcttatcacggcggcgggtgcggacagagtgctgacgatggatttgcacgcggaacaaatccagggctttttcgatattcccgtcgataatctcttgggaggtcccacgctttacaactattttgcgcgggaggggaacatcgacgtggtggtttctcccgacgtcggcagcgtcaagcgcgcgagaaaggtggccgagaagttcggcgtacccattgccatcatcgacaaacgccgccccaaggcgaacgtcatggaagtcatgaacatcatcggcgacgtaaacggcaggagatgtctgatgatcgacgatatgatagacaccgcaggcaccatctgccagggcgcgcaggccttgaaagacgcgggcgcggcggaaatttatgcggcgtgcacgcacgcggtacttagcggtcctgccgtggaaagattggaaaattccgcgatcaccaaattggtgatgctggacacggtgcatcttcccaaggaaaaaatgcgggataagttcagtattctgacggcggcggatattttcgccgcggcgatcgaaaacgtctatctcgataagcctatgtcaaagctttacgactgagaaaatttcttcggaacgaaaaaaaccgccgtcgcccaaaaagcgccggcggttttggtcggtgtttgcgccgcgctccgtcgaagccgcggggaggaacaaagcgcgcgaaggaagcgaaattcgcaaggcggatcgcctgcatcttacctgcatcttataatttacggacggaagtcctacgcgctccgcggaaagaggatcctttttgcggggcgggaaacgagggagcaatatgtatctgatagtgggactcggcaatcccgagaagcaatacgaaaaaacctttcacaacatgggtttcatcgcggcggggggcgccgcggaagccctgggcgccaagttcaggaaaaaggagtgtgaggcgtccgtcgcggaagcgcatataaacggcgaaaaggtgattatcgcccgccctttgacgtatatgaacaattcgggcagagcggtgaagcaattgatggcgaaatataagatcgacgaggagaatcttctcgtcgtttacgacgattacgatctcccgaaaggaaaagtccgcattcgcgcggggggcagcgcgggaacgcataacgggatgcgcagcatcatcggcgaaacgggacttaccgcgtttccccgcatccgcatcggaatccgcgacgaggaagtgaagattccccttatcaattacgtgctttccgaagtaaggcgggaggattacgaacttttcgccgaggcgtgcaaaaaggcgggcgaggcggcggcggagtttgcccgcggcgcttcgatagagatggtgatgaataaatttaattgagggaaagccggacgaacgtccgcgctgcaagttcagaaaatgcgccggaaacgcgcggggcgaaagaagcgtagccttttcggaaaagttgattttttcgatcggatgcaaaacgacgccgcgatcgtttgtttttgcgcaaaagccgaggctttcacgcctcccgcgcaggattgcggcgagtggcggcgtccgattgcgaaaagggcggaacgggggataattttttctcggagaggttgatttttttgaaagaaagacgtataatagacgggaaacaatgaaagaaaaattctttacggttgacaaaataggaggggaatacccccttttcggggaagaaatccgccggggcgcgcccacggcgggttt

SEQ ID NO: 3432 - DNA, 3845 bp, Unknown
  16S sequences of unknown bacteria
ttttctatatgcgctcatgccgcgcggcaccccctttcttgacgtcaagaaaggggggaaagaagcgtcagggggcaaagccccctgaacccccaggtggctttgtcgattttctctcgatgaaaatcgactatgaccatgttgcccgaacctgcccatacaaggagggggcccggggcccccggggtccgattgggcgcggaactgaaacaatacagcggccccagggcttggggctgccggaattagtctgccggcagcgaaggggatggggatttccgcataaaacagatccctaccacgagcagcaggggaaagatcaccgccacggcaagcccggccctgagcccccactgatcaggcatcagcccgctgccctgcatagcctcctgcaggaaaggcaggcgctgggcgacatccgacaccgcgccggtcagccaagggccgagtgaacagccgaggtcccccgccagcgccagcatcccgaacagcgcggtgcccgctccggggaaacgggccgccgacaggctgatggtgccgggccacatcaggctgaccgacagcccgcagaaggcacagcccagcagcgccggcagaggcgaagggacgaacaccgtcaccccataacaggcgatgcagagcaacgcgctcgcgagcatcgcctttttcaaatcaaatcggcggccccatatgccatacaccgtccgtcccacccccataagcaggccgaacaggcagggccccagcaaatcccccatcaatttggggacacccaggcccttttccgcgaacagggaggaccattgggacatcgaaagctccgccgcccccgcgcagagcatcatcagcagggcgacaaggaatacccgggaggaaaagagcgtttttagcgggactttgtcctcctccgccggaggcggcgccagaggcatccggatgacacggaaaagattgaccaggggcacggcggcccacagcagcggatacacccaccacacgccgtcccccgtgataccgatgcagaccgtggtcgtcaggatgaccagcacctgtccccaggaataaaaggcgtggagcaggctcatcgaggaggctttggcctcccccggcagggaatcgacgatggggctgatgagcacctcgatcagccctccccctaccgcgtagacgatgacggacagggtcagcccggtatatggatcgggcagcagacggggcagggtgcccagcatcaccagaccggcgacggaacagatatgggcgaggacgagggcggcgcgatagccgattttatcgacgaatttgaccgagagcaggtccaccaccagctgggtgccgaacgtcagcaggatcaggcgcccgatctgttcaaacgacacgtcgaacgcggtctggaaaaccacgaaaaacaagggggcaaggttggcgataatcgcctgcacgatataccccccataacaggcgtgcagggtgtgcgtatatgtaagcggtttcagtctcataagcggtctccttgttgtttattgctttgtcacagtacccgatttgaagccggatgtcaagagggactgtacggatgcgcccttccatccggccgccttttcccatcctatgccgggataccggatccggtttcagcagccttggggatgaagacggccgttccctcgaattcggtcgatttgtttcgtaaaaccccactttgttgaaattttcacattgcaaaatccagttggatcatgtataataggtatattgagctctcctccgcccgggcgggcggaaacagggggtggatccacgcggcatcgaacggaagcgcgctgtctcttcggcgtttctgcgcggccggacccggcggcttcccacctccagcgcttccatttgtaaggaggaataggcaacatgcaaaaaaagatcagcaccctccccttcaaggggaccccggagcaggaagaaaagctccaggccgtcattgccgcgaaccggcaggatcccagccgtctgatgggggtcatgcagcaggcacaggacatctatggatacctgccttttgaggttcagcagatgatcgccgacggcatgaatgtgccgctggaaaaggtgtacggcgtggcgaccttctacgcccagttcgccctctcccccaaaggcgtgtacaacatctcggtgtgtctcggcacagcgtgctacgtcaagggctcgggagatctgttcaacaagctcagcgagacgctgggcatcggctcggacgaatgcaccgaggacggcaaattctccctgaccgcctgccgctgcatcggcgcctgcggcctcgccccggtcctgaccgtcaacgacgacgtatacggccgcctgaccgtggacgacattcccggcattctggcgaaatacgccgactgatatgcgggagctgtcgctgaacatactcgacatcgcgcagaattccctctccgccggtgccggcctggtcacgctgaccgtggatgaggacagcggggcggattctctcacgctgagggtggaggatgacggccgcggcatggacgcggataccctccaaagggttcgggaccccttctacaccacccgtaccacccgcaaggtggggatgggcatcccgctcttccgcatggcggcggagatgaccggcggctccctcgatatcgtatcggagcctgggaaagggacagccgtgaccgcctcattcagcctgtcccatatcgaccggatgcctctcggggatatggcggggaccgtcaccgccctgatccggctcaatcccggcgtggatttcgtgtaccgtcacacggtggacggccgttcctttgaaatggatacgagagagctgcgggcgcagctgggggacgtgccgctgtccgaaccggacgtgatggaatggatcgacggctatctgagggaacaggaagacagccttggcggaaccgcctgacggcggccgccccgatttcgacatttgaattaggaggtacccttatgaaaaccatagcggaactgcaggccatccgggacaaggcccgggaaaagatggccgtgcgggacggcgccgaagccgagacccgtgtcgtggtcggcatggccacctgcggcatcgccgcgggcgcccgcccggtcctgaacgcctttgtggaagaggtggccaagcgccatttgaacggcgtcaccgtcacccagaccggctgcatcggcatgtgccagtttgagcccatcgtcgaggtgatgatgccgggcaaggacaaggtcacctacggcaaggtgacgcccgaaaaggtggagcgtatcatcgtcgaccacctggtcaacggcaatcccgtggcggaatacaccgtcgcgaatctgatgaaataacgcgggagggaaaaacggatgtatcgttcacacgtactggtctgcggcggcaccggatgcacctcctcgcacagccaggaaatcatcaatgccctggaaaaggagatcgccgcgaacggccttgccgacgaggtcaaggtggtcaagaccggctgcttcggcctctgtgccctgggccccatcatgatcgtctacccggagggctgtttctattcccgggtgcaggaagaggatatccccgaaatcgtttccgagcacctgctcaagggccggatcgttacccgtctgctctatgacgagacggtgggcaaggacgagatcaaggccctgggtgaaaccgatttttataagaaacaggtccgggttgcgctgcgcaactgcggcgtcatcaaccctgaatctctggacgagtatatcgccatggacgggtatcaggccctggccaagtgcctgaccgagtatacgccggagcaggt

SEQ ID NO: 3433 - DNA, 32759 bp, Unknown
  16S sequences of unknown bacteria
cacagcgtgtttcctctggaagaagcgctgtcggggcgaggcccctcccgccgctttggcggcaccgcccttcttccggctttctttgatggtcgagtgggaataatacattatagcttttaggtggcttgagatcgtttgatttcaagccgctttttatgtagagagagaatgttaccgggttttgggtaaaagtagaaatctgactattgctatatacattgaccgcaaaacaggtggaaaaatttatgattatatgttattatagaacatctctacggatgaataggagagacgaaatgagaaaagtaagtttcatattagtcgcgtttttatttctgtttcttacccttgctggatgcagttctgatattgtaaaaattgaaggatatgaatggaaactaacgcttatccaatccaatgaagatggttctgttgtaggctgcgcttccgagcattatgaaatgcataaagagattgagggacttgtcgtaattgatcttatatgttctgcgtcagacggggaattttccattaccgataagactaacgataagagttacaatgggacatacaaactcacgactcaaaattcaaaaagtacgatttatgagattgctacagctgaaaacgccggcaatgcagttacggcatacaccaaatataaggatggttttgccgccacatccaaaacgcctacgcttattattacacttggtgattacacattaaatttccaaacagaataacggcatgggcgtcgaagaaacgtagcaccttattttgtcaattttataaagcccactgaaattattcttgttacccattccgataacagaatgataatacgggcggcttagcactagataatacagatacatcgtataatcacaaaagcaggactaacaagaagaaaaaagacataaacagaattgtttagctctcgatgcgggcggcgccgcagacgggacgtagccccagagcctttcaccggctttggggcttctttttgcgttacagtatatttttcagaataaacccttgacaaatatccgaaatcggactatactacacaaagtccgaaatcggactttgtgtttggaggtggagagatgccgcaacgggagacagggaaacggctgtccgagtacaacaacatcctcaaggaaaacgacaacctctaccgcggcgtagccaaacgcctggggctgccggagtgtgctttttggattttatatacccttcgcgcggacagcgccgctctgacgcagagcgagatcggcgatcttctatatcagccgaagcaaacggtcaattcggctctcaagaatctagaggcggaagggtatatcgaacggctccggacggatgaccgccgcagcaagccgatccgcctgacggagagaggcgccgaactggcggaacggacggtggataaggtgatcgcggccgagcggaagtccctgctggatttgaccgaagccgagcaggacgcctttatcgggctgttccgccaatataccgacgcgctcgaaagacacatgcgcgatttggccacatgagtatgcggaagaggggtatccatgcgccgagaccggcgccggaaggatgacacgatgagaatccagttatcagaccattttacgtacaaaaaaatatggcgattcagcctccctccgatcgtgatgatggtattcacctcgatatatggggtggtggatgggctgttcgtgtccaacttcgtcggtaaggtgccctttgccgccattaatctggtgatgccgttcattatgattctaggcgggttcggttttatgatcgggaccggcggcagcgcactggtggcgaaaaccatcggcgaaggggatcgggagaaggccaaccggtatttttccatgatgatccagctgaccctggccgccgggatcgtcctgtcggttatcggcgtgctgttcatacggccgatatcctatctgctcggagcgaccgacgccatgatcgaggactgcgtggtttacggccgggtggtgctgctgttcaatacggcgttcatgctgcagaatgtctttcagacctttctggcggcggcggaaaaacccaagctcggcctggcggccaccgtcgccgcgggtgtcaccaatatggcgctcgacgccttgtttgtggcgggatttcgatggggggtcggcggcgccgcgctcgccaccggaatcagccagtgcatcggtggggtcctgccgctcctctatttcctgcggcccaacagcagccttctgcgcctcacaaaggcccgaccggaaggcagggtattgctgaaggcttgtgccaacggctcgtctgagctgatgacgaacatatcggggtcgcttgtcagcatgctgtataatgtcaggctgctcaaattcgcgggtgaaaacggcgtggcggcatatggggtcctgatgtatatccagtttatttttattgcgattttcattggatatacgattgggatggctcccgttgtgggatatcactacggcgcggaaaacaccggggaactgaaaagcctgctccgcaaaagcctgttgctcatgggaatcgccggcgtcttgatgatgctcgtcgcacaaatactggccctgccgttggcggccgttttcgttgggtatgacgcagagctgctggagatgacgcggcatgcctttgccatatttgccttttccttcgttctggcgggattcaacatttttgcctctgccttcttcacggccctgaataacggcctcgtatcggcagccatctcttttctgaggacgctggtgttccagatgctttcggttttgatcctgcccctgcttttcggcctggacgggatctggtgggccataacggccgccgaggcgtttgcctgtatgatttcgctggcctttcttgtggcgaagaggaaaacgtatcggtatatgtagagaagacggaaagacggccgagggcggtccgctcttttccataccatggggaacaccgcccatatccgtctttttccgcgcctgtatggcgaggcggaggtccccgggccgctaaaaacgagcggggacacgtgaaaaagcgcacccggaagggatccggatgcgtgtgatcgtccggcgggggccaaaagggccgccggatttacatggctagatacagcagcgctatgataagctccactcttgcaccgttttttacgagtaaaaaggccaggaggagcagaaagagctgctccggatcacttccgaaggccgacagcaaaccaccgtcaccccgcttttccggggggcatttggcgatttcctggatgggctccggctttggccgctccgccgcctgctgccgtggcatatggcgggccttgtattccgagagcggctggaatcccgacgcatgcatccattccgtccggttttcggccagcccctccgccgtgcggccgcggggctctcccgtatgtgctgcccggcgttcctgctcgcggagttcccgtacccgctgctcggcctcccgctgcattctcatgatgtctgtttccatgccgtctcctcctctccgtctggtcagtccaccttaaaagagccctttctcctgaataaggggcagaaccttcatgatccgcaggatctggattgcatcgtccagccgtttttcccgatctccatgcagataaggccgcaaggccttgagcagggcggtgttctcatcgtctttgttcaggtttcccatcaggggcgcaagcttgagcagcgccgacaagtccggcatcccgccgccggatgccgccggcgccgcaggcggcggggatgccgtctcgggagcgggcgccggaatgggactgtcggacaccggcgcggatttgccgccatccccgccgatgcccagcgcctccatcatgctctggatccgtgccataccatccggggaaccgagcaaatcgctgatttttttgttcaggtcgtccattcggaattctccccttcccgtttccccggtttggtctcttatagaacctggcggtcgtgtgttatggtttcgtgtttcccaggagcttggcaatcgcttgctgcgcctggggggactgcagaagctgttcggccttgcttcggtcggccgtcatggcgttcagcttggcggcgttttcggggtcgagccggcccgccagggcagacagatttccttcggtaacggttttttcgagctgctcgggagtggtccccagccgtttgctggcgtatgcgagcagggctttcaattgatcaggtgtgacttgactcatgcagatcatcctttccactcggcctgttttcatcatatgacgggctggaggcatttatgtgaaacaccggaggggaacctccgcaaaggaggcaaagcaggtgcttcgattattggttttgtcggacagccacggggatgccggatcggtgtaccgcgctgtggccgctcagcccgaggcagccgcggtgctgtacctgggggacggcgccgccgaccttgcggccgcggccgccgcattccctcgccttgccttttatccggtgaggggaaacggcgactttgccccggatgcggcgggtctgccctatgcccgggaggaatgctttggcggcaagcggttttttctcacccatggacacctttacggggtcaagaccgacccgctccgggtggtatacgcggccagggaacggggcgcggatattctcctttacggacacacgcaccggcccctgaccgattacgaagacggcctgcatatcctcaatcccggatccctgcgggccggagggacttacggggtggtggatctatccgatgccggcgtggtgctgaacatcgtccgctgccgtccatgaccacctccctaccagtgtatgcggctggtcggggaaagtgcctgtacaatccctttcggctgtatgccgggcggcttgaaaaaccgtccggaatgcggtatgatgcggttgggcttgcccgaaccgggcggcaggcaagccgcgggaaggaccggcgcccggttaaacctatgcataggagaggatatggatgtggattggctttgattccccggcggtccgcctgacaggcagatggggtgtcctggatgggaaccgcgcggtggcgacggcggccggcgcttacctggaggcggctttctatggggaactggcgaccctgcggttcgatatggaggggacggcgcatccggtcccccacgtttggatctcggtggacggcggcgcccgggcggaggcccccctggctccgtatctgcgggtcatggcgcagggggagggtccccatacggtgcgtgtgatatacaaaggggcggtggagcagcaggcgcggtggcgggctccgctggtggggcggatcgcattcctggggctcgaggcacggcgggaggctgttctcgaaaaggatacccgcccggtgatcgaattcgtcggggattccattaccgaaggggttctcatcgatgacggctgccgtccctatcccgacgacgaccagatgaaccggcccagccaggacgatgtaacggccggatacgcctggctgacggcggaggcgctggatatgagaccgatcatgatggggtatggcgcggtcggtgtcacgcatggcggctgcggcggggttcccaaggccgccgacgcgtatcccttctgcttcgaggggatgccggccgtcacgcccgagccggcgattgtcctcatcaaccacggggcgaacgacggaggagcttcggcggaagactacgcggcggaataccgccgtctcctcgaccaggtattcgctcgctgcccgaacgcccaggccgtcgccctcagcgctttttgcggcgcccatccagaggcgctgagggccctggtggaagcctacaaccggcagcaccaccgggatgtcctcttcatcgattcgacgggctggattccgcccgatccgcttcatccgggccgggaggggcaccggatcgtggcggagcggctgacgatcgcactgcgggccgggcttcatctgtgattttggtggtatatgcctgctgactgtcgcggaatattcacaaaagaggtttgccattccggcaaaagcgtgataaaatagaaacattgggcgcccgcatcagggggccccacagtcctggaacaggacgaaagagaagggataaccgtgcggtatcggatcgaaccggtcacgccgcagaaccggcagaaagcctgtggcctgcatgtcgctttaggacaggaaggctttatcgaaacggtgcatgaatgccttatggaggcggctgaggtcccctgttggcgcccggtgctcctgtgcctggaagagacagccgtgggatttgcgatgtatggcctttgggaggatgaaccgcctcggggccgggtgtggctggaccgtctgctcatcgatgcacggtatcagggccagggtctcgccaccgcgtttttgccccggctcatccgtcggatccggaaggcctacgcctgcggcacgctgtacctgagtgtgtatccggaaaaccggacggctatccggctgtacgaacgttttgggttccggccgaatggagagcgggatatccacggcgaacacgtgatggtgctggagtttgaagggtcggagccggacaatggcatccgcccgggaaaggaagaagcaggttgaggcgcaaccacatctatccggaggactgtatccccggcatggcggcccggatccccggcgaaacggtggacttggtcgtcgccgatccgccctatttcaaagtggtgggggaaaagtgggattatcagtggcgcaccgaggaggaatatatcgcgtggtcgatcacctggttccaggaagctgcgcgtgtcttgcgcctggggggcagcatgtatctgttcgggtatttccggatcctgtccctgctgcttccccatctcgaaaaagaggggatccggctgcgccagcagattgtggtggacaaggggatccaggcggtgtccgggcgggcgaccaggaaatacaaaatgtttcccaacgtcacggagagcatcctttttctctataaggatcccaaaccctttgtccgccagcttcttcggcggcggcagcaggagcgggggctgacggccaaggaaatcaatgaacggctgggggtcaaatcaaacggcggcgggatgtggagtatctacacgggagataacgtctgtgagcagcttcccaccccggaatattgggataaactgcaggccatcctggagttcacctacccttatgagcgcctggccatcacgttcaatccgcagatgggctacacggatgtgtggaacgacatcaatttttatcgggaaaaggaccggatccatccgactcagaagccgctggagctgatccggcgattggtccttgcgagcagccggcccggtgatctggtactcgatccgtttatgggcagcgggtccacggcggtggtgtgcaaacagtccggccgggcattcgtcggttttgaagtagatccggaatatcaccggaaggcccagcagcgggtccggaaggcttcggcagcagggccggccggggaaacggaaccggagaacatataaaggaacggggcggagcctgcaggctccgccccgtctgactcggcagcttaagcggccggactgttttctttcagctccggaaaggcgctgaggagatggggagggatccggctgaggtggggacgcagccggggaagatagattctggacaccagaaagtcgcagagggcggtgttgtcaaggcggtttttgatccggtattcctccatgcaggcgaggaggtcgcgcttgttttttctggaagtgcgtacctctggagtgagctcctggaccagggagaccagcaaatcccgtttgagagtggtggattgtgcaaatgtatcaagggaagggagctcgtctacccgtgtgttgccccgcgtgggaaaaaccgagatttcgattttacccgccgccgtgatggttgagcggtagatcagcgtcggctgggtcaggcagaatttgatgtgatacggccataagtccagcgccgcgtgagactcggaaacaggacggatattcaggtagtaatccatcagcatataggcaaagcccttggtcttcggatccgcctgccagatggagacctggacatcggagtggttttcaatcggctcgaacaggacgaaatagtaataggccggctctaaaatccgggaaaattccgcatcgtcgcggatgttgatgagccatttggaatcctttttccggtcgatattttccgagccacagatagagcatgcggcctcgatgctggagacggcggcatggcagtccttgcaggaaccgagctgatccacacggtagcatgttttgatctccccatgggcattttcggggaggatcaggtctcggcctcgggcaccggtgcgtgcgccttggtagccggtgacgacgcttaccagatgctggccgatataccccatgcgggcctgcggtgtttgtttcgtaagggctgaccagaaattggccttggcgcgcagatcaatgtacagatcccgcagcagctgcttcgaggcattctcggttccgagagtgtaggggttcttcggcataacggtccctccttgtccaaattgggtatatttccctgtatttcccgctccttccagtatagggtaaaaaaggcatccggtcaagcctttcccggggtttggagggccgccattgccatgcggggtgcactctgctataataaaaaaaacgtcggatcggtaggacggcgggatatcggacgcgggagggataacggatgggggaaacgctgctgccccggctgcaggcggcaatataccgctacggcatgataaagccgggtgaccgggtagccgtcggggtctcggggggaaaggacagcatcgcgctgctctccctgctggcctccttccatgaattttctgcgcaccccttttccattaccgccgtcaccctcgatcctgggttcgagggcggggagggggattacagcgcagtggcggatctttgcgcatcgatgggcattccttatctccttcgccgtacccacatctatgagaccgtatttcaggaccggcgggagaagaacccctgcagcctgtgtgccaggctgcgccgcggtgcgctgcatcaggcggctcaggatgtgggctgcaacgtggtggctctcgggcatcatcaggatgacgcggcccagaccttcttgatgaatctgctgggcgggggggcactcggctgcttttcaccgaaaaccctgctcgaccgccgggggctgaccctgatccggcccctcgttttcctggaggagcgggagatcgcggcctatgtccgccggaaagggcttccagtggtcaaatcccgttgtcccgcggacggacatacccggcgcgaagagatgaaaacgctgctgcaggagctgtccggccgatatggtccgctggaggcccgcatcgtccaggccatgcagaaggcggatctggacggttggggagagaaaccggcggatggttataagaatacggatttgtgaccaatgcggcggaggccggaatgcgatagcggaaagaccggccttgtcttctttccggaaaaccgcaagcgcgtgaccatccaaaccaacgataaggtacaagaggcggcggccccggaattttggcggaacatcatcagccgttcgtcctccacgcccttctgcggcgaggcagggcgcgataaaaaggaacaggggagaccggcgcatacggcgccggtctcccctgtggtttctaaagcggtcggggtttgaagggtcacatggaatataccttgtcttcgcccaacaactggatgccgtttttctcgagagccgctacagcggcggcattgtcttccacccgcaggatgacgcaggcgcgtccctcgtcccgggaaataaaagcgtacatgtattcgatgtcgatcgaggcatcggcaagcgcccgcatcgcggcggcgaacccgcccggctggtcggggatgcccacggcgatgacgccggtcagggacacggtgagccccgcctcccgcagaatccgctcggcctcgtcgggtttgtccacaatcagccgcaggatgccgaaattggtcgtgtccgcgaccgacagggcgcggatatccacccccgccttcgccagttcggcggtgatttccgccaggcggccggctttgttttccacaaaaatcgataattgtttgatcatagtccgtggccctccctttcattcatacggcagcgttcccaatttacgcacccatatatggctacgccagaaaaacggcgcggtatcaaagcttccgattgtcgatgacccgcttggccttgccctccgaccggggcagggatcccggttccatcagccgtacccgggcgtgaacgttgagggtgctctgcagcgcgccctcgatccgtttttcggtggattcgagatcccgcacggtgtcggaaaacagggcggcattcatctccacctgtacttccatagtatcgaggttattcttgcgatcgaccaggatcaggtagttcggatccatacccagctcgagcaacacatgctccacctgggacgggaagacgttcaccccacggataatgagcatgtcgtcgctgcggccgcggggcttggtcatccgcaccgttgtccgcccgcaggcgcagggctcgtggtagagggcgcagatgtcccgcgtgcggtagcggatcagaggcagagcctcctttccgatacaggtaaagaccagctcgccgtactccccatcgggcagcggctccagcgtatcgggatcgatgacctcgggatagaaataatcctcacagacgtgcaggccgttctgcagctcgcaatcataggagacaccgggtccggcgatctcggacaggccgtaaatatcgtaggcacggatgtccagcagacgttcgatctcccggcgcatgttgtcggtccagggctcggcgccgaacaggccgccccggagcttgagggaatggggatcgatccccatatcccggaccgtctcgccgatgaacatggcgtaggatggggtgcagcagagaaaattggagccgaaatcctgcaaaatctgaacctgccgcttggtgttgccggaggaaaccggcagggcggtcgcccccatgtgctcggcaccataatgcagccccaggccgccggtgaacaggccgtagccgtaggagacgtggatgatgtcctctctagtggccccggcggcgttcagcgctctggccgcgccctcggcccacacgtcgatgtcgtgccgggtataccccaccaccgtctgtttgccggtggtgccggaggaggcatggatacggaccagctcgctctgcggcacggcgaagagaccaaagggatagttgtcgcgcagatcggtcttgacagtgaaaggcagtttcgtcacatcatcgatggaatggatgtccccgggcgccagccctatatcatcgaatttttgccgataaaaagggacgtgttcataggcgttccggaccatccggatcaggcgggcggattgaatggcgtggaggtaatcccgggaggcacattccacctccggctggtagactggcatacgaatggctcattcctttcttcaaatacagcttggaccggcttgccttagccgttatctggcgtcgtagcccaggcggaaagcctgttcattgaccgagacggtccgaggggggacggtggtgcgcagaatctccagccacacgtcgggctcaaaccccagaaaccgggccgcgacccccagcagcaccacgttgaccgaccggacggagccggcctccagcgccagggcgagggcgtccacgtccactacctgcacccctttgtcccggatcctctgcaggatatcctcgggataggcggctttgcccatgatcaccggcatgggatcgatccgttgggtgctcgcgatcagcactccgcccggcttgagatagggcagccaacgggccgcctcgagctgctcaaaggccagcagcaggtcggcttcccccttctcgatcagggaggagtcgaccttgtctccataccggacataggtcacgaccgagccgccccgctgggacatgccgtggacctcgctgactttgacgtcgtatccctcgccgatgaagcacttgcccatcagcttgctggccagcagggtgccctggccgcccacgccggcgatgagaatgtttttcacgttgttctgcacagtgccattcattccgcgtcccctcctttgatagctccgaatcggcaggccgaggcgcagacgccacagcccacgcattgggtgggatcgatgacggcccgggtttttcctccgccggtggaggcgtgggacagggcgggacagcccacctggagacaggctttgcagccggtacaggcgtccggatccacggtgagggcgggcttatgcttgacctccttgagcagggcgcagggacgtctggagatgactagggagggctcctccaccgcgagctcctgctccaccgcccggcgggtcccctcgatgtcgaaggggtccaccgtcaccacccggcggatgccgatggcgtgagccagggcctccagatcgatggctacggtggggtcgccgttgatggtcttgccgttgagggggttgttctgatgccccgtcatgccggtaatggagttgtccaacaccacgacggtggaaatgcctttgttataggcgatgtcgatcaggccggtgataccggaatggacaaaggtagaatcgccgatgacggcgatggcctttttcgcttgctccctgccccgggcggtgttgaagccgtgcaggccgctgatggaggcgcccatgcagaggctgaaatccatcatggagaggggggcctgggcgcccagggtgtaacagccgatgtcgccgctgacatagagcttatatttcttcagggcataatacaggccgcggtggggacagccggcacagagcacggggggcctgggcggcaaagcctccccaaaatcgatgcagggacgctcctcgcccagcagcgcctcccggaccacccgctgggagaattccccggtcagggggaagagcagcttgccgataaccgggataccgtgtttgcggcaatgggtttcgatgatgtcgtcgagctcctcgatgacatagacctgtccgacgttgcgggcaaaatcgataatggtctggatgggaaggggattgaccaggcccagcttcagatagctggcgcgctcgcccagcgcctctttcgcgtatgtatacgccgttccggcggcgatgatgccgatccgcttgtcatggtattccatggcgttgacaccgcactccagcgcctcggtttcagcccaggcccgcagtgcttcggtccgtttttcgaccttgacgtgggccgccttggccatggcgggcatcatgacgttcttcatcgggtccttcgtataaggccggagttccatgtcctgccgcgtggaaagctccaccagggagcgggagtgggagatccgggtggagaggcgcagcagcaccggggtgtcgaaccgttcggagagctcgtaggccaatttcgtataggccaggcactccgccgaatcgatgggttcgagcatcggcaccttggccgcaatggcgtggtgccgggaatcctgttcgttctgggaggagtgcatacccggatcgtcggccacggcacagaccatgccgccaccaaccccgatgtaagaggcggtgtagagggggtcggcggcgacgttgaggccgacatgcttcatcgcgcagaagctgcgggcgccgccggtggccgcgccgaaggccacctcaaaggccaccttctcgttgggcgcccattccgagtagatttcgccgtactgtacggcggcttcggtgatctcggtactgggggtaccgggataggaggagaggacggtgacgccggcctcgtagagtccgcgggcaacggcctcgttgcccagtagcagggtcttgctcatgaaaccaatcctttcaagggttaaatcgatggaccggaaccgccatcgccgggccggcggcactttttgattaggaaaaacgggtaccaaagcagaacgagcaggcagaggaaggcgaacagccagcagatacaggccccagcaacgccggtggcatccatcgcgctgaaccctgccaggaacccgatcatcatgatagcggcgcccaggatttcaggcggcagcagcacggcggcaaaccagcgccggatctcggccttggaagcggtgcagtcttgctccaccgtccggaggtcggcgttttccgcccggacatccagccggttgaagccggtcggccggcctttggcgtcgaggacctcttccagcacagccgataacacggtgtcctccgtcaaatgcagctccccggtataccggcaggtaaacggcgacaggctgtggatgccgtcggtgaaaaccattagacagagcagcagggaggggaggacggagccggcgaggcttggctcccgcagccggatcacatgaattcccggttctccttcaaacacgtaggcatagcggccggcatcctcacggaccgggaccggctgcccgtcgatttcggcctccagcagctcgatctgccgccgcagggaaccattcttttcttttttgaaaatccggatttcaagacgggccattcgcaacctccttcccggctcactgcccccgcagatccaccactcgttgggctttgccggtgaatcgctcgatggatttgggttctacgaggctgaccttgatctcgatgccgagaatggccttgatccggtcgtggatacggtgctggagggactccagctcggcataccgttcgagcagggagccgtcgattagctccacccggacctccagggtatcggcgtagcccgcccggcggaccaccagctggtagtgggggccgatctcggtgatgccgatcagggcgctttccacctgggaggggaaaacgttgacccctcggattttgagcatgtcgtcgctgcgcccgatgatcttatgcatccgggcggtggtccgcccgcaggcgcagggctcgtagtcgatccgggtgatgtccttggtacgatagcggagcatggggatgccccgcttggtcaggttggtgaccaccagctccccggtttccccggaaggaaggatttcgccggttttggagtcgatgatctcgcagaggaaatgatcttcgttgatgtgcaggccgcagcgctcccggcattcgcccgacataccggggccgttgagctcggacatgccgtaattgtcggtggcgaagaaaccgccgccccagctctgttcgatctgatcccgcatttcgggggtgcagccctcgctgcccagcagccccagtttgagccgatattgtccgagcgggaactcctccgcccgttctctcgccgattcggccagatacagacaataggacggggtggcgacgatggtatcggtgccgaaatcccgcatgaatttgagctgcttttcggtattgcccgacgaggtgggaacgacggtggcaccgatccgctccaacccgtaatgcagtcccagggccccggtgaacatgccgtagccgaagcagatctgtaccaggctttcgtcgctggcgcctgcggcgaccaccaaccgggccacctgctcggcccaattctccagatcctcccgcgtatatcccacgacggtggggttcccggtcgtgccggagctggcgtggatgcggaccaattccttgcggggaacgctgaacatcccgaaggggtaggtatcccgcaggtccgtcttggtggtatatggtatgtactgtacatccgagagggttttgatcttgtcggccgtcacccccgcggcggcgaagcggtcgtgataaaaccggaccgtccggtcacagtaatcgaccagggctttcagccgttcgagctggagcgcctcgagttctttccggccgatgcattccatccccggattccaaatcttgtttgccatttgcgcacacccttttcccataatcggacggccgttcccatccagcagccggaccggccgccttgcggcggcgctctttcccattttaccccgattcgggacaattgtaaagaagcccgcgtccattttgaaaaaatttcccgaatcagggagggagcccgccttctgacaagggcctcatgtcccgggaaataggcggaaggaggggccgtaccggagttcacttgttttttgcacgcggattcgatatactaaagcggacatccgcctgcaaacagccatggaaaaggaggtatcccggatgaacgtctgtattctgcaaccgcttttccctaaagaggctgcggaagcttcgggctttatcgattggattttgggggaactggaccggtgcgacgatacgttggacttgattgtgctgccggaatacagcaacgcgccgagcgtgtatcccaatccggacgactaccttgccgatctggaggctttcagcgaaccgctgctccgcaaggtacgggacacctgccggcgatgcggggcgatagccgcggtgaacatagcccggccttttgaagggagactacggaacacgaccctgctttttgaccggcagggtcgtgaggcgggagcctatttcaagcagcaccttttcccgaccgaaccggcaaaaaagttggtggatgccggctatacccagaaggagagggaacccaccatggtagatctggaggggatccgcttcggcttcctgacctgctatgacttttatttcccggaaatgctggcttttatggccaaacggcagcccgatatcctgatcggctgctcccatcagcggggggaacggcaggacgtgctcgagaccctgggacgctcctgcgccctcacctgcaacgcctatctggtccgctcttctgtgagtatgggggaagacagtgatctgggggggtgctcaatgatagtggcaccggacgggacggttctttgcgatatgaaaagccggatcggacggcagtgtgccgagatcgatccgaactggaaatatcgccgttccaatggatacggtgaggccgatatccggcacgacctttatgtagaggcgggccggacaccctgggcctaccggccggccggtcccggcgtcatccccggcgacagccgtttgccctatccccgggtctgtgcccaccggggcctgcacggcaggctgcccgaaaattcgctggcggcctttggggcggcggtggccctgggcgctcccgagattgaattcgatctctatgccacggccgacggcgagctggtggtctgccacgatgaccgggtggagcggatatcggacggtacaggccggattcaggacatgacctgggaggagctccggcggctggatatcggcagccgggtatcggaggagttccgagggatgcggattccccggtttgaagagatactccggcagtttgcccgccgcaccatttttaatatccatatcaagtcgaattgggcgacggaagatgaacgcgaggatctgtactatgacgttgagaccttccgtacgatcgtccggctgctggacgcttacgactgccgggatcacgcctatatcgtcggctggccgagtgtgctgcgcaccgccttggaaatcgcgccggatatcccccgctgctgtgccgcaggaggaggggatcccctgaagatcgtggatcgggcgatccggtaccgctgccggaagctccagtttttcaaaacagcctgtacaaaagagatgattgaccgcgcccatcgccacgggatgagctgcaacctgttctgggcggatgatccggaagaggccctcgcctatctggatcagggaatcgataccgtcctcacgaatgcgtactgtgtggttgccagtgccgttgaagcccatgcgcccgcaaagtctgaataaaattgtgacggaagatacgataaaccggtgaggatttgactcaccggtttatcgtatcttatgggcggtaggcggacggccaggaatgttatttgttttctcaacctcataatagagatattcgccgctcaattgcttgctgtccatggcccggtattcggcctttatacaggtcatgccgcacttttgcatgactctgccgctggcgggattgtcacgatgatggtgagaatggattttgagaaatccgacatcgcgaaaggcaaactcgattacccgcttgcacgcttcggtcatgaacccctgattccaatacgtcctgctcagcagatagtgcacggccgcgctggcgtcagcagggcagatggagttcagatatatgtacccgatcgcctgtgaatttgccttgcagacaatcgcccaatgataatatgctgcatcttcatactgccgaatccattgtttgagcagggattgtgtcatcgtgatgtccggatgcggctcccagccccaaaaccgggtcacttccgggtcggccgcccaattggcgaatatatcgccggcatccgccattctaaatcgacgcagtgccaagcgctccgtttcaaggggtttggtaccaatatgccgcatatccgccacctcctccatccgtctggcattaacacatatccagttggcctccttttatagtataacagacgcggatacggctttcaatcgctgtatccgcgtctgcttttgtatgggcgccgccctgcggacggcttttttcatatgtttgccaggcaatcgggcgcaaagaccgattccacccgtttgccgcagcccggaggggaatatacccaccggtcgatgtgcccctccgtcaggaagtaacggggcggggagggcgcggaagaggggacatcctgcgagtcgatgagaataagcttcagtttcatcttctcgggcaggatactcttgatataaacgcctgcatgttgtccgaccttgacgccgtcccgaggctcggccagccccgcgaggttcggggtcagctcgacgaagatgccgtagtcctccaccgaccggacgatcccggcaacggtttccccctgggaaaacagcgccgcgttttccatccatgtcccgagcagttcccgctgggacaggcagacccggtcatcctccagggaagaaacaaccgcaaagatgtccatgccggggagcagacggtcggacggatgggagatccggctgaccgatatgcttgcgatcggaaggagagcgggcagcccgcagccgatatcgcagaaggcgccgaaggtttccagccgggtgatccgggcgggcacgatatcgcccgggcgcagagatgccacatactcaaaccggcatttttcctgggccgctcggcgggacaggacagcgcggcggctgccgtccggctggtattcgaatccctgcaccaggaagcttattggtttgctcacccgggaaatcagcgcgatatcccgggtggtcccctccgcgatgccgatggccccttccatgtaagggatgatgccctccatgcagggcatttccacatgcagattgtgttccgcgtcgcataagaccgcccgcgcttcgacgacccgcccctccatagacgcctccgcgagcgcggccggagactggatgagccgctgattgtccggggtatccaatagggccccctcaggaaaaaatcggttcatttcaacagccattcctttcaaacaattttgtcctcgcagcaatatatgcggagcaggtccccggcataccaattatttcggaaggggctccatccgcacggacggacgcgtggttgcacaatcggacggaaaatttggcttcaccggcaaacccctggaaaacgccttgaaatttgcggctgctctgctatattgaaattgtaataagctcgtttgaaactcgtgtaaaaggagcggaacggcatgaaactgtacggtctcgacattccggtgaaaaacgcgccggttttggatacgggctatgtgcctatggcggcgttctgccgcgcattcgacaaatcggccgcgggcggcaaagacatcgccgtggcggtggagcgcaaccagggccagatggcggtgcggcatttccggatccacggtactccggagatggcggaggccgaccgggtctatgtcgaccgcacggtcaagatgctgctgtgggcttatggtggatataaggtgtttatctgcggtgacgacggcatggcccgggttatcaaagacgcctaccagcccggcggctctcgggaattcgacgcggatttcatgagccgcgtgtatgagaagccgtttgaagtggtagcccttccgctggacaaaaccccggcggaaaagaccctcgcccaatcggtcggccgtcatctggacggctgccggatcggtttcgatgcgggcggcagcgaccggaaggtttcggccgtcgtggacggcgtgccggtctattcggaggaggtcgtgtggttccccaaaaccaacgctgacccggattatcattttgagggcatcctcagcgccttccgcaccgccgcttccaaaatgccgcgggtggacgccatcggcgtttcctcggcggggatttacgtggacaaccgcgccatggtcgcttccctgttcctcaaggtgccgcgcgacctgttcgaccagaaggtcaaggatatttacatacgcgccgcgaaagagctcggcgacatccctctggaagtggccaacgacggcgacgtgacggccctggccggagccatgagcctcgaggaaaatcgggtgctcggtattgctatgggcacctcggaggcggccgggtacgtggataccgacggcaatatcaccggctggctcaatgagcttgccttcgctcccgtcgacctccaggacgacgcgatggtggacgagtggtcgggcgataagggctgcggcgtcaagtacttttcccaggacagcgtcatcaagctggcgccccgggccggcatcgccctagatgagagcttgtctcccgccgaaaagctcaaggtggtccagaaggagatggaggagggccgggaatcggctcgggacatctaccgttccatcggcgtttatctcggccacgcgctggcctattatgccatgtattattctatcgcccatgtcctgctgctcggccgtgtgatgtcgggcgagggcggcgatcttgtgattgcggaggcccgccgggttctcgatgaggaatacccggaatatgccgcgatggagctgcatcttccggatgaaaagatccgccgtgtcggccagtcggtcgctgcggccagcctgccgcaaattgattgagcttctatctctgcgcggagcctcccacatctccgtgccttgaacagccttcccacaaaggctgcctttcccacaagcaaaaagccttcaccggatttccggcgaaggctttttgctgtcccttccgaacccagacgattccctgggaaagacaaaaagagccgctatccctgtaaagggcagcggcctggaaatccgttccggagagaaaggcgtccgggcgggacgtaattcagaaagtccaccgcggctttcagcgcggagtccggcgagatagccggcggagaatcccttcgaagcccatcagcatcgcggaaccggccgcatagcataggatgtcggcgggatcgaaggtcgagcccagtatggtccgccagaaccgggagttctccaggcccagcaaagacacgaatcccaacgcctgcaggaattcgactccggtggcaaacaaaaagaggacgacgggaagaaaccgccatccgtccggcttgataatccgtaccagacaatagagtaccgcgactaccagcacgtccccgataaaggggcggacaaacgcgtcgtgtacaaacagggcgatcagcacctcgatcagcagcagcgcggcaaaagcggacagatacctgaggcgtcgtttcgctgtgatattcatggtcgcgtcatcccgtctttctttccgccggccccgggcggcttcccggccgtttttaatagaaaagcggccggcggccgctctgcgaaggaaaacgccggaggcaggcccctgatccggtcgatgcataagggcttcctgcccccgccctggcctggcctggtggcttcatctggcggcaatcgtcccgccgcccaccaccacatcgccctggtagaacacggcggcctggccgggggtgacggcccgctgggggctgtcgaaggtcaggcggatacgggaatccccggaagattcgagcagggcgggggctgcggcttggctgtagcgggttttggccgttacccgcaccggctccgtcagctccggcagggaaatcagattgacatcctccgcaaacagggtgcgggtaaagaggtcctcctgccttcccagtgtcaccgtgcctgccgccgcgtgtttggagatgacgaaacgaggctctccgaacgccaggccgaggcccttgcgctggccgatggtatagtggaggaagccccggtgggtgcctaccggattcccctgcatatcgagaaaatccccaggagggttgggaagacccatcccctcttcgagaaaccggacataatccccgtcgggcacaaagcagatgtcctggctgtcgggcttccgcgcgttgtcgaagccatgtgccgccgcataggcccgcacttcggtcttgcacagacagccgagcggaaacaggacatgggcaagctgcctctgcgtcagggcgtagaggacatagctctgatccttggcgggatcgagggcctttttgagcagccatcgcccggtggccggatcctcctccacccgggcgtagtggccggtggcgacagcgtcggcgcccagggcttccgcccgttccagcagcgcgccgaatttcagatgccggttgcagtcgatgcaggggttgggggtgccgcccgcggcgtatacccgggcaaatttgtctatgacggcctgctggaacaggccggtgaaatcgaacacgtcgtgagggatgcccagtctggcggcaaccgcccgggcatcctcgatatcctcccgacttccgcaggaagtcggttttccgcaggaagtcgattttccgcaggaagtcgattttccgcaggaagtcgattttccgcaggaggggccttccaaaccggcggccttccctccttccggacgaaggagcagtgtggcaccgcgcacctcgtacccctgctcgagcagcagcgaagcagccacggcgctgtctacgccgccgctcatggcggctatgacggtatggatcgggtttcggattcccacaggcagcgcccctttcccggtaatattggccggctcacgcatcggcaaacagaggggtggagagatagcggtcaccggtgtcgggcagaagcacgacgatccgcttgcccgtattttccggccggcgggcgagccgggccgcgcccgcaattgcggcacccgaagagatgccgaccaggatgccttcctctttagcgacggcccgtccggcggcgaaggcgtcctcgttcgtgacggtcagcacgtcgtcgaggacggtgcggtccagggtggcgggcacaaatccggcgccgatcccctgaattttatgcgggcccgccttccccccggagagaacgggggaatcggcgggttcgatccccacaatctggatttgcgggttcctggccttcaagaaccggccaacgccggtgatggtgccgccggttccgatccccgcgacgaaaatatctaccccgccgtcggtatcctcccagatttcggggccggtggtggcgaaatgggctgccggattggcggggttttcaaattgccccgggatgaacgcgccgggggttacggccgcgatttctttcgccttagcgatcgcgccgttcatccccttcgccccttcggtcaggacgatatcggccccataggctttgagcaggctgcggcgctccacgctcatggtttcgggcatggtcagaatgacgcggtagcccttcgaagccgcgacggcggccaggccgatgccggtgttgccgctggtgggttcgacgatgaccgccccgggcgagagacggccctctttctccgcgtcctcgatcagggcgcgggccacgcggtctttgacgctgccggcgggattgagatattccagcttggcgagcagaacggcggagaggccgcgtttttgggcataccgccggaggccgagcagcggtgtatggccgatcagggcggtaaattcacctgcgatatgcgacatgggaaagtctccttccataaatcctatctaatcactatgatatgaaagcataccgcgatcctggcgatttgtcaagcgaaagatgacggaatccgctcccggcagctggatgcggccttcctggccgggacatcaggaaaggatttgacaagggacagcggagaggggtatgatggtcgtggaatgtcaaacaagggggataaagcaaatggaattgacccgcgacagggcgctggccctgctcaaagactacaatcgagagccctttcacctgcagcacgcctatacggtagaagcggtgatgcgggatttcgcccgggagcagggctacggggacgaggcggatttttggggcatcgtgggtcttctccacgatgtggattacgaacggtatcccggagaacactgcgtcaaggcccgggagattctggcggaacagggtgcgggcgagcggctgatccacgcggtggtcagccacggatacggcatcgtgtcggacgtggcgcccgagcatgaaatggagaagatcctctttgcggtggatgagctgaccggcctgatcggggcggcggcgaaaatgcggccgtccggcagtgtacaggacatggagctcaagtcactcaaaaagaaatataagaccccgagcttcgccgccggctgttcccgggatgtcatcgccagaggagctgaacagctcggatgggagctggataccctgctcgaacgtactctaggcgccatgaagcgctgcgagccggagatcgccgcggccgtcgcgcagcaaaccacttgacaggaggaacccaccatgccccgcataaagggaaaaaccgttctcgtcaccggcggcgccggcttcatcggctcccatctggccgaccgcctgctggcggagggggcggccaaggtcgtcgtcgtggacaatttctttttgggcaaactggaaaacctggaacccgccaggcaggcttatggggaccggctggtgattgtacgggacgatgcccggcagctcggcgtgatgcaggccgttatcgagcgggaacaggtggaggtggtgttcaacctggccactctccagctcaaatattcctttttcaatcccatcgacgcctatcaggtgaacgtggacatcatgaaaaccctgctcacccttatgaaaacgggagcgttcactaccctgatccatacctccacttcagaggcatacggaacggcggtatacgagccgatggacgagaaccatcctctctgcccgaccaccccctatgcggccgggaaggtggccgccgatatgatggccctgactttccggaacgtgctggatttggatttggcggtcatccgcccctttaacaactatggctcccggcagaacgccggtgactatgcggcgatcattccccagacggcccggcggatcctgcagggcctgccgcctatcctggagggggacggggaacagacacgggattttgtgttcgtcgaggacaccacccgggccttcctgacggtgtatgaagacgaggcgtcccggggccaagtggtgaacatcggcaccggccgggagatttcgatgcgggagctcgttgaaaaaatcgccgtgtattacggctataccggccctgtcgaaatccagcccgggcgacgggcggatgtgcggcggatgcgggcgagtggggagaaggccgccgcgctgctgggataccgcacggaatacaccctggaaaccgctctcccgcgggtgctcgattggtaccgggaacagtatacggcctgaccggcaacggaacagggcgctgcttcggcagcgccctgtgtttacgccacggagatcccgaacaggcggcaggcgttttcgtgcgtccggccgaggagggtctcggccgacatcccccggatctcggcaatccgggcggcggtggcggcaatcatgccggaatcgcagcgtttgccgcgatagggcaccggcgccatatagggcgcgtcggtttcgagcagcagggcatccaggggaatggaagcggccacctccaccgcccttcgggcgtttttgaaggtgacggccccgccgagaccgatgaaaaacccccgcctgaccatctcatccgccatctccacgctccctgaaaaacaatggagcaccccggctcggtccatcttgccgggcctggcggggaaaaaagcagtgagggtgtccagcatatcgccgtgagcctcccgatcatggaggatcaccggcagggatagctcccgcgccagttcgagctggcggcggaaccagcggagctggacatcccggggacaggcgtcttcataatgataatcgaggccgatctccccgacggctaccgcctttggatggacggccatcgtccggatttcggcaagatccgcgtcggtcatggcggcagcctcctccggatgcaccccgacggcggcaaagaggccgggaaaccgttcggcaagccgcaggcttttccgggacgaggccaccgaactgccggcgttcacaatccccgccacgggacatgcctgatcggcaccgaacaggcgggcgagcagtgtgtcccggtcggcatcaaatgccggatcgtcatagtgcgcgtgcgaatcgaaaatcgcgggcatggggagcactcctttggaaatgggatgaaacagccccccgccgcgttcgtccggcggggggccgaggatggcgattaccgcacctggtcgccgggcgcggcgtcgggggtgaacaggacccggacgctctcgttcccttcggcgtcggtgccggaggaggcgaggatcatcccctggctctccaccccgcagagcaccgcgggcttgaggttggccaccagcaccacctgtttgccggtgaggtcctccggcttgtaccacctggcgatgccggaacacacagtgcggggcgtgccgctgccgtcgtccagggttagcttgagcagctttttggcctttttgaccggctcgcaggcgatgacgcgggctacccgcagttccaccctggcaaagtcctcgatgccgatctggggcagagagacgatgccggcggcgtttccggccttggcggacgcttcggcggccttggccgcggcttctttctccgccgccaattcagccagtatcttgtccgcgtcgatacgggcgaacaaaggctcgggcgcgcccacggtgaattcctccgcttccccgaacaccagggcatcgtaggaggcgagatcgccggatatccccagctgggcaaggattttctccgccgaacgggggaggaacggcaggagcatcacgcccagcatccggatgcattccagcaggttatacagcaccgcctccagccgggggcggctctcttccgatttggccagcacccaaggcgcggtctcatcgatgtatttgttgcagcgcttagccagctccagcacggagcccaaggcgtcggcattgtgccagacatccatggcgtcggcgagcttttccaccgtggcggccgcggcggcgcagagctccgcgtcggggcccgccccggtttccttgggccgccggacggttccgccgaagtacttgcccgccatggcgacactgcggttgaccaggttgccgagcgtgttggccagatccgcgttgtagacggcgatgaagctctcataggtgatgttgccgtcctgggcaaaggggatctgggacagcagataataccgcaccgcgtccaccccgaaccgggcggccagctcgtccgcgtagagcacattgcccttggatttgctcatcttgtcctcgccgaagaggagccacgggtgcccgagcacctgttcgggcagcggttcgcccagggccatgaggatgatgggccagtaaatcgtgtggaagcgcacgatatccttgccgatgacgtgcagcgcggcgggccagtaacggtgataaaggggaccgctgccgtcgggatgatagccgaggccggtgatgtagttgctcagggcgtccagccagacgtaagtgacgtggcccgggtcgaattccaccgggatcccccaggtgaaggaggtacgggacacacacaggtcggacagcccaggcttcagaaaattgttcaccatctcgttgcggcgggaatccggcttgatgaaatcgggatgctcctcataaaaccggagcaggcggtcctgatacttggtcagccggaggaaatacgcctcctcgctggcgtcggagacctcccggccgcagtcggggcatttgccgtcgacgagctgggacggggtgaagaaggactcgcaggggacacagtatttgccttcgtatttgcctttgtagatatccccctgctcgtagagctttttgaaaatcgcctgcacggccttttcatggtcggcgtcggtggtgcggatgaaacggtcgcaggcgatgtccaggctgtcccagaccgctttgatctggccggacacccggtccacgtacgccttggggctgatcccctctttctcggcggcgagttggattttctggccgtgctcgtccgagccggtctggaaatacacgtcgaagccccgctgccgcttataccgggcgatggcatcggccaatacagggtcgtaggtattgccgatgtggggcttgctcgaggtataggcgatggcggtggtgatataaaagggcttacggtcctgatcgctcatagggggagcctccttcgcttcattaccagtatattttaccagatcgcggcgaaaatacaagccttttccccggggcggaccgttccaacgaaatcaggcgtgcagaagttctccggccggtttcattccggtccgcgggccgatttccatatacacgtccccatagaccgcgggaacgttcatccgctcattttccaggggctcgcccgtctccggcggcagtgcctgaacaaggcgaaacagaggctccgcccctgatgcagccgctgcccgcagggggcctcctgggatttctgcgcctcaacgccgttcaggaggaaggagcggagctgcgggagattggccttcgcggaaatgccatcgatgtagctcgtcaaaattcgtccccctctcaaataggagatttgaatttttcggttgattctctcaatttatccatttatactgaggataaagaagtcgatatggatcggaatggcgatgaaagtgaaaatgcggctggcggcaaaggaaatgacgacaaacgatttggccaataaaatggagccggaaacaaacggctcaaagcatcggcgccgagctgaagcgggacaatctgacggaaaagccgtgggcttcatttggcaattgtgatttccgcgtatactttaatatgaggccattgtagcgatccggcttccagcgccgcgagcccgtgagacgttggactttttcaaaggccgattatttcgacgtgtccctcgactatctggttagccggagcgacgatccggcccggcattagtctccacgatggccgtggattaaattttagcagacacatcgcggccgcaccggattgcgcgtctttcaggcggcgctatcctcaatcaagctgccggcggatcctttcgggatggggatgccgaaacgaaagacagccgtaaccccttcacatagagcctcccggctcagtcgtggggctgctgatagaagttcccggagacctgatcggttttaagaatattgatgaaggcgtggggatcgatctgccgcaccttccgcgtgatttttttaacctggtcccccgcgatgacagagtagatcatggaccggggctggccgccccacaaaccggtcccctggaacagggtggcgccatgatgggtcgcgtccttgatctgttcgtagatttcctccgatttgtccgagatgatgaacagggtggtgcgcttgtagcgcgggttgagcagatggacgatctgggtggaggcgtattggaagaggatggaatacagggccttgtcccagccgaagagaaacccggcgacgaccagcatggcggcgttgccgaacaggatataattccacgcgtcgacgccgcgtttttccgataccgccaccgcaatgaaatcggtgccgccgctcgtggccccgcccagcaggcacaggctgatggcaaagccgttgatgatccctccgaatatgcagatgagcagcacgtcgtcggtgatgggtaatgccggcaggatatcggtgaggaggcttgtcaacacgatcatgaggcaggaatagagggtaaatcgtttcccgatcaggcggaagctgaccacggccggcagggcgttgaggaggaaattgatcagggaaaacggaagggtcagctcccaaaactgttctgcgccgcgctgaatgaggagagtcagcccggtaaaacctcccggaaacaggccgccggcgttgacgaaactcttgatgttcagcgccatgatcaccgaggccgcggcaatcataaaaagccgcagggcgtggttccggacgatgcgcagccgcgcttgatcggatcggttcacgagttttcccccatttcgattggttttcatactttggcacaggccgtccttacccgttccatgtggtgagaaaacggcaagacaagggaggacggcggaatgcccacgtggaatttgtggcacggctgccacaagctgagccccggctgccggcactgttacgtgttccggaccgacagccgctatgaccgcgacgcgggccaggtccgtaaaaccggacagtttgatctgccccttcgccgcaaccggcaggggagctataagcttatgccggaggacggcatcgtatacacctgctttacctccgactttctgctggaggacgcggacggatggcgtccggaagcgtgggagatgatccgccgcctgtccgcctgtctgcccccggactggggagcgggatatgacaacgtccatatcggctgcacggtggaggaccagctccgggcggaggaacggctgccggttttcctgacgctgcccatccggcaccggctcatcatctgcgagccgctgcttgaggaggtggatctgtccccttacctcggccccaccgtcgaggatgtggtggcgggcggcgaatcagggcctgaagcccggatatgcgattacgcctggattctggcactgcgggaccagtgcgtccgggccggggtgccgttccgcttcaaacagacgggggcctgctttcgcaaagacgggcgcctttaccggatcgaccgccggcatcagcacccccaggccgccaaagcccgcatcgacttcataccgtgaaggcctgccgtcccggcctgagtgcggagccgcggatcgcctcgaatatgatgtgccggttcccgatagcggcactgccaccccttattctatatctgtttcctgccgccagtataccataaacgaacgggtgaatccatacaaagaagccggccgcgaaaacggccggcttcaggctgccccaaagcggtgaaaatgaaaaaggatacgatagccagatcgcattaggggcattgtataaaatagagaggggcgtccggccgcttctggactttgcaagggcgaaacacggagggtaagccgaatctgcgaggtggcacgattcagtttcccctgcacccgcgggggacgttcagtccgaaggcgcctttgcgtggagctcgtcatctaaaaagacacgagatccggtggcgcctttttgcccttggtatttcccgtgatacggatttagcgcgggtccgtccatctcggcaaaaaccagctgccccacccgacgcccggctttcagttcgatcgcgcaacggttggcgttgtataattcaagggtgatctcgccctcaaagccgggatccacccagccggcgttttgaatgaacaggcccagtcggcctagggaactccgcccctccacgaaagccgtcaaatgatcgggcagcacgatatactccatggtggttgccagcacgaattgacccggcaggaggatatagcggtcagcccgcacggttttataggggatctccgcgtccagcgtcatggtgccggaggggcagtcctcgacgatccggaatgtgttgccgagccggatatccacgctcgccggctgcacctgctctttttgcaggggcgagacagtcagcgagccgttctccagcatagacaggatggttttatcggatagaatcatagaaccccccgtttttctcattttggcgcgtggcgttgttcccccgcatacccattagccaaagcccccctgcggcaggccgcacgggggccccatgcacggtcagtctaccggcacgacccagccgaaggggtcgggctggcggccgttctggataccagtcagggtatcgtaaagacgctgcgcgaccgggccgattttaccttcatg

SEQ ID NO: 3434 - DNA, 1869 bp, Unknown
  16S sequences of unknown bacteria
gggtgacggacctttgcccggcacccggctttacgccgcagcagctgctgcagctagcctgcagcctggagcaaaagagcgagcatcccctggcccaggccatcaccatccgggcccaggccgacgcactgccgacggaggaagtcacagactttgagatcctgcccggcaacggtctgcgcgcccagtaccggggccgcccagccctgggcggcaacgccgccttcatcggaaaattcgcctcgctggacgataaaacaacgtgccttgccgcccagctcgctgtgcagggcaagaccccgctgttcttcgccctggacggcaagctggcgggcctgatcgccgtggccgacgtcatcaaggatgacagccccgacgccatccggcagctgcaaaatatgggcatccgcgtcgtcatgctcactggggacaacaagcggacagcccaggccatctgcaaacaggccggggttgacgaggtcattgccggggtcctgcccgacggcaagcaggccgccatccgtgatctcatgcgccagggccaggtggccatggtcggcgacgggatcaacgatgccccggccctgacccaggccgataccggcatcgccatcggggccgggacggacgtcgccatcgacgcggcggatgtcgtcctgatgaagagccgcctgagcgatgtcccagcggccatccggctcagccgggcggcgctgcggaatatccatgagaacctcttctgggcgtttctttacaacaccatcggcattcccctggcggcaggcgcgtttatccccctgctgggctggcagctcaacccgatgttcggggccgcagccatgagcctttccagcttctgcgtcgtctccaacgcgctgcggctgaacctgttccagctgtataacggccgccatgaccgtaaaatacaacaccaccacaaaaaacatgcaaaggagcaaagcgctatgacaaaaaccatgaagatcgaaggcatgatgtgccagcactgcgaggcgcgggtcaaaaagacgctggagtccatcccgggcgtcgcggcagctgaggtcagccacgaggccggtaccgccgtcgtcaccctggacgccccggtggagaatgatacgctgaaaagcgccgtcgaggcccaggattacaaggtcactgatattgcataactgcgcaaaacgcgcccagggcccggcaaaagccgggccctgggcgtttttccgcttttcatgcagttttttattccggcagggggcctgccaggtgcaggatgacatcgcccgccagcatcaggccggcgcaggacggcacccaggagacagagccgggcaggctgcgcttgccctccggcggcgcttccagcggcagcggcgtgcggacgggctccgtgctgtagagcacccggtggtgcatgatgccccgggcccgcagctcccggcgcatgacccgcgccagatggcagctgttcgtcttggaaagatcggtgatgacaaatttcgtcggatccagcttattgcccgtccccatggcgctgaggatggggataccccgagccatagcctcctggatgaggctgagcttgctggagaccatgtcgatacagtcaacgatataatcatactggctggtgaaaaacgtggccttctcctgctcgcaatagagtttttccagcacatggacccggcaggcggggttgatctccgcgatgcgccgggccatgacggcggccttcccctggcccaaggtcgaatgcagagcgcagagctggcggtttaaattggagaggctcaccgcatcgtggtcgaccaaggtcaattccccgacgccgccccgggccagtgcctcggcgcagaagctgccgac

SEQ ID NO: 3435 - DNA, 4609 bp, Unknown
  16S sequences of unknown bacteria
acaaccagacagatcacatcggccagaaagtctttgattcgccttcaaacaaaaaaaatttctttagttttccacttgacaggttttggccgactgtgaatagtaacgtccaatgtgttacaaaacgacaatattgtgaaaaaaacttcaaaatacgggaatcatactatataatatggtgctgaggtgttgactgtgatgaaaaatgttggattgatctgtgaaggcggcggcaccaaggcggcatattccgccggcgtcctgcagtgtcttctggatcacgagatatatcttccgtatactgccggcatcagtgccggtgctgagatcctgctcgcctatgtctccagacagcgcgagcggctgtatgtgaccggcgtggaatctgcatcgcagaagagcgcggtaggcatccgtccgctgatccatgagcatggcctgttcggcatcgaagcgacttgcgactatatcgagcggcatgctccgcttgactatgagacgttcaagacgagcagcacgcagctggatatcggattgtacaatatcgaaaccaatcaggtagagtattttgacaagtcttactttgatcccaaggaacagacgctggtcaaggcggcatgcgcgctgctgatgctggcaaagccatatcgctttcagggacatctttacatggatgccgggctgatcgatatgatcccgatcgagcagagcatccgccgcggcaatgaaaagcatatctttatctcgaccaaagaggagaattatgtgcgtaagccggcgccggcatggcagcttcgtctggccagcctgttttatcctggcaacaaggagatcagggagaacctgaagctgcgccacgtgcgttataaggagcagtgggggaaggtcagagaactggagaaagcagggaaggcgctcgtgcttcgtccgcacaaggatctgggcgtgacccggtatacgacagaccgcgaattgcttgctccgtggttccagctgggatatgatgaaacaaaagaacgcatggatgagatccgtgcgttcatcgaaatggattgaccgtctgtgcaagacggtttttatttgttcagcgtacgcggtcgaggcggcggtagagatgcaaggcgccccaggccagaaatcccgcggcgatgatgaacacgatcgtgtgcatctcaaacagcgtgatgctcaggaacgtgcgggaaaggtacatcaggccgagaaagcagagaaaaccgaccaggatcacggcccagtaatacaggctgagcgtgctggaagcgcgcatgagcagaagcatcaggacctgcgccatcgcatagatgatcagcgtattggccagcagggagatggtaaagggaaactgcatctgcatgccctgtccgttcagcagcggctccaccaggcagtcgagcccgacttcatagatgccggcatagagaaagaggatgagcggcagatcggcgaaccgcaggatcagacgctggaatgcggacagcttttcagtaaacgaagtgatgaagggaagcgtgaatgcggccgggtcgctttccggtccgacttcgcgctgttcgcaggaacgcacggccttagccatgaaggattctgtggcatgtccggggatggaatgctttttgagctgggtccagcagccgcgcagaaaaccgcggtattccggatccacctgtgacagatatttttcatcgttttcaaaataagagagaatgttcatatcggctcctttatctgcatatcatgatcgatgcacagacattatacgattcccgttttttcctttcaagcggaaatgcgcgctttcccagatgatacatgctttcaccggcggatgagcgcggtctatgcaccgtcatggaaaaaagagccgcatgctcaacaggaaattcgggctccttgtgagcgtcgtggctctttgatcgatcattcagctttgatggcttcttccagtttggcgatgccgcggtcgatgcgcttcagcgtctcttccttgcccaggatgtgcgcgatctcgatggcgcctcctggagtgaactgcttgccggtgatggcggtgcgtaccggccagagcacctgtccgtttttcatttccagctgttttggcagcgagagcaacagatcgtggatcgtttcttcttctgaccagtcatccagcgccgccagtgcttcccgcgcagcgttgagcgagcgcagagagatctccaacgtcgtcttcattttcttgtggatgtacatggcgcagtcgtattcaggcagttcgtcgatgaaatccacgctctccttgatctgtgccagcgtatctacgcgcggctgcaggatctttgccacgctgcgcagatctacttcggaatgaatggcctcttccagatatggcttgaccagatcatagtactgatcgagatccatgttgcgcagatagacgccgttcatccacgtcagcttgtcgatgtcgaagatggcagggctctttgagatgcgggagatgttgaacaccttgatcagctcatccagcgtatagatctcctgctcggtctccggagaccagcctagcagggcgatgtagttcaggatggcctcaggcagatatccttttgcgaccagatcttggaagctggcatcgccgttgcgcttgctcagcttgtggtgctcatccttcatcaccggcgggacgtggacataggtcgggatgtcccatccgtatgcctcatagatcagattatacttcggcgtggaagagaggtattcgtttcctctgacgacatgggtgatctccatctggtgatcatcgatgatattggcgaagttgtatgtcgggaatccgtcagacttgatcaggacggattcatccagcacgtcggtgtcaaattctatgcggccgtagacctcgtcatcaaaataagtttcgccgacattgttgatggtctggcggatgacgtaaggctcgccggctgcgacccgtgcttttgcctcttccagagagatgtgtttgcaaggatcatcgtatttgaaggagatgcccaggctgtctgcttccttgcgctgacgttcgatttcttcctcgctgcagaagcagtaatgcgcgccgcccagttccacgagctgttcagcgtatgctttgtacatcggaagacgttcggactgtacatatggtccatgatcgccgccgacatccggtccttcatcgtgcttcagaccaactgtacgcagcgtatcatagatgatgtcggtggccccttccaccagacggccctgatcggtatcttcgatgcggaggatgaaatctccgccttcatgtttggcgatcaggtattcgaataatgctgtgcgcagattgccgatgtgcatatagcccgtcggacttggcgcaaaacgtgttctgacttttttcatagtttacttcctttccgctttctttcataatcatataataaagagaatgcaggcgcaagaaagaattatggcaaagtccttttctgatcgatttgtcttctatgcccgcgaatcaaagatgaacgggaaggaaaagcggaaaacaggggaaagaagcaggatcgaggatctgagcagagaaaaggaaataatttttttggaaaactgttgacaaaaaccttgttcttctgtagaatataaatcgttccgcacgaggcattggggtatagccaagcggtaaggcaccagactctgaatctggcatttccttggttcgaatccaagtaccccagccatagaaaatcaagccgttctgatgagcggctttttttgtatcgtttttctgatttgatgtgttcctgctggcttgatcatctgttcgtatcatcttttattgcggacaggatcgcagagggacaagcaagctgatattcgtcagcacagcggtgaagatcgattgacatatgatcgtgccagagccgtgccgcttttttccgtttaccagcctttctgtttatccagaaaacgcgagattcgtctctacatcgagatcattccttcttccgggtgaagacgatgccgatgaccgcaactgccaagatgatcggcgctgttctgacaaacagccattcaaatgtgtggaacgccacgctgagaacggcagtttcaggatcatgaaggttccagctcagataagggctgccgcagaagagcaaggccgcaaagatcactgcgatcattacgcatgatgcagcaagcagccagcggatgatctttcttctcatggttttctttctcgccagctgcaaattgatgatctccagtttttcagcaatggcgctcaggcggtcagcttccgtttcgatgaccgtttctcccagtaacctgctcaccggcgtttcgagcgcttccgatatggaaatcagcatatcggaatctgggaccgatagcccctgttcccatttggaaatcgtctgccgcacgacgttcagcctgacggctagttcctgctgcgacagtccctttgattttctgatcgctttgatgttttcattcagcatcaggatgtcctcctttctcttacgccactattgtagtttgaactgcccgttaggtcagtttacaaggaactacacgcagaccacgaaacgggggctgctgacaa

SEQ ID NO: 3436 - DNA, 6971 bp, Unknown
  16S sequences of unknown bacteria
gagggtggtgtgagcattcagcgaacaccgggagggttgctcaaaacaactttccccagtaaacttcataggttcaaatttgcaaaacaacccctcagacggctgacgccgccagctccccttgcacagtggagccaaggtgttgctaacctttgggaatgttattttgtattcgacatttatttataaattatattgtttaaaatggttttccactataaaataacaagccgagcagacaacaaacttgccctccttgtgtaagggagggtggtgtgagcattcagcgaacaccgggagggttgctcaaaacaactttccgctgtaaaaccgtcatcggtttaaaattgcaaaccgccccctcagagggctaacgccgctacctccccttgtatgttataccctatgggtacaagggaggcatatatagtctctctttacacaatggaaacaatttcactgtttcacggatattttatctgttgttaaaatttaatataaataatataatcaaaaccatatggacaaatcaaaaagtattcttaatcctcccatgttgcccatttaaaaaagcagactgcctaaacaggcaatctgctttttattaactttttatagatttcccacggggcaaaattacaaatcggaatacaaatcttctttgtaaacgccgtctttaatcatctgtgcaaagctggctttaacggaagcaacatcttccttatatgtcatgccataccaagtgtcatttgactttaaaaccttaactgtgattttaccctgctgcaaaagttcgccaatatatgagggaataagatattcccctttaagaggatttgtgtttacggttgccttgaaaaattcttcaaaaccttcctgcaactgagccataaactccggcgtaagaccccacatattcatagaacagagagattctgtgtcaataactttgccgtcagcctctgcgcctgtggctgtttttataatatttgaagtttccacaacctttgtaaggtaaccgttttcggccatgcaaatgcctcttgtaactgcgccgttgtcagaaagggtatttttaataacaaagccggccatacagcacttgccgccctcaaccaaatagtcgtgaacctttttaaagccctctttgccgtagtaatcatcggcattgattacaataaagggttcgttaataagctgtcttgcggccaaaacggcttgacctgtgccccatggttttgttctgccctgtggcaaagtgccaggtatatcgttgatgtcctggaaagcatagcccaccttaacgccgttggcccggcaaacggcctcaattctgtcgccgattacctttttaaattctccttcaatatccttgcggataacaaaaacaaccttgttaaaacctgcttggatagcatcgtgaattgaatagtccatgatgatgtggccgtctccgtccaccttttcaagctgtttgatgccgccgccgaatcttgaaccgattccggccgccataatcaaaagtgttgtatccattttacattccttttctatacttatataattttacaaatttctacaataaatgtgacaaatgagattataacatataaaaaagaaaaatacaacaaatttataagaaaagaattaaaattacatattttacttttaaaaatttgcgtcgtctgtcaatttggcaacaatgatgtatcgccgattgtaattgctcttttggcaggtggccaaaatcaaaagtttatctttccggtttggttcccactgccggttgtaaacagccttggtttccttgctgtcagagatgaatttttcaaaattcaaaacatcttcatcaatttcaaatctgccaaactgctccataatgtgtaaattggaatagggaactgccgccacaaccctgtaatgcttttcttcctttggcaaatacaccgttatgtccgaatatttttcaaaatcctcggtgtctgaatatgtgtcctccaacataccgaacatagtgccgtcggtcatattgtggccgtaaattattgtcactctgtcagaaaaatcatcgccgttatattttgcctgggtataaaggcagccggcaacagagtatttgccccgcaaattgcggcggagatagtaatcgtcatcaccgggctttcttaaaaccgggtaatcaacctccagcccggggatttttatccatgcgtaaatatccggattttcttccttcaccttttcaaaatcaatggggcttacatactcctcggtggcggaaactgtgtcggtgtcaacataaacgctgtccggggtcagtttttctcttttcggtattgccatgtaaaagcaagccaaagcgcccacagcaagcaaggccgccaaaatccttttaaaattatctaccattatcaatcaaaattccatgttgcaggctttttatcaccgggcattttaacaggctccgggtattcccggcctttcaagtcaagaactactttttctattatctccggctgtaaaggttcgtttacaaccacaccgggataaggaaacggcacaggttttgtatccactttttcaaggcgataaatttcctccatgccctcaatcaccttgccgaaaaccgggtaaacacccttgtgttccgggcaatcacggagaggaaagaatggctcgcatccggcaagacccatttctccgtatccgcccatacaaacacagcccgggtgagattccaaaggggtaatctccgggtgcaaagtaaattcattggggataagataggcacattctttgtggtggaaagcctcatagcttaaatccacccaactgccggggacaattctttgaattgcgtgattgtccaaccagccgtggccggcgcaccaaataaagcttgccaccgtgttaggtgcgctttccggtaaaagttcaaccacaatttttttgccgtttgccatataaaaagttgccgtagggttcataattttgcctccttatatttaacactgtatttatatgatttataattatttttaaagtgcgaatttgttttccaatatggccttattatatcataataaaatctgtatttcactgtacaatttaaataaaattatcggcaaattcaatatagattgcttaaactatccaagctaaaacccttttatcccctgctttatcatttatcaaattgatatgctctgcaaaaatacctgtctttttagggcatatcaccctggcagggcaatttgtttttaaaatttataaatgaaaaacgcacaaaaaacgcacaaaaaaaggagccgtcattcgacggccccgattatatgaatatctaacaaacaacaattccgtttaaagcttttatcagcccattggagtgtaccttctgttcttaaaattatctgtcaataaactaaactgtattttggcggatacctttactttcgtcaatatagttttaagatttaactaaactgcctttcggagtatacctacaactttcttagtatagttttaagttcaagataaactgttctttggcggatacctttactttcatcaatatagttttaagttttaactaaactgcctttcggagtgtacctacaactttcttaatatagttttgagttcaagataaactgttctttggagtataccttcgctttcgtcaatatagttttgagttaaaattaactaaacctttggcgtgtacctttactttcattagattaaactgatttacaacttaaatgcccattggagtaatcctcttaaataattaaatcaaattgccttcaatctatgtaaacacttaaagtgcaaattattctctaaaacttcttagtacatcggagtgccctcaactttcttattaaatcttcggtctgcgtgatacgattaccatcggtatcactcccctttcgtctttatttttctttatcttgtatccttttctaagttcacctatagtataaccgataacctttaatttgtcaatagttttttgtaaaaaatatataatttttttaaactttaacaaatataatttatgcattaactaatgaataacaaaaattaaaaaaagttttaaaaattaagcattttatgctataatactttaaagtctattatggttttcaaaaaagaaaggcggttttttatgaaatcttttatcaccgttacgggaaaagacgccgtaggcgttgttgcaaaggtagctactctttgcagtgaaatgaacatcaacattcttgatgttacacaaagtattctttcgggtatgtttgcaatgattatgcttgtggatatgtccggctgcaatgtatcacaccgggaggcacgcaaaaattttgcccttcttcgggaaaaaatggacatggatattaaccttacacgctcggaagttttcgatgccatgcacaaaatttaatatatgattgggagataatatattatgagtatgattaacaccggtgacattttggaaactatcgaaatgttcacccaggaaaaccttgatgtgcgcacggttacaatgggcataagccttttggactgtattgaccctgacccggataaggcctgtgagaaaatttacaacaaaataaccacaaaggccaaaaatcttgtaagggcagttgagggtataagtgatgaatacggcattcctattgtaaacaagcgtataagcgtaacgcctatcgcaatgcttttaggcgcttgccctgatgcagacccggttcagtttgccaaaactttggacagagccggcaaggccgtaggggtaaactttataggcggctacaccgcccttgttcacaagggattttccgccggagatttaagattgatagaatcaattccaagggctttggcggaaacggacatagtttgcagttctgtaaacataggtgcaaccaaagccggtttaaatatggacgcaataaaacttatgggcgaagcggttaagaaatccgcccggctcactgccgacagacagtgtatcggcgccgcaaaattggttgtattttgcaacgccccggaggacaacccatttatggccggtgcgttccacggcccaggcgagcctgactgtgaaattcatgtaggtgtttccggccccggtgcggtaagggcggctcttgcaaaattgccgaaagacgcacctatcgaccgggttgcggaacttgtaaagaaaacagcttttaaaattacaagaataggtcaacttgtggcaaaccttgccagtgaagcattgggagtgccggcaggaataattgacctttctcttgcgccaacaccggcaaagggcgacagcgttgcaaatattcttgaagaaatgggtcttgaaacctgcggttgttgtggcaccaccgcctgccttgccctgttaaatgatgcggttaaaaaaggcggtgttatggcgtccaaccatgtagggggtctttccggcgcatttatcccggtaagcgaggacgacggtatgattcacgccgctgaaacaggttgccttacaatagaaaaattagaggcaatgacggctgtttgcagtgtgggtatagatatggttataatcccgggggatacctccgcaagcgttatttctgcccttattgccgacgaagcagcaataggtatggtaaacagcaaaaccactgcggtaagggttattcctgccatcggcagaaaagccggggaaattttggactttggcggtcttttgggatacggcccaattatgcctataaaccaaaccgatccgtcggtgtttataaaccgtggcggcagattgcctgcacctatgcagtcacttaaaaactgattttaagaggtaaaattttgaaacttgatttaagatgtcccggttgcccaaatcattgctctttgaaagctccaagttgcgttatcggtatgcaaaatgcggataatattccgaaggagcttttacaagactgtgaagacccccgggaaaaagagcagaaagaacagtaaaacaatacatctgtattaactaccgtttgcccggcgaaaaattaaaatcataaaactatattaaaaacagctttctttccgtaaggaggctgtttttgtgtttgaaacaggttagaaagaaatatattttaaatcagcaattttgccgcccttgtgtaaagggaggtggtttttcgttagaaaaaccggagggattgactttgacgaggaattgaccttggtacagcaacctgatttacaattgaacttgaaaccgaatatcatatataaccaaaatatttttacaatctctcagtcagctacgctgacagctctctttaccaaagagagccttgcaattcgttcggtacgaagtgccgatttgcaaccgaacaagtgcaacaaagagagcctattttgcggtttgtttgaattgttgatttatagcggaaaaacagtttaaatagtttgaaataaggcgaccaatggtcgcccctacgggctatttttgatttactgtcctcggttgcagaataatatttcaaaaaaattaaatgccttgccggtcataaacagtaattataaagttaaatcgtaggggcgttcattgaacgcctatgcaaaccgcaggtttgcacattgacaacctgtttacatcaaatttcggcaacagataaacatatcaaaaaatccacaacacagccgccctttggtaaatggaggtggtttttcctaagaaaaaccggagggattgactttaatacgataacctaatttgcaagcaaattttcaaccaaacttacaaccgaatatcgtatataaacaaaatgttttccaatctctcagtcagctacgctgacagctctctttaccaaagagagggcagattataataacaagtgcaacagtaaaaaaatagatttcatatcgaccgaggtgtaaaataatgctaccaacaaaaacagacacggaggtcaatatgaaaccat

SEQ ID NO: 3437 - DNA, 5142 bp, Unknown
  16S sequences of unknown bacteria
cccccgccccgttgcggggcgcaaccattccccccttcttggaaagaagggcaaaaaccacccgcctgctaccggcagagaaagctcccaaagcccctttgcccccgccggggaaaagcaacctgagggcgcagccctttttcaaaaaaattgaatcacaggagggacattatgaatacgacatatggctggctgtaccagcattacgcacatccgctgctggagaaacagcggcaaaaagcgcgggaggaactcgaagcgctgtgccgggaatatgacctggatccggagcagcagatcagtttgattgaccagatggaaggcagctgttccctgtccggcgccgcagcgttttccatcggcgtttattttgggatgcagttcgcttcaaaccccctgttttccgagctgaacaaaatgatggagccttatcagatcgagtgaaccacagttccgcacgtccccggctcagtcccgcagcatccgcgtagcgttgagcactgccagcaccatcacgcccacgtcggcgaacacggcccaccacatggtggcaatgcccacggtggtcagcgccagcacagcggccttgaccgccagggaaaagacgatgttttgacgcacgatgcgcaccgtctttttcgccaggcggatggcttcgggcagttttgagggtgcgtcgtccatcagcaccacgtcggcggcctcgatggccgcgtcggagccgagggcgcccatggccacgcccacatcagagcgggagagcaccggcgcatcgttgacgccgtcacccacaaaaaggagtttttccttgccctgcttgtgtctcagcagttcttccacctgggctactttgtcttcgggcagcagttcggtgtgcacttcgtccaggcccaaggtctgcgccaccctctcccccacggcccggcggtcgccggtgagcatcaccgttttgcgcacgcccatcgcatgcagtccggcaatcgcccgggccgcgtcgggttttacttcatcggagataaccacatggccggcgtacacgccgtctgccgccacatggatcacggtgccgacacaatcacacggcggacaggccacgccgtgttttgccagcagcttttcattgcctgccagcacagttttgccatccaccacggcctgcacgccatggcccggtacttcctccaccggccccagacggctcagatcaatctcccggccgtaggccgctttcagggagcgggaaatggggtggtcggaatagccctctgccagggcagccagttccagcagttcttcccggctcaactgttccgggaatacctggctcaccacaaagttgccctttgtcagcgtgccggttttgtcgaacaccacgatgccggcgtccgccatggcttcgagatagttgccgcccttaacgagaataccttttttcgaggctccgccgatgccgccgaagaaggtcagcggcacggagatcaccagcgcgcaggggcaggacaccaccaggaacgtcagcgcccgctgcacccatacgccccactgccctgtgatgagggaaggaacgaccgccagcgccagggcggcaaatacaacggcaggggtatagtaacgggcaaagcgggtgataaagtgttccgctttcgcctttttgctgctggagttttccaccagatccagaatcttcgccacagtggaatcaccgaattccttctgcacctgcacatgcagcagtccgttcaggttcacgcagccgctgatgacttcgctgcccgggccaacgtcccggggcagggattcgccggtgagcgccgccgtatccacggaactgctgccctcggtcactatgccgtccagcgggattttctcgccggctttcaccacaatggtgtcaccgatcttcacttcttccgggtccacctgcaccagcgcgccgccgcgctccacattggcgtagtggggcggatgtccatcagcgcggcgatggactggcggctgcggcccacagccacgccctggaacagctcgcccacctgatagaacagcatcactgccacagcttcggggtactcgcccgcgccgaaggcgcccagcgtggccacccccatgaggaagttttcatcaaacacctgtccggcgcgaatattgcgcagggctttccacagcacatcccagcccacaatagcataggggacgagatacagcgccgcccgcagccacagcccgccgggcagggcgtcctctgccggcaggaaaaacagcagtgcatagagcactgcggcggccaaaatgcgccgcagtgttttattctgtcgttttgtcatcttatttctcctcctccgtattcggattctgcatgcaaaacatgcccgcagaaatcccccgcgggcacgttctgcatcaaacgctcagcgaacaatctcgcagtccggctccactttgcggcacaccttgaccacttcgtccataatgctctcaaagcggtcatcgtcggcctctacggtcattttctgggccatgaagctgacggtggcgtcggccacgccgtcgattttccggatgttgttttccatttttgctgcgcagtttgcgcagtccagatcgatcagcttgaatgtctttttcataaaactgttctccttttttcaaagtatggaatagaatctacacgggaaagaaactcattcggaaatatgatccatgccctggttgatgatggagcgcacatgatcgtcggccagggaatagaacacggttttgccttcgcgccggtacttcaccagttttccgcctttcaaaatgcgcagctggtgggacacggcgctctgggtcagatccagcaccctggcaatatcgcacacgcacagctcggattcaaacagcgcatagaggattttcacccgggtggaatcggcgaacattttgaacagctccgccagatcgtacagtacctcgtcggcgggcaggtcttcctttactgccgccacgcggtcttcgtgatactcctcctgctcgcagcaaggggcggtttcctttttctcttcctgctccatggtgtctctcctttcaatatatgaacatctgctcatatgttattccagttaatttcatttgtcaaggccaaagcaaaaaaatatttcttctttttgcaaaaccggattcaggcgcaaaaaggcgcgccccgtcgctggacggggcgcgcttttctctttctatttcgttgggacggcgctcttatgccatgcctgcggtgatgatcgccatcttgaaaacttcgtcggcgttgcagccgcgggagaggtcgttgatgggagcgttcaggccctgcaggatggggccgtaagcatcgtagcagcccaggcgctgagcgatcttatagccgatgttgccggcctcgatcagggggaagataaacgtgttggcatagcctgccacgggggagccggggaacttcagctggcccacagtgggagacacagcagcgtcaaactgcatttcaccgtcgatcgccatgccggggttgagctgcttggcaatctgggtggcctcgttgctcagcttgaccgtgccgcccttgccggaacccttggtggagaagctcaggaaggcaaccttgggatcaatgccgaagaaagcggcggtctttgcgcactccacagccacctcagccagcttctgggcagcagtaaaggtcacattgccgttcttgtccttatcgtcctgataatcaatgttaatggcgcagtcgcccatgcagatggtgcgcaggttctcctcgcccacaggacggttgaggatgaagcaggaagacaccaggtgtgcgccgggcttggtcttgaccagctgcagtgccggacgcacggtgtcggcggtggaataggtagcgccgcccagcagagcgtcggccttgcccatcttcaccagcatggtgccgaagtagttgcccttcatcagggctgcgcggcactcttcggggctcatcttgcccttgcgcagatccaccatggtggacaccatggcgtccatctcgggataagtggcagggtcgaggatggtgacaccggagatatcgaagccgtggttggccgctgcggtgcgaacctcgctttcattgcccaccaggatcacgtccatcagattttcattcttcagacggaacgtggcctccaggatgcgcggatcgggaccttcggtaaacacgatggtgcggcgctttgttttcaggttttctctcagctttgcaaacatatccatagtttcttcctccactcaatttcagattgttctaatatggtctgtttgtcaggttccatttatcaagcacagtatacactgcttttcccatttccgcaagaggtgtcttacacgccgctgctctgcgccaaaaggcgctgtgtcccttaggcaggcgcctggtttcggcacacagcagcaaaatgcggcaaaaatcgagaaattttgcagattcttctttacataaggtattttgccctttatactatacccatcgtattatgagagaccacaagggggagtattatggcaacggatttttcccgcacattgtccatgctgcgcaaggaacagggcatcagccagcgaaaggtggccgccgcgctggggatttcccaggcgctgctgagccactatgaaaacggcatccgcgaaccgggtctgggctttgtcatcaaagtgtgcgattactatcatgtgtccgccgactatcttctgggccgcacgctggatcgggagggcaccaccatcgccgctgaggatctgtacgattcctccgccgaaaaaggaaatgtgctgcgcggacccatcatcgccatgctgcagaaaaagctggtggtcaataccaccagcatgctgtttgacctgctaggcaaagtgggcaacaaggaagccattcaggaggccgcagcctatctgggcggggcgctgttcaaactgtaccgccagctgtaccgcgccgggggcaacgaggaaaaatatatggcggtggacagctgcgcctttaactccggcgcggtggacgctgaccttcacctgtccgaagccaagtatgccgcggcgctggaagaagccgccaaagacggcgcatctttccccgatctgggccacgacgccatgaacgccgcc

SEQ ID NO: 3438 - DNA, 24959 bp, Unknown
  16S sequences of unknown bacteria
aatatttcctgcatagggggctttttgttctgtctgtacaatctggggcgccacagcgaggctccacggggctggggacaaacaaattagatccgggccacgccggttttccgggcggcctcggccaccgccttggccacggcggccgccacgctgcgatccagcgcgctggggatgatgtactcggcggtcagcttatcgtcggtgacgaacgcggcgatggctttcgccgccgcgatcttcatctcgtcgttgatgtcgctggcccgcacgtccagagcgccccggaagatgcccgggaaggctagaacgttgttgatctggttggggaagtcgctgcggccggtaccgacaaccgcggcgccggcttccagcgccagggcgggcatgatttccggcaccgggttggccatggggaagaggatggggttgggggccatgctcttcaccatttccggagtcacgcagccgggggcggacacgccgatgaacacatcggcgcccttgagcacctcggccagagtacccttacggcattcctggttggtgatttcggccatttccgtcttctcggcgttgaggccctcccggcccttataaatcgcgccctgccggtcgcagagaaccacgtccttgaggcccatggcgatgagcaggcggatgatggcgatgcccgccgcgcccgcgccgctggtcaccacgcggatttcttcgatcttcttaccggtaagcttgagggcgttgagcatggcggccagggtcaccactgcggtgccgtgctgatcgtcatggaaaatcgggatatcgcagcattccttgagccgccgctcgatttcaaagcagcggggggcggagatgtcctccaggttgacgccgccgaagctgcccgccagcaggcgcacggtgttcacaatatcgtccacactcttggaccgcacgcacagcggaatcgcgtccacgtcgccaaaggccttgaacagggcgcatttgccctccataacgggcatgccggcctccggaccgatatcgcccaggcccagtaccgcggtgccgtcggtgaccacggccaccaggttggagcggcgggtcaggtcatagctcagattcacgtccttttgaatggcgaggcagggctcggcgacgccgggggtataggccagggacaggtcgtcccgggtgttcaggggggcgcggcagaccacctcgattttgcctttccattccttgtgcagtttcagcgattcggcagcgtaatccataatgtcatcctatcctttccatactatctcgttaaatattgagctgggagataacttccttgagcgcgtcggcgctcttatgcagcatggccttttccccgtcggtcagcggcgggatgatggccctcttgaggcccgccgcccccaccacgaagggcaggctgaggcagacgtcgttgataccgtactggttgtgaatcatggcggacaccgtcatcaccgagtcggtgtcccggatgatgcactcgcagatacggcgcaccgccatggcgatggcgtagtaggtcgcgcccttcaacgcgatgaccttggcccccgccgtgcgcacgtcgtcctcgatttcccgcagctcttccttgccgcagtggttgtgcttgtcgcagattaccgagcagtaggtgtccatttccatgcccgcgatggtcgccagggaccaggggatcatggaggtgtcgccatgctcgccgaacacataggcgtgcacgttctttgagttaagccccacatgggcggccagtcgggaacgcagccgggcggaatccagcatggtgcccgagccaacgacctggctttcggacagatgggtcgttttcagaatggcgtaggtgatgatgtccaccgggttgctgaccaccacatacaccgcgtcaggagcgaaacgagtaatctgcggcatcaccgatttgacgatgtccacattggcctgggccaggtcgatccgggtttgtcccggcttgcgggccatgcccacggtgacgatgacgatatcggaatttaccgcatcctcatagccgccggcgtggatgttcaccggcgcgctgaacggggtgccctgcaggatgtccgccgcctcgccctgggcctttttctcgttgatatcgatgagaacgatttcggacgccatgccgtccatggtcagggtatacgcgatggaggcgcccacattaccggcgcccaaaacggtgatcttcttcccttttcgcatacggttgtctcccttaactctatcggcttacccggattgggctggctgcacaagccccgcggtacaccctctccggaccctccggtaacccggcgggtcgctgtcggaatttgtctgccccatgacaaagcgccaaactcccccatgatgcattgttaaaactataacatattctctaggccttgtaaataggcaattgttaggcaaaaccgccgacaaacgcgaaattttctacgagattatgcagcgctttatataaattcacccaaaaagacaaaaaaatagccgcaacggacaaaccgatggcggctgagagactactccaggagttttctcgaaagttggccgtgggagcccgccgcttggaggcggcgtaagagagacataacgaaaagggatcggccaaaagaccgatcccttttcgttatgtcgccagggcgacgccctgttcctgcgattgtgcggtatacagattataatatagcccgcgccgggcgataagttcgtcgtggctgccgcattcctgaatgtgcttgtcggcaatgtacatgattttatcacaagtcttgatggtggacaaccggtgggcgatgataaaggaggtccgccccttgagcagcgccgcgatcccctcctggagcagccgctccgttttggtatcgatggaggaggtggcctcgtccagaatcaggattttcgggtcggacagaagcgtacgggcgaaagagatcagctgccgctgcccttgggagaggcggctgccccgttcgttaacctcggtgtagtagcctcgatccatttccatgatgaaatcgtgcgcccgcaccgcccgggccgcggcctgcacttcctcgtcggtggcgtccagccggccatagcggatgttgtccatgatagtgccgctgaaaataaagctgtcctgaagcatgatgcccatctggctgcgcagggagtggagggtgacgccggcgatgtcatatttgccgtccagcaccacctgaccgccggtgaggttatagaaccggctgataagattgaccaccgtggtcttgccggcccccgtcggccccaccagggccacgctctcaccctcccgcacggagaaggagaggttctccagaatattgacgcccggctcgtaggcgaaggtcacgtcacggaactccacctcgccccggatggcgggcaaaggctgcgcgccgggcagatcgtccaccaccaccggttcgtccatggtttcaaaaatgcgttccaggtacgcgatgttattgatgaacatgttgtagatgttggccaggttggtgatgggctgccagaagcggctgacatactgccccatggccagcagcacgccgaaggataccatggcgccgccaatccagtacacgccagcgatgtacatcacggtgaagacgatctggctgatgatttcggaagagagccacacggcgttgcccacatagacagccttcagccaagcggcgcggcaggcggcggccagccgcttcatgatggagatgttctcctcctcccgggcgaacagctggctgacgcgcacgccgtcgatgctctccgcgaggtaggcgttatagttggaatttttgttggactgggcctgccagtatttccgctggcggggcttgatgtaccagatgaccgccgcgaaaagcgggagaccggccaccacaatcgtagccagcagcgcgttggtggagtacatgaacacgatgataaacgccacgttgacgatttccaggatgctgttgatgatgccgttggacagcatgtcggacaccgagttgacgtagttgatgacccgcaccaggattttccccgccggccggctgtcgtagtagctgaagggcaggcgctgcagatgagcgaagagatcctcccgaatatcgtagacaatctcctggctgacatgagccataatgcgggcccggatggtggtgaagacgatgccgataatcacgatgagggtgtagaacagggccaggcggcccagcaggccgaaatcgttatgcggcacggcatcgtccagggcccactgcataatcttcgggccgaacagcgccaccacgctggcgatgcaggacagcaccagagcgagcaccattttaaaggcatgcttcttaacgtacttcatggcacgcttgaggtgggcgaagctgaacggggattccaggttttcgtccacgtcgaatttgttccgagccatcagcacacacccccttgagcggtcacggggacggattcctcatgaatatcgttctgcagggcataggtttcccaatagtaaccgcggtttttcagcagttcctcatgggtgccccgctcggttatctgtccgttttccagcaccaggatgagatccgcgtccttgacggaggaaatccgctgggcgatgagaattttggtgcagggatagggcagctcgcgcaactgccgctgtatgtatttttcggtttccatatccacggcggaggtggtatcgtccagcaccaggatggcgggctccaccgccatggcgcgggccagggcgatacgctgcttctggccgccggaaaggcccacgcctctttcccccacaatggtgtcatagccctctggcattttgacgacgaattcgtccgccgccgcccgccgggcgaaatcccgggcctccacctcggacaaagactggttgccgaaggcgatgttgccctccaccgtgtcggagaagaggaacacgtcctgggtggcggtgccgatgccgcggcgcagctcctgcagcttccacatatggacgttgcagccgtccaccaggatctcgccgctgtcggcgtcatagaagcgggccagcaggttgatgagggtggttttgcccgagccggtggggcccatgatggccaccgtctggccaggctccacctcaaagctgacatccttgagcacctggacgccgccgaaggaaaaactcacatcccggaaggcgattctcccttccatgtgcggatggctctcggcgtcgggccggtcgacaataaggggccggccgtaatacacctcgatgattttggtcgcggaggcgccgaaccgctgcaaatcgtttatcagggtacccaggttgcgcatgggattggccagcgcccaggacagggaggtgaagatggtcaggtcaccaggggaaaaggcgccgggaccggggtgcagctggcccatgatgatgagcgcgccgccgaagaagatggtgataagggtcatggcgttggccagcacctcgatcatggggaaaaaggtaagccacaacttattgatgtccaggttcgcgtcccggtactcctggttccgctcatggaaacgctcccgctcgtaatcctcccgggcgaaagctttgaccacccggttaccggcgatattttcctgggcggcggtgttcagatcggacaggcgatcccgcatgccgacgaagaggggatgcacttttttggaatacagcttggtgatgagcatcagcagaggggtaaccgccagcagggccagggtcaactgccagctgacgcagaaaaacatggtcagggtggcgatgaacatcaccacgctgtccaccacctgataggtgagaaacgcggtaaaatggcggcaccaatccagatcggcggacaggcgggtcatcaggtcgccggtgcggttgcgatcgaagaaccgcatctcctgatgctgcaggacggtgaagagatgcacccgcagattgaacatcagatgctgagccgagcgctccagcagaataaccatcacataccgcatgccctgccgcagcacctgcaccgccaacatggagaacagcagcggcagcaggggatccgggttctgggggataatgacatcgtcgatgagcttggcggacagaaaggggttgatcaccagcatgacgctggtgccggcggatagaatgagcgcgacaatcagagcgacgcggtacttgcgttcaatgttacgccacagccatcggatttgaaacatatcatcaccctgcctttcaaattccccggcggcttcgcggggaacttgttaacaaactatttacacgccctattataccggcctgttcaaaaaaagatacccttattcagccgaaatctcttagcaatttcgcacgagttttcgtcaatatcacggggaggaagcgacgcgccctcatataaaaaggaaatataatatcgaccgaggcgcagcaaaaaccggcaggcaaacaagagcctgccggggcgggttcgcgtcccctcactttattcaccagccgctcaggccggccttctgcatggcgcccagaattttgtcgttcagagggccgtacgcggcggacagatcggccagcaactctttggttctctgccggttggtgcagccgtccaccgggcagcgggatttgaccaccggcagcgcggcccgctcggcgcagcgggcaatatccgcttcctgcgcgaatatcagcgggcggataagggtgagatcccgcctgtccagatagcttttcggcgaaaagcaggccagggtgcctcccgccaacagattcatgagaaaggtctccgccgcgtcgtttttgtggtgccccaaggcgacaaaacggcagcctgcctccttggcggccgcgtgcagggcgccgcggcgcatccgggcgcacaggctgcagggattggcctcccgccgctcctcgaacaccacctcccacagccgggtgcgacggactatataagggacgcgcagctcctcgcacagggagaccacgggggaatagtcggtctgccgcccctcaaagaccggatccagcgtgatggcggtgagggagaagggggtggggaagaattcccgcagacgagccagggccacgagcagcaccaagctgtccttaccgcccgatacccccacggccaccgacgcgccggcgggcagcatatcgtaccgctccacggcggcccgtgtcagggacaggatggatgaaaacggatcagccatagcgaaattcctccaagcgcgcccaaccgggcgttttcccccatcataccggttttgcaccgccggcgcaaggggaaaagccggggaatcctcgaaaatcgcatctgaaagtacgggaaaccttgtatttgtctgaaggatcgggtatactgaaagaaagtccgggaaagggcgtgccaggcgcccgccatgccggaacagccggcgtcaaaacggacgtttgtcggcccctcttgacacgccgggcgatatgatgtaacatagtatccaaaaccagataaaacgggaggctgctgtatgagctacagaattaccaccgattccacctgcgatatgccccgggaattttatacggagcattctatcccctgcgtaggtctcggctttcagataaacggtaaggagtaccgggagggcagcgaggactgcatgcccattcatgatttctacgaagcgctgcgcggcggcgcccagtccaccaccatgcaggtcaatacctacgattttatcgattttgtggagccttatctgcaggcgggggaggacgtgctgcatctctgcttctccagcgggctgagcggcacttatgaatcggtggagcgtggcgcggcggagctgcgggaaaaatacccggatcgcaccattttggtggtcgattccctggccgcgtccatgggcgagggcttgctgctctattacgcccagatgcataaggaagcgggcatgaccatccaggaaaacgcgaagtggctggaggacaacaaactgcatctgtgccattggttcacggtggacgatctgatgcacctgcatcggggcggccgggtttccaaggcttccgctattttcggctccctgctggggatcaagccggtgcttcatgtggacgacgaggggcatctcattctcatgagcaagagccgcggccgtcagggcgccatggaggcgctggccgccaaaatgaaggaaacggtgaatgacgacgtgtccgatcagatgatcctgatcagtcacggcgactgcctggaggatgccgaaaagctcaaggccatcgtgcagcaggtcaccggcgcgcggcattttatgctgcacaccatcggcaccgtgatcggcagccattccggccccggaacactggccctctttttcctgggaaagcatcgataaacggctacatgacaaagcaaagcggagggcttgtcccctccgctttttcttatctatccgaaaagctctgccgctgaaaccgctgttccagcgcaaactgcatcacggcgtttcgctggatgctgtctagctggcggtaaatgttgaggaaggccagttcctcctgggtgagatctaccagagagcgagaggtctccgtgttatcgcggggataatggttgtcgtgaagcgtcaccgaagcggagacatcccggtcgcggcccaaaagaaagtccacactaacattgaaaatacgggaaatacgcagcagcgtgtcataatccggcttggttttatcaatttcatagtaagcatatgtggaacggtctatactcaggctctgagccacctgcttctgtgtcagattgttggacttgcgcagcatgcgcagacgttcggaaaagacagaacgagcccgtttgtcattggacatactgatgcccccttccctccaagtatatcatggccgttttccaaatgcagtacatgtgaattttaaccaccaatatgtgaaatatattcacttatttccggtagtatttccagaagagccgcaattatgcggaaattttttcctacaattaggctgaaatatgaaggattgttgtgggatctgcatcgtaagaaagttgcggtaaaatcttagccagctgtgaactcatccgaattatccgtttatattagccattttttacctttttatccggtgggcggatatttttcgttgaggaaaagctgtggcaaacaacaacatatagaaaaaaagggacgggattgcaaatttatgcaatcccgtccctttgcctatacgacaatacgttgtagaattttcaagcggccagaccgtcctgccgcggtgctttttccttcttaaagacccaatgcttttgaatggggaaactgattaggaacagcagcatatcgatgggaattttcaccacggtactgttccatccggtcaggtgggtgaaaaagctgaccccctgggcggacaggaacaaaatgaccaccgccagtgcgtaatatttaaccagcgtaaccgcgccgttggccttgctctgaaaaaccagctttcgattgagcaggtagttccacaaggaagatatcacgcgggcggctgccgtggcgatgaggatggcgtacgtgattttgatatggggcacatcggtcgtcagcagctccggcgcggccaggcgcagcacccagctgagcatggtaaacatgatgatatccaccaaaaagctggacacggaggaaaagagaaatttgccgaaaaccgcatagatcttgatagaatccagcaccggatgaaaatgagaggacgcgttctcttcgatataaacggtttcgatcggcacctcccgcagcgggattttgtcctcggcgcaatcgatgagcatgttcatctcatattcgaaccgctcccccttggtggtcaggaagcgcttaaccagcggggaagacatggcccgcagaccggtctgcgtgtcggaaatccgaacgccgcacagcagccggaacacattgcgggtgatgacgttgccataatggctcttaaaggggacatcttctttcgaaaaatcccggctgcccaggatcagggcctcggggtgggccagcatggcgtcgcagcatgcccggatatccggcaccttatgctggccgtctgcatccaccgtgacaaggcccttgcaggcgggataggcgttcaggaaatgattaaaggcggttttcagcgcccggcctttgccgaaattgatatggtggcgcagcacctcgcagccgaattcctcctccgcccgctgaaagtacggcgcatagtcctccgcgctgccgtcgttgacgaccagaacatgaggaaagccccctgctttcaaatcctcaagcagcttcatcagcttgtcgtctgggttcagcgatggaataaccaccaaaatgttgtcgtatataccctccacgcgatcctctccctgtatctcgaacggacgccggcaccgccggaaccccgctgaaaaattgcataaatgatgaaacttttctttattatagcagatatccctttacaaatgttcgaaaagagataaaataatttattaggaaacccttaagtttatctcagcagaaaggaagccggaaaccatgaaaatcctttgcagccgctgcaaccagccctttgatgggccgatttgtccccgctgcggacaggccgtggccacgtcgggggccggctataccaatatggccccgccgcccgtccgccccaaaaagcgggtctgggtggggctgaccattacggggctgttcgctttgttaatggtggcctgcaaccaattggggcagctgttttagggcggcgtcccgacgcggaaatttgcgccgggactcgcttttccccttgacggcggccggtttgtttgctataataccggaggaatccaccatgtcccgtaccgtttcccagctcgtcgggctcataacccgagggtcactaggcagaattttccacaaacagaaagccggttccgctttctcatagatgctactgtggctcagctggtagagcagctcactcgtaatgagcaggtcgtccgttcgaatcggatcagtagctccaaaggaaaagacaggcgacggcctgtcttttcctttggagcgagattcttccgctcgacgcgcgggagaatctcgtataggcttctcctttacatggccgttcccttgcgcagccttttaccgtatcttttgtcataacacaacacgcaaaaactccctgaagccagccggctttcagggagtttttgcgatcagacagcctttgaggccgacgatacgcggcgcaggcgcctggatagagaagccctgccgctaaacctactgtttagcgtcctttccgctgttttctcagtgtcaaaagcatagcccccgccgctgtcgccagcatgcaggcggcagccggcgctacggaacctgtgccgggggaggacggagaaggatcctccgacgtatccgactcatccggtatgcccggctcttccgcttcttgataatccaccgcacggccgtcggtcaggaactggaagccattcgggacaatgtcgtgaaataaccaaaaagaggcgccgcgttaggtgcgcctcttttttgccacctagaaccgccgggcggtcacatagtgatcggtgaaatacttcagcgtcatgtcctgcacaataaccggtttttcctcgttgctgcaggcgatgaaccggccgcctccgagataaatgccggtgtattgggcgatctccggggtgtcgttgtagaagaacaccacatcgccggcttgcaactcatccttgccgaccgccgttcccgccttggccaaatcgccggtcttgcggggagccgtgatgccgttctgtttcaggcagtaatacacgaagccggaattgtcaaaatcgtcgggtccggccgcgccgtaccgatagggcttgccctccagggttttggccagggtggcgatggcgtctcccttgtcgtccaaaggcgtctcgggcggagtggttgggggcgtggtgggcggcgtggtgggatcgctgctttccggcggcgtggtgggcggtgcctcggtgggtgccgtggtgctctcgtcggctttaccggaggtcgtggtgcccggggcggaggactggggcttaccgccggccggcgtgctgtcgcaggcggccagcagcagggaggtcaggaacagggagaccagaagcgcggggatacggatctttttcatacaaaacacctctcgcatatattgaattggaggaactttccttatcttcagtgtacggcacggacatgctgaatgcaatgacagcgcggttacaatccgcttacagtttctttaccttctccgggagttctggaaaaaagtgtaacaaaatgttcacaccggatgacaggtttgtttccggccccgccacggttccccgcaccaatcggggcttgccaccatactatgggatgtaagcgcccgcggcgccggccgccgcgagctttacaggaaattgcagggcgtgaggtgatgggtttggaaattcttcgggtggagaacatagaggagaagtatcaagcgcaaaacggagaagtcaccgcccttgagaacatatcgttttccatggacaagggcgagttcatgagcatcgtggggcccagcggctgcggcaaatccacgctgctgtccattctggccgggctactgaagcccacggccggcgccgtgtatgtcaagggggaaaaggtcgagggcatctccggccacatcggctatatgctgcaaaaggacagcctgctggactggcgcaccatttacagcaacgtgctgtttggactggaagtccggcatatgctcacccaggagaccgtcgaccgggcggtgcagctgctgaaaacctacggactgtacgaattcaaggataaatacccagcgcagctgtccggtggcatgcggcagcgggcggccctaattcgcaccctggccatcaacccggatatcctgctgctggacgaggcgttttccgccctggattaccaaacgcgcctgaccgtcaccgaggacgtgtaccgtatcctcaagcaggaggcgatcaccaccgtcatggtcacccacgacattccggagagcatcagcatgggcgaccggattctggtgctcaccgcccggccggcgagggtgaaggaaatcctggacatcgatttcggcatggatcaccgcaccccgctgtcctgccggaacaatccgaaattcgggcaatatttcgaccacatatggaaagaactggggatgcatgcttaagaaaaccgacatcccgccgctgtcaaaggagcggcggcagtatctgaaaaagcaaaagcagcgaaaaaggcatatcctgtactggcaaatcggtattctggtcgtttttatagccgcctgggaaatcgcggcgcgggtggggctcatcgacagcttcattctcagccagcccacccggattctgcgcacctacttcaacatggcccagaacgatttgctcatgcatatgggcgtcacgatttacgaaaccctggtgggcttcctgctcggcgcggcgctgggcaccctgctggccatcgtgctgtggtggagcgccttcgtctccaaggtcagcgagccctacctggtggtgctcaacagcctgcccaaaatcgctctggggccggtgatcatcatcctcgtcggcgccgggacaaaagccatcattttcatggcgctggccatctccctcatcgtcacggtcctggaaatgctcagcggcttccgctccaccgataaggagcttatcaaaatggccgccaccttcggcgcgtctaaacggcagattttcaccaaggtggtgttcccctccaacatcgtcaccctttttaactccctgaaaatcaacatcggcctgtccctggtgggcgttatcgccggggagttcctggtgtccaaggcaggcctcggctacctcatcgtctacggtgggcaggtgttccagctcgacctggtgatggccagcgtcatcatcctgtcggtggtggccgccctgatgtacgagggcgtcgtgctgcttgagaagctagtcatgcggtggtacgggcattgacccgccgccgcttctccaaaagctaatttcggaaaggaaggattctatgaagcctacataccggcgtcttatcggcgcggcggcctgcgccgccctcattgccctgctgcccgctggctgcggcggcaaaacggcgggcgacaaggtgaccgtctgcgaggtcacccactccatcttctacgcccctcagtacgcggccatcgagctgggctttttcggcgaggagggcatcgacatcgagctgtccaacggccagggggccgataaggtcatggccgccgtcctctcggggaatatcgacatcggcttcgccggccccgaggcctccatctatgtgtacaacgagggcaaggaggactatacccaggtcttcgcccaaatgacccagcgggacggctccttcctggtgggccggaaaaaggacgcctccttctcctgggataagatccggggcaagaccattctgcccggccgcaagggcggcgtgccctatatggcgctcgaatacgtcatccgcaaaaacggcgtggatccgtataaggacgtcaccctggacaacagcatccagttcgccctgatggcgggcgccttcaccagcggcaccggggattacgtcaccctgttcgagcccaccgcctccatgctggaggccgaaggcaagggctatatcgtggcctccatcggcaaggagagcggcgaaattccctacaccgcctatttcgccaagaaaagctatatcgagaaaaacgcggatctcatcgaacgcttcacccgcgccgtctataaggggcagcagtgggtggcctctcacaccgcccgggaggtggcggaaatcgtggccccctccttccccgataccagcgtcgagctgctcaccaccgtggtgcagcggtataaggacatcgacgcctggagccccgatcccgtcctgaaggaatcctctttccgactgctgcaggaagtcatgacccaggcgggtgagctcaagcaggcagcgccatatggcaaagtggtcaacaccgccttcgcagaaaaggtcaaggcccagtagggaggcggcggaacacttttcatatagaggggacaaacgcttacaaggggccggattccggcccccgatgccccacaccccaaaagcccccggccgtatggccgggggcttttgggggtaaccaggcttgtcgattcgtcagcggccttttctcttcgcaaacagcccatatcccatgccgatgccgccgcccaggccagccgcccccaccagcagcagcgtccaccaggggacgccggaggctggtgcggcacttcccggaacagctgcgcccgtcgtcgtggccgcctgggtcggttcggtcgccggcgtggtcggcttctcgtccacacggccgtcgtgggccgccgcccgcttgacaacgaccgtgtactccttcttgtctccgttttccgccgtgcagatcacctgcaccgggttgtcctgcccggcggccagattgtccccgccgatgaccgccacactggctctgccgtccgccgccttgccgctgatcttcacactggcggtttcatacggcagccacaccacgtactcggtcacgtcggcgcggaaccctggcgataatagaaatccgtccacggtgatacccgctaaggcattgttcccgcttgccacatagttgggatccttctcccggtgcacccggatggtgtaggtcttcttcgcgccgttttccgccgtcaccgtgaccgtcacattcgtcgtgccgtccggcttcagcgccgggctgttcacgctcaccttcgccttgccgtccgccgccgtcgccttcacttccagcttggacacgctgaagggtacctccgccgtgtagctggtcgtgtttgcatgaaaagcgggagatatagtcgcgttgctcaccgtcagggaggccagcgcgttgttaccggacaacggcacgcccacggtggcgctgtagcggacagtgccgatacccgcgtccgcgctgccgtccgaggctttcacatcctggtaatacacggtgattttcgtccccgccgccacgtccttcaccttgaaggagacggtgaacaaatccttgccgccgttgatgggcgcagacaggttgttgtcgtaggccaccatgttattgccattgaactccaccgcccagggcgccgcgattttctgcttggtgccggtcagctggagctggccgccgtcataggtcagagtacccgacgcgcccgacaggttcgaaccattcagcttgaaggtcagggtgatggtgtcccccgcccggacggtgccgggtccggacagactggccgaggccgacgccgccgaagccgtaaagggaaccatcacacatatcgccagcagcagagccgccaaacctaacccaatctttttcatactcgtcatcctccgtcagcacgcccggggctgaatcttgtccttgcccaggatatgcgccttgatctgaataaaatcggtgatggaaatcaccttgtccccgctggtgtccgctgccttggccgccgccccggcaagggcgctctttttcagcacatgcgccttgaccgccagcatgtcggtgatggtaatctgcccgtcgccgttggtatctccggtcaccacaaccgccgctgtctgcttgaccgtcccgccgtccagcagcttcaccgccatgccggtgcccaccaaagcgttcccggtcacctccgtgttccccttgtacaccttgcagtaatctttttcgttgatgccgcccagcagctgcgccgccgtggtgcccgctccgactttgctgaggaatccgccgccgacgctgtatgtgccgctggtgatggacgaggggacgcggcttttcaccgtcaccgtgaaggaaatgggcggcgtctcctgataccgaatagaaatcgtctgtgtcccgatttggttggggttgtactgatctgccccccaggagccctccagcttttgttccgccgtggtgccattgttgtagcgaatgaggatgaccgcaccgctcaaggaaagctcctccccgacaaaatagacggtcttgtttggcttggccttccacgcgatggacaccggttttttagcctccaccgttacggtgaaagaggcctctttcccttgataagaaatcgccatggttttgatgccgggcgcggaatcgtacccttgaatcgttacccgatcggtaacgatttccgaggtgttgttgtcgtaataagccgtgacttccattccggccgcgctgaaggcattcccttcgatatacgtcagcttgttcggcagccgggatacggcaattccggtaagggctttggataggaccatcaccgtcagcgtcgttgttttcccacggcagtcaatccgcacctcctgccttcccggctggctgaaatcataggtttccgtccagccggtggcgaggacttcttttgtcccgttatcaaataccagggtcagttccatccccgtcgtatccagcgcggttccttccacataggtcatttgatccgggtttttagtgaccgcaatcgacaccagcgccttgccccgcaccgtcacctccagagccgccgtcttgcccccatagaccacggtgagccgcttgacgcccggtgtggagtcgtaaccgctgataccatagtccgtcaccacctccgaggtgccgttgtcgtagtaagcggtaatttccatccccgtcgaatcaaaagcatccccttccagataggttcgcttggctggctgcttcgtcactcgaatttccgtcagcgccttggcccgcaccgtcacctcaaaagttgctgtttttccgccataggtaaccgtaatgatcttagccccgggcgcggaatcgtagccgccgatgccgtaatccgtcaccacctccgaggtatcgttattatagtgggcggtaaccaccatgccggatgcgtcgaattcatccccttccaagtattcgtttttgatcggatgagtcacctcgatacgctcgaccgacttcttagtgatctccacctcaaaggtcgcctttccccacttgtaggtgacagtcaatttttgcgtccccactcgggtattatcgaatccggttaccatatcaagagttagatcaatgatttcggaggaaccgttgttgtaataaacggtgacctttccgccggtgacattcagttcgtccttgccttcgaggtattccgttttggtcggcgggcttacctcaattttagtgagagatttggctattatggttacttcaaaggcggtggttttcccttgataagtaatggttagtatctgcttgccaatcctggtattatcaaaaccgctcaccatatccaaagtaagggcgatctcctcaccggttccattgttgtaggtgagagtgagccaaccgccggcgggatcaaaagcggtctcctcaatgtattccaccttggttggattctgccttagtgagatggaaacgagcgatttttcaaaaatcatgggcacactcatcaactctgggcaaagataatccttgttcccaatcatcgtccagacaaggtcaaagttaaagtctataaaagtactttcctgtttcatttgttccattgaacaggaagtcgtgaagtcgtcgccagtgacgccttgagagataatattaagataataacaatttctgacggcttttccatcgccattccgtcctgcaatcccggctatataaaatcctggccctgtcgtgctgccagtattgtaacaatcacaaattgttccgccgctctgattttcccctgcgatcccacctacatcgccagtattactgaacacgctaccgatattgtagcaattgcggatcgttccccggctgatccctgcaattccaccggtctctgctgacgtatacctccctaaatattcagaaaaaacagaagagctcacattcccggtattgtagcactcactaatggtgctgccctgattatatcctgtgatcccgcctatatagggagcgcatgcagagatcacatcgggagatgtggatgaaacggtagtgcttacccttccggtattgtagcaattgtcgattgttcccgccagactatagccagcaattccacctacatgagcgtgtgcactgctggaggtattagaagacgaaaacgaaactgagacacctatgcttcccgtgttatggcaattgctgatggttccctcccggttataaccagcgatcccgcccacataggagttcatgtaggcatatgcagacgaaacagcagcgctcacagtaccgtccaccatgcctacgtttcgaataattcctgtattacaaccaaacagtcctacaaaaacaggattcttgtccgaaatgcttatttctaatccatgaatggtatgattagcgccatcaaagacgccaaagaacgggttttcacttgttccaatcggctcccagccctggccgtcattgtaaaaaaaccgttttcggcaaagtcgtctgtggtaaaatgaatgtccgccaccattttaaaatatgcacccaaatggttccgcacattattcaggtgttctttattggcaataagataaggggcatattgcgcccctgtcccgccgttaaattctgtgacattttcctcttgaacatcagcatggaacatcttttgtagttctggataaggatacgtttcatttccagacattgtccagatggcatcaaagtcaaaacccgaaaaggtagcctgtgatctcatttgttccatcgtacaggaaactgtattatcctctccggtaccaacgccgactttggaagccacattcagataataacaatcttcgcctagtgttccgtatccattcccccccgcgatcccgcctgcataggcactggaagtgaaacgatccggtgaataaaaaacagtggcatccacactgccgatattgtagcaattgccgatcgtgccataacttgtattataccccacgattccgcctgcatgggcttcgaattggtcactgtgagaatggaaagaagtggacaaagtagcgtttacgctaccaatgttatagcaattgctgatttttccataattttctcctgcaattcccccagcatgagttctgggaaagtcaattcgatcgcttgaatgaaaaatagtggcactcacatttccagtattgtagcaattgctgatcgtaccataacttgtattatatcccacgatcccgcctgcataagcatccggagtagtaggataagatttagatttggcagatacatcacaatctatgagaccaagatttttgatttcccctttattaaaaccaaacaatccggcacaaatccctcctgttccgctacggtaacaagctaggccatcaacgatgtgaccatccccgtcaaatacgcctgtaaaatatcgatctgccccaatcggctcccagccctgccctccgttataaaactcccctccctgggcaaaatccgcctcgttaaattcaatatccgcgaccatcaaaaaatgtgcgtccagatggttccgcacattgttcaaatgcgttttgtttgaaatgagatacggactctcctccgtcccgtctccgcccagaaattccgcggtattttccatcgctgataaagtcccgacagggagcgccagcatccatatccatgtcgccaagaaaaacgcaagcccctttttaatgcgtttcatatgtatcgtcccccctataaaatgacgtagttattctccgtagtattataaaattttccagcggttttctgttcttctgacaggagaattttcaaaaatttggaaaaatattttaaaaaacggccgcacctgtcacgggtgcagccgtgtttccatgataattatccgggcggccgacagaggattctgccgaaaaggccgctgcggcaagccggaaaagcttgaagggcctaatcgtccagaatgccgtcgagaaggccggtgcgcatcggctcccgccgggtataggcggaggtcagggggacgaagcgctgctcttgactgctcttataaagagactccatgatttccaggacgtggaaggtctgctgacagtccgcgcggaacgcccggccggtgcgcagcgccttggccatgtcagccaggccgagggcccggctgttctccgcgtaagggaataggagaggcagctcccgccgggtgccgtcctccggacggtatagctcgacagggccgccgaagccgttgggatcggggcacaccagcgtgccctccgcgccgtaaacctccaggcgcgcctgcccccaatagtggacgtcaaaggtggtgaacagggtgcccaccgccccgctggcgaattgcagcaggccggccacatgggtgggcacgtggacgtggatggtttcgccgcggtgcggctggctggtgatcagccgctcgggaaaggaggcgcgggccatcccggagaccatggacacgccgccgagcaggttcaccagagccgtcagataatagggccccatgtcaaagagtgggccgccgccccgctggtagtagaaatcgggatcggaatgccagctttcatgtccacggcagatcatgaaggccgcggcccccaccggctccccgatatagccgtcgtcgatcaggcggcggcaggtttgcagcccggcccccaggaaggtatcgggcgcgccgccgagcagcagccccttttcctccgcgagccgcaccagctcccggccctccgcgagatcggcggccaggggcttttcgctgtacacatgcttgccggccagcagggccgcgcgggacacctcgaaatgctcgtaaggacgggtcaggttcagcacaatgtccaccgcgggatcggcaaacagatcgtgcatggtggggtattgcttgggaatgcggtacttttccacggccgtccgcgtccgttcgtcgatcaaatcgcagacgcccacgatttccagctcccggaaccgggcggtgatgttctccagatagatgccgctgatggcgccgacgcccacgacgccgatgcgtactttttccataatgccctctcccgtcaatacattttggcgctgttttcaaaccgctcggcggtcagtccatggtcccgggcgaaggcccggccggcggccgcccacagcatgccacggcgcatcagctcctgggcggtcggagagcggtcgaatacgtcgtcgtgatggcccagagaggtataaaacacccggccgttgccccagaatttcgtccaggcgaccggcatatccaccggcttattggaaatgtggtaataattcaccagagggaagcgggtggtggccagcacctcgatggcgggatccacatggagataatagtgctcgctgcacacctcgaaatcctccagcccctccacgatggggctgctgccggagcgaatattgaccctgtaggtctggccgtccccgccgggatggctgacccactggccgccggtgatgaactgccactcggtatcctgccggaaggagtcgcacatccctccgtggcagccggccagccccaccccctcgcccaccgctttggcgacgttgcgggtgtagtctccagggatttcccccatggtccagcaggccaccagcaaatccatctcccgcaggcgatcgagatcggccaggcagtccagggtgtcggagaccgttacggcgaagccggcttcctccagcaggcccgcgaaacggcgggaggtgagctgcggctcgtgaccgtcccagccaccttggaaaatgagagcttgtttcatacgtgtcctccttacatggcattaaatatcgcagggcaggcccgcgccctgcccctgggagacaaaggccagatcgatgatccgtatcacccgcagggcctgcaccggcttaacgataagcttctcctccaaaattcctaaccaatatggtctttacttgcattatagcaggggaagtgataaaatacaggacaaaagcgcaaggaatttggacatttgttgcacacggaaggcggggcggatcatgcatccctggtatgagagccaagagacggatatccggatgttttcgtcctgcgatatggtctatcccctccatcttcacgagtccctggaaatcctgtatgtggagcggggggctatccgcgtgacggtgggggacgatgcggccgtcctgcggccgagggagctggccgtgattttcccgcatgttctgcacggatacgcgcatgcggatggggaggacggccatctggtgcacctgctgatagccaagccggcccaggcgggggattatgcccgcgtccttgtcagccggcatccgcgctgcccgttcctgtccgtggaagagctggacgaggtgccggtggctttccgtcatttgctgcggcatgggcggggcggggacacgccggtctgccgggcgtatctccagctgctgctcgccctgctgtggaaccggctggagttgaagcccaacacagacgcggcctatcaggagctgacctatcgggcggtggattatgtcaacggccatttttgtcagccgctttccctggcggacgtatcgcacgccctggggctcagcccctgccagacgtcccgcctgttttccggcaggctgggcatggggttttcggcctatgtcgcggcgctgcggatacagcgcgcccaggagctgctggcgcgcaccgatcggccggtgatggaaattgtctacgcctgcgggtttgacaatccgcgcacctttaaccgcacgtttctcaaagtctgcgggacgacgccccgcgcctaccggcaggaacgaaaataagatacgaaaagaggggttcgtcatggcttattgcctatatgccgcgtgctgctcccgccagggcggcatcgcggtgctggacgggacggaggagggaacactgtccctgcggcagatggcgacggccgaccggcccatgtatatggccatggacggcgggaagctgctgacgctgctgctggcgccggagggctgcgggggagacagcgctttgacggccttcccccaggaaaaggacggccggctgcggccccacggggagctgcgttccaccggaggggtggaggcctgccatctggcggcccggggcggccgggtatggtgcgccaattatggcaccggcagcgcggcgctgttggaaggggagacgcgccgcttggccgttttcgagggacaaggccctcacagggatcggcaggaggcggcgcacatccatcaagtggcgttcacccccgacggggaatttctcgcggcggtggatttgggcagcgacagtctgctgctgctggatgcggagctgcggctgaaaaaccgtacggctctgcccgccgggagcgggccgcgtcatttggcgttttcgccggacgggcgcttcgcctggtgcgtcaacgagctggcttccaccgtgacggcgctggcctatgaaccggggcggtttcacgtgcttcagaccgtgccggccctgccggcggagatgcggccggcggaaaactatcccgccgccatccgcgtcagccgggacggccgccgtgtgttcgtgtccaatcggggggccgacgtgattacggtgtttgaagcggagggcgaggcactgcggctgacgcaggccgtcccttgcggaggggcttggccccgggacatcctgctgacggcggacgaacggttccttctggccgccaacgagcggagccatgcggtgacggcgcttcccctccgggcgggccgtctgtgccccccggtgagcgctctgtccctccccgcgcccttggcgctgctggaatatacataaacatatataataaaaaagcccggcgcaccatcgcgg

SEQ ID NO: 3439 - DNA, 8591 bp, Unknown
  16S sequences of unknown bacteria
tacgcctgcatccccgttgcttattacaatgacgtctgccgccacggtgcccactcccgtgtgggaggcgattgtcgtgccgatgttacccagcacgattttacccttaagtttcggaaaacgcttttcaagctcctctatggtggcgtttgcaagctcaatacagtttgaatgggacacaaacatcttgccgtcataatctctgccgtttctgatgtttttctccacctcgtcgactgttttgattatggaatttttctttcctctcaccttgccgtaggcgataattcttccctcgctgttaaggtgcattatggggcaaatgttgagcacggtggccaccgccgccgcgggacccgacacgcgtccgccccttctgaacagcttaaggtcggtggcaaagaactgatggtgaattgtgtttctcaccgaaagggcccatttttccacctcttcggcggttttgcccccgtcgcgaagatctgccgcgtcgtccacaagcaggccgtagccggtgcagctgccgagagagtcaaccacccgtatttttctgcccggatgatttttcattaccttttcggccgcctcatatgcgttgttgaccgacggggtcatgcccgaaccgaaggcgatgtgaagtatttcgccctcatattcctccacaagctcttcaaaaaagcgctcgtatttaaaaacatttatttgcgaggtggaaggaagatagccctgatcaagcagctcgtaaaaaattttcagcgaatcgggattttttcccatatcgtcctcatattcgactccgttcaccgtgtaggtataaaacagaacgggaattttacggtcgcagacatattgatacggcaggtcaaccgtcgattcgcaggataaaataaatttgttttccatttaaaattctcctcgtcaaaaaacttttgccaaaatctttgtcaagtatatatcaaaccctctttaaaatcaatctatcccgaaaaaattcattccaccgctgtttttcccttctctaccgagggtagagccttaggttttatgccctttgcgcgcgttttttatactcattgtcctttttcgaaattgcgcccggtttgcccgcccgtccgcggcaaaagcttttcggcctttttcttcggcaggaattcaaagaaataatccgaaaaaaatttcaaaacccccttgacatggcgaaaaaagtgtgatatagtcgaaagcgttcaaaggctgtgacgaagacggtttagaacatacggcttttcagagagacggcggttggtgtgagtcgtcagcggtgttcttcatagcccatcccttccgagccggaggtccgaaaggaatttttccgagtagacgcttcccgtcttgccgcgtaaaggcataaggattgattgatcctgagtggcagtttaactgcaatttgagtggtaccgcgagtgtaagatattcacccgtctcaaagaaacttttctttggggcggtttttttattgccccgataaaaaacgatcaggaggaacagaaaatgacaaacgtagacaccgaaaaactgctcgaggtcgcccgcagaattcgcgaaatgcgtgagatcgtgggtctgaccgtggaggaaatggccgaaaaaaccgaggtaaccgtggacgattaccttaaatatgaggccggacagcttgacttccccttcacctttattcacaaatgttcacttgccttcggaatcggcatcaccgaccttctcgaaggacagagcgcccacctttcttcctacaccgttacccgcaagggcaagggtcaggaaaccgccaaggaggacggcatcaacatccaaaaccttgcccctcttttccgcaaaaaaatcgccgagccctattgggttcgttacgactaccgcgaggagcttcaaaacaagcccatccacctcaccaaacactcgggacaggagttcgaccttgttatcaagggtaaaatgaaggttcaggtcggcgacaacaccgaggttctcgaggaaggcgacagcatctattacaacagctccactccccacggaatgatcgccgtcgacggcagcgaggtgctcttccttgcggtggttctcccgggagaggctcacaccgaaaccgtcgtccgcgacaccctcatccccggccgcacccccggcaagacctttgtcagcgagaagtttataaagaccctcgaggacgaaaacggcgtgctcaagaaaatcgactttgtcaacgaggacagctacaatttcgccttcgacaccgtcgacgccatcgccaaaaaggaccccgaaaagcttgccatgcttcacatctcgagagacaaggtggagcgccgctttacatttaataatatgaaacgctattcggctcaggtggcaaactacttcacctctctcggcatcaaaaagggcgaccgcgtcatgctggtgctcaagcgccattatcagttctggttctccttcctcgccctcaacaagatcggcgccgtggccatccccgccacccatcagctcaaggctcacgactttgaataccgctttaaggccgccgatgtttcggccatcgtgtgcaccgacgacgacggagttccgaattgcgtggacgaggttgccgacaactgccccaccctcaaggtcaaggtagtggtcggaaaggacagagagggttggcacaactttgacgccgagtatcccctcttcagcgcccattattaccgcaccgccgacagcgcctgcggtgacgacaacatgctcatgttcttcacctccggcaccaccggctatcccaaaatcgcaacccattcctgcaaatatgccctcggtcactatatcaccgctaaatactggcacggagtcagcgacgacggtctccacttcaccatctccgacaccggctggggcaaggcgctgtggggcaaaatgttcggacagtggctgtgcgagggagcggtctttacctatgactttgaccgtttctcggccgccgacattctccccatgttcgcaaaatatcaaatcaccaccttctgtgctcctcccacaatgctccgcatgatggtcaaggaggacatctcgaaatacgacctttcctccatccgccacatgaccaccgccggcgaggcgctcaaccccgaggtatataaacaattcgaaaaggccaccggccttaagatcatggagggcttcggccagaccgaaaccaccctcgccatcgcaaacctcatgggtcagccccacaaaatcggctccatgggcaagccctctccccaattcgacatcacccttctcgacagcgacggaaatcccgttcccgacggcgaatccggagagatcgtcatcaagacctccgacaaggttccctgcggactgttcaagggctactacaaaaacgaagaaaagaccaaagaggtctggcacgacggttattatcacaccggcgacgttgcatggcgcgacgaggacggcttctactggtatgtgagccgcgtggacgacgtcatcaagtcctcgggctaccgcatcggacccttcgaaatcgaaagcgtcatcatggagctgccctatgttcttgagtgcgccgttaccgccgctcccgacgaggtcagaggacaggtcgtcaaggccaacgttgtgctcaccaagggcaccgagccttccgacgagcttaaaaaggaaatccagacctacgttaaaaagaacaccgctccctacaaatatccccgtatagtggaattcaaggacgagctgcccaagaccatcagcggcaagatccagcgcaacaagctttaatatttaataatttttctcttttggaagtttaacggaggcgaaagatgtacaattataagcgagtaaccctgctttgcggccattacggcagcggcaagacaaacgtcgccgtcaacatggctctcgagcttgcggctctcggaaaaaacacggcggttgccgaccttgacattgtaaatccctactttcgcaccaaggacagcaaagaggactttgaggcggcgggagtgcggcttatctgttcggaatatgccaacacgaacctcgacattcccgcccttccccaggatatatatgccgtcaccgacgataaaagtttaaatgtcatcgtcgatgtcggcggggacgaccgcggtgcctatgccctcggccgtatcgccccggctctcgtgagcgaaggaaatttcgactgtctcatggtcataaaccgtttccgtcccctgactcccgacgcaaaatccaccgtcgaggttatgagagaaatagaggcggcgggaaaaattcccttcaccgggcttgtgaacaactcgaatctcggtgccgaaacgacggcggaggacgtgctgtcgtcggaaagctatgcaaacgaggtgtcccgcctttgcgggctgccgattaggctcacctcctttgacaaagctcttgaaaacgagctttcggggaggctttcgaatccctttccccttaaacttcaaaaaagacccgtataaaataaggagcgataatatggcaaagcttacctttaataccgacaactgcaagggctgcgggctgtgcgttgacgcatgtcccaagggccttttggccctgtcggaggaaaaaatcaacaagaaggggcatcatcccgccgagctgaccgacgagggtgcctgcgtcggatgtgcgtcctgcgcgataatgtgtcccgactgtatcataaaggttgagaggtgaaggaaatgtctgaaaaggtacttatgaagggcaatgaagccattgccgaggcggccattcttgcgggctgccgccactatttcggttatccaataactcctcagaccgaaatcgccgcttatatggccaaaaaaatgcccaaaatcggcggtgtttttcttcaggccgaaagcgaaattgccgcaatcaacatggtatacggcgtttcctcggcgggaaaaagagtcatgacctcctcctcaagccccggaatttcccttaagggcgaaggactttcctatcttgccggatgcgaccttccggctctcgtggtaaacgttcagcgcggcggccccggactcggcggaattcagcccagccagtcggactatttccaggccaccaagggcggcgcccacggcgattttcacatgatagttctcgctcccgcctcggttcaggaaatggccgagctgaccgtcaagggctttgagcttgccgacaaataccgcatgacctccatgataatggccgacggcaccatgggacagatgatggagccggttcagcttgatttcgacataaagcccgcccccgaaaagccttgggccaccaccggcacgaaaatgagccgtccccacaacatagtgaactcgctttccctcgttcccgaggagcttgagcagctcaatttcgcccgctatgagcgttataaaacggtggaaaaagaggttcccatgtttgaggaatatctcatggacgacgccgagatatgcgttgttgccttcggcattgccgcccgagtttccaaaaacgccgttaacgaggcgagaaaacagggcctcaaggtcggtatgataagacccataaccctttggcccttccccgtcgccccctttgagaaggctctttcacatgtaaacagatttatttcggtggagctttccatgggtcagatgatcgaggacatcagacttgccgtcaggtgtcaaaaagaagttacactctgcaacagggtgggcggtatgattccctcccccgagcaggtgcttgaagcaatcaaaaacggaggtgcggaataatggtggtatttgacagacctcatgctttaatcgacgttcccatgcactactgccccggctgtacccacggcattgttcaccgtcttgtggccgaggtaatcgatgagctcggtatcgagggaaaaaccatcggtatcgctccggtgggatgttcggttatggcttataattactttaactgcgacgttatcgaggcggctcacggccgcgcccccgccgtcgcaacgggcgtcaagcgcgccgaccccgaaaaccacatcgtctttacatatcagggagacggcgacctcgcctccatcggtatggccgagacggttcacgccgccgcccgaaacgaaaatataacggtaattttcataaacaacgcaatttacggcatgaccggcggtcagatggctcccacctctcttcccggtcaggtgacccagacctctccctacggccgcgaccccaagctctgcggctatcccgtcaagatatgcgaaatgctttccgagcttgaaggccccgaatatctcgagagggtcacagtcaacaatgttaaaaatgtcagaaacgccaaaaaggccattaaaaaggcttttcaaaatcaaatcgacggcaagggattttcccttgtggaggtcgtctcctcctgtcccaccaactggggcatgacccccaaagaggctctcaagtggattgacgagcatatgctgccctactatcccctcggagtgtataaggacagatcggcaaaggaggaaaaataatgagcaccaagagtattcttttttccggtttcggcggacagggcatactttttgccggaaagcttgtggcctataaagggcttatggatgacaaaaacgtaagctggcttccctcctacggtcccgaaatgcgaggcggtacggcaagctgcagcgtcattttaagcgacgaaccggtcggctcccccataatttcaaacgccgacgtgcttgtggccatgaatttgccctctctcgaccgatttgaagagtcggtaaagccgggcggcatgatttttgtggacagctcccttgtggaacgcaaggtaaagagagacgacgtcaccgccttttacgttcccgccaccaaaaccgcgggagacaagggcttttccaccctcgccaacatgataatggtgggaaagctgcttaaggagctgggcgaattcgacgagcaaagcgttgaagcggcggtttccaaggttatttcggccaagcacgccgacatgaaggaagttaatatgaacgccattaaaaccggcgccgaattttaaattttgcaaaggagaaaaattatggacattaaaatcgtaaaaaccgagcatcccaaagaaaagcccgatcccaaaaccctcggattcggcaaaatctttaccgaccatatgttcgttatggactattcccgcgaagagggctggcatgacgcaagaatcgtgcccttcggctacctctcgatacaccctgcctccaccgtgcttcactacggttcggaaattttcgagggactcaaggcctatcgccgcgccgacggaaaggttcagcttttccgccccatcgaaaacgtcagaagaatgaacaattcggccgagcgcctttgccttcctcaaattcccgaggaggacgcccttaaggctctcactacctttgtaaatcttgagcaggactggactccaggcgaattcggcacctctctgtatcttcgtccctttatgttcggaaacgacgaatccctcggggttcacgccgttcacaacgccaccttcatgattatcgcctcccccgtcggaagctattatgccgagggtatcaaccccgttaaaatcatgattgaggacgaggacgtccgtgccgttcgcggcggaaccggctatgcaaagtgcggcggaaactatgccgccagcaaccgtgcgggtgagcgcgccgaacagaagggctattcccaggtactgtggctcgacggcgttgagcgcaaatacatcgaagaggttggcgccatgaacgttatgttcaagataaacggcgaggtcgtcacccccaagctcaccggctccattctccccggcatcacgagaaaatcctgcatcgaggttcttgccaaggaaggcattaaggtaagcgagcgccttctcagcgttgacgagcttgaaaaggccatggaggacggcacccttgaggaagcatggggctgcggtacggcggccgtcgtttcccccatcggcgagctttgctataagggcaaaaaatgcaccgtcaacggcggaaaaatcggacctctcacccagcacctctatgacactctcaccggtattcagtggggcaaaaccgaggacaccttcggctggaccgtggaagtctgattaccttttaaacaatcaaaaaaggagtatcgggaagatactcctttttcttttatgtgtttatctgattttgtcctgctttttgccgaagttaagcttccacagcaaaagcgacagtaaaaacgctccgccgattattccgacaaaccatacggccgaaattgcggcgggattttgctttatcataagaatgggatagggacccttcatttttcccgtaagattgagggttattgcggctgcggcatacaaaagaacgggagcagttcccaaaagcacgctccttttgccgattttgggcgagcgttcgaaaaacaaaaatgaaacaaggcacaaaatcgggcaaatcacatgatgaaaaatcatgggatatgatataagcatggggcgaattgcacttgctccgccctgcatgggaacgagcacacaag

SEQ ID NO: 3440 - DNA, 32759 bp, Unknown
  16S sequences of unknown bacteria
ctctgccgcgtccagatagtcctccacttctgatgccgtcagcacattggcgctgaccttttttggctttgggtagtgaaacactcgggcaggattttccgctattaagccatcccgcatcgcttgatccaggcattgctggagtagccgatggatgtgccgcatcgtgtgttcgcccagccctgggtattcaggactttccgagcgatgaccaccgaagcgttttcgctcctccagaaactctccgacccgctccaccgtcaattcggagagctgtatatcccctagcccagggagaatgtgatttttgaagagatagccatgagccgcatcggtagtcggacggttctggtttttgtcacagacctcctgccagcggaggatatactctctcagtgtcatagtcccaccttcctgcactggcgctgcaaatcccggaaagccacccacggcagtcccgcctgtttcagaatctgcttgtgcaggtagtagaactcgtggagccgatacggcgctccggtcttaggattgagaaacacataacggcctgtttccggaatttgctccagaagatgctctgctttgctgcccagggtcagcaggcgctgtcccttgaggatataccggtgccggacataaaaatcggcccacaacaaggtgagaagttcacattgccgcagaccgctggtcagtcctgtgtagatgagagggagtgtgccaaattgttccgcagcgttcagataccgctggagctgtccaaggcgcagggaaacagttttatgtgcttctgccagcggctccgggcagatccggaccggattgcagggaataagctgatcccgggccgcctcatccatacaccgccgtaagagcagatggacacaccagacacttctggcgctgagtccccggctttgcaggctatcataaaagccggtcacggtgtcctgggtcagctccgtcagcgggattttcccgattccaggagagatatgacggtcaatcagattgcggtatccgcccactgttctggcgctccatctgctctgattctcacaaaaccaccggtcacaccactgacccacagtaagattgttttggctgtacatgggaattgcctccttttgcaaacgcaacaataccacagaaagagagaaatagctactattttctgaatggaattttcggagcagacagagaagatcgacaaccctcccgccggatccttcggaactgattaaccttgttcttctgtatgccctcctaaacccgaataacaaattaaaagacccgggaaattttctgtttcccgggtcttttctttgattctgtttttctgggctaaaagcacttcagaacttatttcccatactggatcatcagttcggattcgtccaccgttgtatatccatctttgacttcaagggtaaattcaatttcctgaatctcctccggcgaggtgatctgattcttttcaagggagtctccccacagccagacggaaagaactgctgattccccatcttccagctcctgactaaagcccatataatccgtcatatagccattcactgagagagacccgtattggtccccgatggtcagagtcttgccgctctgattctccgccagcagatacatatacatctcatcactgtaatccgcgctgtcctccttcactgccttggcaatgatccgaaggccgtccttgttgtaggcctctattcctgccgcgtcatacccggcatttgttccgggaacaacgatctcaatggaagttttcggcgcaatctccctgccttctccgtttttctggccaagggtcaccgataccgatcccacatcaccgatgccatagacgtcccaggtttccggatccagaaccgatgagagctgcacatctacaatacagcactttcccggattgactgcatcattggaccaggtggagggttctactgtcagaccgttgatggcaatgtctgaagtggagacatagaccatgctgtcagttgtgttctgcagttccagcagcagggcagtggaaccgtcgctgtttttcatcacgccgctggacagcagttttactccattccggtcatacaggggatcctgactgaagcggagcatctcatatccataggtactcatagctgcaccgctggtgatggtctcctgatagtgatcggtactgtaatcatgggtttcgtgggccgaagtcttcagctggatcggaccagaataggtgtggttgtaatcatcatcactcatgtcaaagccaatctccagatcagcgatttcgtcaatgccatagagcatcagactgtcatagctgaatttgatggtgccattggcctttttcccattggccacatcacagttcaggtagccgtcatccaccatgaatccattgaccgaattgcagctgtaacccattgacccgctgataaagctgagatcttttccgctgttgttttcaatggtgagatccagctcggcggcgtaactggaatagatcagcccggtggcggtaatttttactcctccttcatccagcattaccgtctcctccagcgtggcatctgtccggaattcccccagggactgctgggatgccgccgcggaaccagaagatgttcccccggatgcagactgggacagatccgatgtcccggagtcggaagggctgcaggctgacagcgacacagccagtgctgccgcaagcagcagtgataaccattttgttttcatagaattgtcctccttttattctgaacgattggaatgcagtcactcaaagccatgactcttacaaagcggctataaattccttcacctgcctgataagctcctgcagacggatatattcagattccagttcttcctcctttcgctgaagagctgctttccggaccggcaccggagcttccagaagaacccggatctccttgagctgaaatcccagcagctgataaaaccgtatgagccggatgcgttcccgttccgtttccccatacagcaaatgcccgtatttgttcttcccggacggagcgaccaatccggccttttcatagccctggatggtccgccgggaaattttcagttcagcgcatacctgacgcagtttctgttgcatcttcatttcctcctcaccgtaaaactgcacgccgcgtgcagtcaaggcctttgtgcgaaatctgcattccgtaacagaacctgcaaattttgcgaaggggaaaatcagatccatcaccgcctcaaaagcacaaaaaaagaaggaccagacaatccgtctgatccttctgtgtcattgatttgattgtttggcatgtgtcactggccttccgccggtgccgacgattcttccactgttccgggatctgtctgctccgatccaacggggacattattttcgtccagataaatccattcaatcgaataggatttccctgtcgctttcccgatattggtgatatagtcctccagcagctgctgggcttgctgctgagcactggccagcaatgcggtgtcctgagaggcagttgcctcaagatctgcctgagccaccgaaaaagctgctatttcatcttctgcttcaatcgccgctgaatcctttgccacaatataggaatcctcagtaagggaactggaatccacggtacagctgagaacttccgccgcgggaatcgaaatggtgacctttgtaccatcgacctccacagtcacccgggacacatcgactccaagggtgaccacaccgctgtattcaatccagaaattcttgtcctttgtccaccagaggaatccctctgcgtctttcagctcgtatttcgcaacattgtgataatagaagtccatgacagccagttcgcaaatggccttcatctgagaggtcttgggctccatatcgaccggggccggctcggtatcgctgcatgcggcaagagagagcgtcagcactgcgctaatgagaatacacatcaactttttcataccttatcccctcccctattcaaccgtcagtgtgaactcggcatctgcctgctccacaatcggctggatcagtgctctcagcacgttgcaggcattctgtttggcaagttcatagatggcctgctgtttctcgctctcctgtttggcgtcctcttcacaggccttgtatgcctgctgggaaacggttgaggtattggccttatcgttgttgaatatgaattccatcgaggaaatatccacattgatcttgttgatcctgatttccggaacactcacatggattgcttttttctcatcgtcaacatcgaccactacgtccttaaagtcgatacccgcatagacctttgcatcatatgcaacatagtaatctatctcctcaggcttgtccggattgggaaccttcgcaacgccattatagaccgccgtgtaggtggaaagctcactgacattgataatttcccgcaaagttgattccgtaatcactgtcggcttgggttcctcttttggcatcatccgcgccgaaaccaccgcaattccagcaattacaaccacagcaaccgccagaacccagacgggaggcttgaacttctgcttgggtgtctgaagaccggtcgtttccatatcctcatctcctgtatgtttttgttcgacaaaattcgactgtctatgaacacattaccactttataacacttttaacaagtattggaatcaaaaagatcgttttatttccacaaaaaaggatccaggagcagcctagctcctggatcctgattctatatattccacagttaatattctgaatcgctgaaattcagtccttgctgcctttattgccgccaaactcgcagccgtactgatggccctttccatagtaccaccgtccatagcggtatccatagtggggcggacagttggcgcagtcaccgtcgcagtgcctgctgtgcttcttttcgctgtgacttgccggagacactcctgtcaccaacgccatcagattagtaagcaggcccggtttcttgggaggagcgctgtatacctcctgctccagccaggattcgtcctccctatccagggctctgatcccagcctgtctggagatcttttggaagagagcattgcgagcggcgaagaaggaggcacctctaacccgccccttacgtagaaattgcggatattgaagggtcttatggccttgcaaaaacgatcctgttataaaatgagaattgttatttccagattggcttcaatggttctgaaggctctcgctgccttcaatcctattaggcaccaaagttctttcccaaataaaaagggccagcataagctggtcctttttatcgttgtttcggatttcattgatgctccgattcctgtgctcacatcttgctcagcaggtctttttcctgatgatgcagctcttcaatcactcttttagtgcagatgaagaaatcttcttgcatatgctctgattccttcacttcataccacttggtacggaaaagccgcttatagcgaaacttttctttcttcttatcattgggtttcagaataccgatcatccgctgcatatttcccatggatttctccggaacattccagcctccaatctcaaagatgccgcacactttattttcgcgaaaacggatccagtactgatatataaaatctgtcccccaggagctgtcttttattttcaaacggggaaggtattgatccatagttattgtgtgatataagaacgaacttccattgctgctgtcctttgaatacaaaatcctgccttcctcagcagccttttccaatgcggactgaattgcatccagatactgcgttcgatcatccggacgatattcataaatcagatccagcgcttttttatgcttggcatatattttagtgcatatttgaatcagttcctggtcttccacaatatctctcctaattacttcaagatagttttcaatcatcagttttacatcaggctgcagctctagtttgtctttcaaagacacaagaatatctgcaatagtagaataggacaacacatcccagtttttagtatcactgggatcatcgccgtccggtgtaaggaaaatcagcatcttttgataatcaggataggctgtttccagattttccctgtatctttggagctgattactatgttcctgcgctccaattttattttcaaacgcaatgagaaaccgatcctgatccgatataagaagaatatcaatatatttccattctctgtacacagtgaaattataaaaatccaaaagcaaagtctgaaacacatcatatctgcctttggtatcattcactaccatttcctgtactacagccttaagaaacgcatctcccataccatgattttcatttggattcatcagccaactcagcacattactatggcggatctcagtccgtgatatttttaatacatcaaacagattgaaatgtcctgtccatggctgtaattcattcaagcaatcaatgtccagcaggaaatttttcagtgcttcttcatcggtaagatttgtatctatgccttccatacgatcctcctcttaaaaaacttttctacaagtttggctgctcagcattgatctgttattctatcaccatccgaattattaaatctgttccacccggaaggtgagcatctgatccaggccgcaggtggacagatcgcagtctgccccgccccgaagtgtcgccttcagatgataaaactccatgcatcgctgcatatggcagatcagccgacgggagcgccggcagtatccgtatccggccagcagggtccgcagcttgatgcgcacatactccttccccatcccatacaggcaccggagccggacacttttgaagaacagattgaggtcaaagtaatcactgcggtactcctccagatccaccgtatggcccccggattccagatctttttggacgaccggaagctcccggtccagagtggttttttcagaaaaatagtgccgccagtagagaacttccagtgtaaacttccgccggtcctggcgatagggttcagccagaaattccttttcccggttccagatccggtccattacagcgctttcaatccgacagtccaggtccatcccgataagaatgaccgccagatcctgcgcggtatacaaaagttcattcatagccggtcacttttctccccgttgcactgccggcacagaatctgcagattctccgggacagtcttgcctccagcgttcatcgggacaatatggtccacctggaaggccacacggctgatacctgttctgccgcagcaggcgcactggtactcacccttttcatttttcgatttctcaaaggcctcgtcccgcagtttcttttccagctccggattgatctttccaatctcatagagcggcagatcctccagcttccgtctgccgaactccacattgctcccctgttcctcatagatatccggatacatgagcttcatgcgctcaatctgaagctgcttgagaaagtacagcttccgcccgaagaacagcttgagcatattgtcatctcccgagtcccacagcgcattgagataggctgtctcctcttgggcgttcatccgctcatcccagatcttccgggcaatggcagccacatccagcctgctccggtcaatctcctcaaaggtatagaaagccggagccgcctcgtactgcgcatagtatttcagaatgttccgcacatcctgcggctcatagggcggaatcatctccccacagaaaaaagtgtcccggcactggcgctccatctcccggagctgttcctcgctcagatattcctcttccgctccaaagctctcaaacagagccggaagagactccatcagctgtcggtaggcctcctgggtactgttgtagaccatcacctgatcggtgtgatccataccgttctcctccagataggagaaggcgtacatacccaccggaatccgctcctcaaacggaacccgttccagcagagtagtgtccaccgaatcgtccagaatggacgcaaactcctcgattttggaaatggagaccagacgcagaatatgctgtacacgctccgtccggctgtcctcaaagtcgttgtctcccacaaagaggctctcgggattgacccaggcgatatgttcgttccactcatcaataaaggacacaatataggcgctggcatcgccgccggctgccgggccgcgcaatgcccgtcccaccatctgggtcatcaggatggtggacacagtgggccgggccagaaagactgttctggttctgggcaggtcaacaccctcggtgagaatgttcacattgaccagaacctgcagatttcctttccggtactcctccagctttcgctcattgtcctcccggctgactgtcacaccggtgaccgggtcccggagttcggatacgacatagtccgccgcaatccctgccttccggaacagactggataactgaaccgcatggggaacactgaccgcaaacacaagggtctgaccgtacttctccggatttgccttataggtctcgacaatcagcttgtttcggggagcgctctgtaccatctgctccacaatattctcgggcagaaggtccaggcgctgaatgctctccagcgcatcggctcccagactgccgccgtactgttcatcggtatagtagctttcaaaaatcggcttagccagaatccgccggctgatcagctctttcaggctgatctgataggtgatgcccacatcgccgtgaaccacccggccatcccggattccgtcctggtagatccgtgccagaagtccctgctcgctctcagcggtgcggaaaggcgtggcggtcaggccgatcagtttcacatggggaactttcgcctttacatagtcaatgattcgccggtaggtcttggcggtggaatggtgggcctcatccatgacgagatagagttcctgttccccctgaagccaggcatccaggcgttccaggtggcgtccgacgctgtccttgctggcaatcagaagactgtcctgggggcggatgtcactggttcggtcgtggctggacgaaccggacacaatccggaagcagaaggaagaaatatgcggaatcacttccgcataggcataggtctggaacgactccgccgcctgatccagcagcatctgacggtgagcgatccagagaatcttctttttccggtcgatggcgtttttcagcagccacagggcagcggtataggtttttccgccgccggtgggcagcacgatcagcgtgctgtacgaggactcctggttgatcttgtccatacaccgcatagcctcggtctggtgcgcatacagcgtccggggattggttcccctcttgggaaacacactgccattggaccggacttctacaaaatctctgccattgttcatgcctatcacctctgagttccattatactgtcggaaaatggcaaacgcaaggcggcagaacccccgcccttttctttgtttatgcggcgcagtttctggaggccttatcctctgaaaccggcccgctgtcttccctcaaaccggacggaacttctttaaatatacagaatcccatcccatacaaatcccaaaaggcgagatttttccttgaaacacgcagggcaaaagagtgccaaagaggaagggccggagcagcggaaagggccaaagagggctgtaaatggctccctgaaggttcagacacacatttgggagcatgatgtcgggtgttcgagtcacctcactccgaccagaaaatcccgctgctgaaatccgcggcgggatttttctatggagtcctgtccgtgctgccaagagggggcttttgtcctctcccggggaaagacgcccgcatcttacttatccttcccccgaaactgctgtccgggctatgcgattggtctggtctgtgttatagtagagagtatcagaattccaccaaatctgccgcttcagcggcatattccggaacaacctggattatcaaaaggagtatcagtccataaaacaaaaataactaccctgtttatatcccttatgctggtggttaccctggcggggcgcaccgcagagaaagagcagccctcagcctacgcccaggcggaaaactgggcctatctggaagtggataaaaccgctgacgcggatgtattcttcatctgccccactgtttatggtggcgatgaggacagcttcaatatgcctatggacgacgaagacgcaaaaagcgactttctgggtgccgccaatatggaaaagggcatttacgactcggatgccagattctttgctccctattaccgtcaggccgggctgaatgtctatgagctgcctacggaagaccgggaggaatacctcgcccttgcctatgcagatataaaggatgccttcctctattacctggaacactacaacaatggccgccccattattctggcgggcttttcccaaggtggtgatatgagcatccgtctgctgaaggactgctttgccgaggaggtcaatgaactgctggtggcctgttatgccatcggatggagcgtcagcgaggaagatctggagcaatatccccatcttcgctttgcctccggtgaaaacgataccggcgtcatcatctcctttaacagcgaagcagagtctgtcaccgactccctgatgattcccgccggcactcacacgctggcaatcaatccactcaactggaagaccgacagcactcctgccggaaaagaagaaaacctgggtgcctgctttaccgattacagcggcaatatcatcactgaaattcctcagctcaccggcgcctatattgacccccagcgcggcgctctgaaggtaccagacgtaacaccggaggaatatccgccggtgctgtccattttctccgacgggatctatcatctgtacgattaccagttcttctaccgcaacctgcaggaaaatgtggaagtgcggctgaatgcctatctggaggatcaggcagcctgacggcagttccgccaatcaccaagccggatacttcccattgtcaatactttgcagagtatgaaacgctgtttccagatctcttacaaacagaaactctccccactatggcagcggggagagtttctgtttgtttcgcgtatgtctgaattttctgtttaagcaatcttacaggccagtccagccgatggaggacagcacatacagcacaaccagcgaaatggcccacagcggcgccaccacccggatggcaaacttgaaatacttatcgaacgacacacccgccatggtgcaggcacccaggataaatccgctgatgggggtcagggcgttggtgaactggtcaccgatctggaaggcctggacgcccacctgagctgtcagggagagcgcctcacacatgggctttacaatggggatcaggatggcagcctttgccgacatggaggggatcaggaagttgatcagggtgatcaccaccgagattcccactgctgccaggccggaacccagcttctgcaggggcaggcacgcataatagacgatggtatgcatgatattgccctgggtcatcaccaggctcatggcatttgccacaccaatgatgaagcagatgaacgccataccgccgcagccagctgcgaaggcattgccgatcttgtcaaaatcccatccagccagcagaccgcacagcaggcagctgaggatcataatggcaggctgaaccgagttgggcattcccagcaccgacatgcacaggacaatgagcagatactgtccgaagaaacagagggtgatgagaatatcagtggtgcgaagggttgtcgcggcaagttccttgctctcgccggtgtcagcggtcagccaatcggtattgccggtgagggatctggtggggtctttatggatcttcagggcatagcgggtcaccagaaggctggtcagcgctgtaatgagcagcatcatacagaaccgcaccgcaaatccgctgaacagcggtactcccatcatggtccagggaacaatgatggcagtggggctccaggaagcgcccatcaggactgccaggccggtgaggccgatggctaccagcgggtccaggcgcagtttccctgccagcatgacacccaccggcaccaatgccaccagatggtcgccaaagccgaaggctccgaccagtcccatgataaagaccaccgctggaaccagcacaacaatccccttatccttgagacggtagagcgcatagtccaccagccggtcgatggccttggttcccaggattacgccgatggcgccgccgttcaccagcagcacagcgatgacgtaggaggaattctgcagaccggagaggatatcccaaccctgtcaggagctgattcggacgaagttcagcaggcttttaacgaggccgttaacctggaccggctgctcggatgtctgctggtggactgtccccaggatctgttctggtttgacaaaactgacggattaagcctgtcagctaaattttcaggcaaccaaagcgaaatgcatcttgcatcaataactgtaaccatgaaggttgctgaggcctaccagaatggcagtgatactgaggttcaggtgaaggactcggccacagctatccagaatgcccagaacatcgctgctgagatcaagaacagcggcggcacaacagatgaaaagctggaagcgatccttcagaagatctgcgggcttgtttcttacaatgatgaggccgctgctgcttcggattacgacatgaatgcctggggcatcatctgggtcttcgacgatgatccggaaaccaaggtggtctgcgagggctacgccaaggcattccagtatctctgcgatcaggtatttgactccagtgaactgacctgttataccgtaaccggcaccatgggcggcggcactggcgaaggcccgctttctcctgcgagagcttgatctggagcaggctgaccccatacagatcgttctctcggtgaatggtgccgcaatcaccgatcacttctggattcaggattcgggctgccccgggacctatgaacagatccgctttcatcaggacctactggcaaagacagccctgctcggctcgtcagcaggcataaccctcccggcaggataccgctgtgccgagctgaccaacacaggcagatttgaaaaatgctggcacctggagaacggaaggtggtggctttataaacgcggatttccggagcacaccttttccgagctggcagtgcaggcaatcgggaattatctggggcttgccatggcatcatatgagctggcagaccgggcggagatcagcgctgtgctggactgccgtgccccggcttccctgtccgctgtaaaaacgcctgacttcacatcgggcaccctgaatttcgaaccggccgcggggcttgggtgcagaaaaggggacgctgtaaagaatgaacagctcctccggcgcctgtcccctgccatagcggacagctaccgcagaatggtcctgctggatgccctggttttcaacaccgaccgccacccctacaactttggcgttctccgtgaccaagccaccggagagccccttgcgctggctcccatctttgatcacaatctgtccctcttcgcagccctggcagactatgaccggttcgccgccggggaaacggactccctgtacctggactggtgccgcctcgcggacagccagccggagtccatcgcctccatggagctgccggtcatcaaccgacaggagatcgaatccctcctgaaccccctccatgttccgggattcccggaggaggaaaaacagagggtcatcgggattctggcagcccgatgggaaaaactccgggaacagatctctcagtaccgcacaagcccggagcacaaataaaagcagaggagaaacctgtctcctctgctttttctgttataccgcctaatccagactgccgtcgcccttattgccgccgaactcgcagccatactggtgacccttcccataataccagcgtccgtgccggtagccatagtgcggcggacagttggcgcagtcaccattgcagcgcctttcctggctccgggtgcggtcagccaggccggcgcctgtcagcgccgctgccagcagggtgaaaaatcccggcttatccctgggcggggacggcggctcccggtgccgtggggcgtctattcccactctccgggccagttccgcaaaagcctcctgatccatctcggcagggtgggtatccttctccgaatgatagctcagtatcccatcctccaacccgaaatccggctcctcgtcctcaaaaatatcgatccccgcccgctgggagatccgctcaaaggcgctgtcatcgatcagcagataaatctcccccagctgatcccggtcgaagggcactgcggtctgcctggcaatcttccccaaaagggacttgtccacggtatcggtcatctccagcacctgttccggtgtgaagcgcacccctccggcaaaggccttttccacaaactttgccgcaaaagccctgtcctcacattccagctcctgcgcgatttcccatacctcttccgccggcccgtactcggacaggcgtccggcataccgtttctgggtgctgggcgaccagtcatagaacccatcatagtactcttcccaggacagttgtttcatgccgcattccccccaatgtccgacgatctcataatcccattatatcgccggaactgggcaggcgcaaggcggcacagcgctctgccctttctttgcgcgggtccggagggcctgcaccgggcagctttcggcagagtgcacttccccatctgtacagttccgtgtgctatgcacaaattttctttccattgtctaaaatttcgccatcagctttggcggttctgcaccttgacagcccatacaaaaagcctataattaaaattagaataattctaaaaactggtgaggaaactgtgacaaaatacggaaagaaaattctggaaatcgtaagctcctcccgcagccacatgactgcggaggaaatctttgatgccttacggcaaacctatccgactgtggtgctggccaccgtatacaacaacctcaaccgcctgtggcaggacgatctgatccgcaaggtttcggtggagggcatgcccgaccggtatgaccgcattcagcgccatgaccatctggtatgcagacgatgcggcaaactctcggacattgatctgggggatctcactgcggaactggaaaaaaaggccggaatttcgatcctgtcgtatgacctgaaactcaactacctgtgtgaagaatgcaggaaggaaatccaagagaaaggaatgtgaggaaactgaaccatctgccactatctgtccgtgttcccattgaagaggacaatcccggtattgtacgctgggaagaaaaatgtatccgctgcggtatgtgcagaactgcctgcaccaacctgatcggggtacatggaacctatactctggaagaaaccggaggaaaagccatctgtatttactgcggtcagtgtgccaatgtctgtccggtggacagcatcaccgaacgggacgaaagcgctcaggtgaaaaaggccattgctgatccggaaaagattgtagttgtcagcacttccccggcagtccgtgctgctctgggggaggaattcggtatggagccgggtgcctttgtggaaggaaaaatggtagccttgctgcgggcactgggagctgactatgtgctggataccaactttgccgccgacctcaccattgtggaggaggccagcgaactgatccgccgcatcacagaaaaggaccgtcctctgccccagttcaccagctgctgtccgggctgggtccactttgcggagatctatgcaccggaaatgctgccccatctgtccagtgccaagagccccatcggcatgcagggagccacggtaaaaacctactttgcccagaagatgggcctggaccccaagcagattgtccatgtgaccctgaccccctgcaccgccaagaagtttgaagtccggcgggaagagatgcatgctgccgctgactatcacggtgtggaaggcatgcgggataccgatcaggtgatcaccacccgggaactggcccgctgggccaagtccgaaggcattgactggaacgccctggaggactccgcctatgattccctcatgggcaaggcctcgggagccggcgtcatcttcggcaacaccggcggcgtaatggaagcggctctgcgcaccgcctatgaatacctcaccggtcaggctgcgccccgggaactgctccatctcagcccgctccggggctacgaaggagtgcgggaagcccaggtccagatcggggacctgaccctgcaggttgcggtggtctatggcactgccaatgcccgttccttcctccggcagatgaaggaaagcggcaaacagtaccactttgtggaagtgatggcctgtcccggcggctgcatcggcggcggcggacagcccaaggatctgcggaagaatgccgatgagatccgcaagagccgcattgctgccctctaccggcgtgacgaggcaatgaccctgcgcaccagccatgaaaacccggagatcatcgaggtctacaagaccttctatggcaagcccctcagtgaactggcggaacagatgctgcacactgcctatcaggaccggagtggtcttatcaataagaagggacgtgattctgtgaaaaagtggaaatgccaaatctgcggatatatctatgatgaggaaaaggaaggcattccctttgatgagctgcctgaggactgggtatgtcctctgtgcggcgccagcaagagtgtcttcgctccggaagagcccaccatcgaggcaaaaccccagcctgcccccattcaccatgacagcgagatgcgtctgctctctgtcggtgaactggccgctgtctgctccaacctggcacggggctgtgaaaaacagtatcaggagcgggaagctaccctgttccgggagattgccgatttcctcactgcagcccagtctccggtagccgatcccaccatggacaagctgctggaactgatccggcaggatctcagccagggatatccgtccctgagtgccgccgcttcggctgatggagatcggggtacccagcggatctgtgtctggggcgaaaaggtcacccggatgctggactccctgctgagccgctatcaggaggacggggaagcctttctcaaggatactcaggtatgggtctgcaccgtctgcggattcatctatgtgggtgacagcgctccccagctctgcccggtatgcaaggttccggcatggaaatttgaaaaaatggaagggagacgctgagccatgaaacgaattgccgtacgaaatctgcggttgtgtacaaaggattgtctgtgcctgtatgtatgtcccaccggcgccgcggataccgaaaacagtatcattgacgtgagcaagtgtctgggctgcggtatgtgcgccgatgcctgtcccagcggcgccatctcgatggttcccatcgaatatccgccccagcagaaaaaagatcctggcgttgtagccctggccaacgatatggccggacgcaaagccgctcaggagaatattgcccggcagctggcagactctgcccaggaggatgggctgtatcgtctgatgaaggccatggagaaatcggtgcggctggtcaatgaagacctgctccgggaagccggatatatgcttccccagagcgccaatgcccacaaactgctccaggactttgtggatgcgccgccctcccccgattttcctgtccaggcagcaaaggagctgctggagcgcattccctgcaatgaaccggtaccggaagaagaaaaaaagatcatgaaaaaatggaaatgtcagatctgcggttatatccacgaaggcgaaactctgccggaggactttacctgtcccatctgcatgcagcccgcctctgcctttgagctgatcgaggaaaccccggcgccgtccaagggcggcaataaatatgccggcacccagaccgaaaagaatctggaagcggcctttgccggagaatcccaggcccggaacaagtacacctatttctcctccatcgcccagaaggagggatatgagcagatcgctgccctgttcctgcagacggcggagaacgaaagagcccatgccaagatgtggtttgaggagctgcacggcgttgaagatactgccgccaacctgctccatgccgctgaaggggaaaactacgagtggaccgatatgtacgacggctttgccagaaccgccgaagcagagggcttcccggaactggctgccaagttccgtctggtagctgccatcgaaaagcgccatgaggaacgctaccgtgccctgctgcgcaatgtggagaccgcccaggtctttgaaaagagcgaagtaaaggtatgggagtgccgcaactgcggtcatatcgttgtaggcaccgccgctccggaggtctgccccacctgcctgtactccaggagcttcttcgaaatccacagcgacaactattgatcccatcaaaaaagcacccggataccgggtgctttttcttgtgtgccggggtgtccggcttctatttcttccgggggttccggcggatctccacttccagctgttcaccgggcttcccgatatactgccgggactcccggagccgctcctccattccggcaatctcctcccggagctgacggcggctctttttccggttcatctgcaggaacatctggtaccggtcctgcagtgtttcagccctgggcgggaaccggatcacctcatcgccgatccggcagccctccagctcattgcggcagatctcatcatccagcaccgccatatagagcgcataacgggtaaattccttaagcggcatccggatcagccaccagcggcgggcagtcacccccgctcccactgccagtccgcccagaagcgctgccttgtgtcctcgtttcatactgttttccctcccgtttccagtttggcttcaaagccgcctgtctgtttttggggcgcggctttttctgtactcattctgccagacaggattcaaccaccgatgaacattttttgaaaattccgcatatccatcggggcgctggtatggtacaatcaaaccagaaccgaatgggagggaaaaaccatgcgcatcctcatgctgggaaacagctttaccaccgccaatgacctgcccggtcagctggcggcccttaccggggcggaggtggtctgccatacccggggcggggcacggctttcggaacatctgaaccccggtacccgtttaggcgcccgtacccaggccgccctcgccggggaacactgggactatgtcgtgctccaggagatgagccacggcccctgcacctccccggggagcttctttgccagcgtggagcggctctgcgcccagatccgtaccgccggagcagtgccggttctctatgccacctgggcctatcaggagggcggcgccaaactggctgccaagggctgggactatgagacgatggcccggaccctttcggaggcctaccggcaggcggcccgggagaatcacgccctgcttgccgaggtgggagagcagttccatgagcgctcccgcactgagaatctctacgctgccgacagcgtccaccccaatgccctgggaagccggatcgcggctgaaaccctggcatctgtgatacaaaaacacaaggagaactgaaccatgatccgtgaaatctgcaaagacgaacactttctggcacagaaagcagaacctgccgcaccggaggatcttccggcggcagcggacctgctggaaaccctgattttccacaaggagggctgtgtgggcatggctgccaacatgatcggcgtcaacaagcgcatcattgccgtggagaacgaaggctcctatctggtgatgctgaacccggaaattctgcggcgctcctccccctatgacactgaggagggctgtctttccctgtccggcacccgtcccgtccggcgatggaattccatcaaggtgcgctggcagaatgaacagttccagacccgcatcaagaccttcaccggctggactgcccagattatccagcatgaaatcgaccactgcgaggggatactgatatgaagaaatgccggatcaccgtcatgcggatcacccggtatgacgacctgatcaaacagtatgaaaaccccatggaacacccctgtgacatggagctgggacaggtgttccttgccaacggctgggaaaagcctgccgggttctgtcagagcgcctgggatacactctccccctttgtactggccctgagccacggcggagagggcttctatgacggctggatgaaaaatccccggtctgccatgctctcctgcaacgatggcttccgcccggtgagcttcctggtggaagccctggacgaggacgcagactgacctctcccttttccccgccagaccgcataaaaaagccggagcatctggttctgccagaagctccggtttttttcgtatattcaggagagctgttccagttcccgctcaatcagcgaaaccgcaaggccaaaggcctggatgcgccggttcgccagggtgatctgggatttataccggctgggattctctttccccttcagcgtcctgaccgtttcccgcagcttgtgcagggtggagtcgatctgccgtttggcctcctggagttcttctttagtgcaggtcattttgtgcctccttgtgccgctcattcgccccggtgctgccgcaccccgaaccataccgcgccgcagactgctccgaacgccgctgccaggcaggggtagtagatgccgaccgggagctgtcccactgccggatggctcagcacacagagcactccggcgacacccgccgccagaacgctcagcagcaagccatgcagagtatggttctcccggagttccggggagccggaccacccctcccggagctccagcagatggagcagggtctcctgatcctccaggccccggatcacgaagcaggtgcggcgggtcaccgtctgatcgaagcggcgcagctgacaggtgaccgcataaccggtgcggttctcccggatctgctccacccgcaggatctcctcagcggcggcgggaagaaccggggaacgggccatctcccgcaggcgctgctgcacccggacggttcccttggcccagtcaagcactgaatgtcccatacccgccagctgtcgggcatccgccacaaagagccggtcgtcctgggtcaggaaatagagggtggcatcccgcacggtattctgtcccagacgcagggccagcactaccagcagcactgtgacccccagccagagccccaccgaaaccagccgcatgggccagcccagcataaaccccaggaccgtgcctcccagcaccagcgccaaagccagtatcactatacccagaattccacccagggtgcgcaggctgtaccggctctgctttcgggtatcctgggacatccagacctgtttgagttccattctcatctctcctttcggtatcggtgatccgctgtctgtttccggcgctagggaaaccagatcacaggcgcttttccagttccagcgtcacacagaagacagctgtcaggtagacagccagcgtgattgcctcaaacacaatggagagatggggccggggatagcagacagccagtttctccatgaacagccgcaccgggaaatagaaccccagccaggctgtaacctgataaaagcgcagccggaaccgccgtaccgacggtgcgggccggggatttttctgccaggcatattcaaagccgccgatgactgccaccatgggcaggaagctgagaatgccgaaaaagacgctctgcagtacgaacaccgccaggaactggatgatcagcaccatgacctccagcatcaccagaatggcaaagagctgccggaagtgggtctcctggttctcccgcaccggcggaagatcctggtcgttctcatagtcatcatggagcagatagtcggtggtgaccccgaaggtccggctgagctgcaccagattgttcgcgtccggcagggcactgccctgttcccaacgggataccgcctgccgggatacacccagccggtctgccagctcctcctgggaaagtccatgggctttgcgctgggctgtgatctttgcagatagtttcataggtattcctccttggtactccgctgagattatcttaccggattgagcggaaaaatgccaccacctttctgcggcatttccgcaacaagaggttacatgggcgcaatcatgctgtgcatccggggtttccggctgtttcccgggaaatccgccgcctgtttccggaactgtgcagcccggtcaggcagctctgccgcccctccttatatataaggaagcgccatgtaccctggaaggattctgtcctctgacaaactgcccatccgcacacacggaacgctcccccgaccctcccactggtcaggggagcgttatttttgcaggaaatgcaccattttgcaatacagcagctcctgcgggattgcccactgtcttcacactgcggtcagatccggcttcatacacctccacaaaaagaattctatattttcatattgtttctgtttttctttggatgcataaaaaacgcaagttattattcattttcccgtcacaaacgactgaatttgcccaattcaccccatattttttgcatggaagctcatagctttcattcatactctttgtgatttacaccagctttccatgaagaaatcttacttttttgtaaattactatgaaatatctggattgaaaatatattttgttgcatttttattgcttttcaataaaaatgcaagtataattttgttcaagtcttcgctgacttccaggaacaaccgcctgtatttcagaggaggacagattttcagtccttgtgcgagaggagaatttgatttgaaacgctatattgccaaaagacttgcaatggtagttctgctgctgttcggtatgagctttattgtctttgcgagcctgtacatcactccacgggacccggcccagatggttgccggcgccgctgccaccgaagcagaaatcgccaatgtccgggccagcctgggtctggataagccattcctggttcagtatggcatctatctgaaaaatctcctcaccctggatctgggaacttcctatgccacccgccagcccatcatcgatgagattgccgtgcgtctgcccattaccatcaacctggctactgccgctatcctcatcgctgtactggtgggcattccgctgggcatcctcaccgcactcaagcgggatacctggctggataacctgctcaccaccacatcgctgtttgccatctccattcccaacttctggctgggtaccatgctcatgcttatctttgccgtcaagctcaagtggctgcccaccggcggcatgaccgatttcttctggactcccaccggcttccggcaggccattctgccggctctggccctgtccacctccaccattgccagcttcatgcgcatcgggcggtccgccatgctggatgtgctccagtctgactatatccgcactgccaaggccaagggcattccccagaagaaggtggtattcgtccatgccctgcgcaatgccatgatcccgctgctcacccagttcggcaccagcttcggcggtctgctgggcggcgccatcatcaccgagcaggtgtttgtcatcaacggcctgggcacctacctcatcaacgccatcaatacggtcaactacccggtagtacagagcaccgtcctggtgattgccaccatgttcgttctcatcaatctggcggtggatctgatctactgcctggtagacccccgagtcaagtatgaataaggagcaagccatgacaaaacgaccctctttcctggcgaaagccaccgaaaaacttctgaaaaacaaactggctgctctctgctttgtcctgctggtgctggaagtgctgctgcttctcatcacgccctggatcgcaccccatgaccccgaagccaccaatgcggccatcaagtttgcccccggcttctgggccaagttcagcagtgacccggcagtccgggcctcctatgtacccggctatctgctgggcaccgacaacctgggacgggataccctgtcccgtctgctctggggcggtcgtgtttccctcaccgtgggcgtggtgtccactgccatgggcctgttcctgggcgtgatcctgggcatgctggctggctactatcccaagctggataaccccatcatgcgctttatggatctgctcttcaccttcccgggtgttctgctggcaatgctcatcatcggcatgctcggccccagcaccttcaatgccaccctggcaatcagcatctggtcagtccccagcttcgcccgtatggtccggggcaaggtgctgcagatcaagcaggaggactatatcctggcgatccggtcactgggcgccaccgatttccgcatcatcttcttccatgtgctcaagaatgccctgccgctgatcatcgtcattgccaccatgcgcatggcttcgtccattatctccatctccaccctgagctatctgggtatgggcgttccggctcccgcgccggaatggggcagcatgatcgccaccggcaagggcttcatgtgggaagcccccgagctcatcatcattcccggcgttgccgtgatgatcacggtcatctgcttcaacattctgggcgacaagctccgggatatcctggaccccagcctgcgtgactgacgcatcatttgttttccctgagcgatccgttccccacggaccgctctccatacaaccacaataaaaagaccacaaaaaaggagcgatacccaatgaaaaaacctttccgaagatggctggctgccctgatggctgcctcgatgaccctggctctgaccgcctgctccggaggtgacaactcctccactgccggcgtttctggagacaagatgttcaatgttgtcatgacctccaactactccggttttgacccgctgcgcaccaacgatagtgtttcttccagcgtcaacaaccagatctatgagaccctctaccgtctggaggacgacggcagtttcactccccagctggcagagagcctgcctgagtactccgaggacggcaagactgtaacagtcaagctgcgttccggtgttaccttccacgatggcactcccttcaatgcggatgctgtcatcaacaccttcaactgcatcaaggaccccgatttcggctccacccgtgcctctctggcaagctccatcgagagcatggaagcccccgatgagaacaccgttgtattccacctgagctatcccgacggcgtattcctggcaaagctctcccatgtgaactcggctatcgtttcccccactgcccagcagaaccaggatctgatggtacagccctgcggtaccggcccctacaagtttgtaagcgctgtatccggttccaatgtggtactcacccgcaacgatgagtactggggccagaaggctcagatcaaggatgtgacctacaccgtcatcaccgaggaatccactgccctctcccgtctggagaccggcgaggctgacctgatgccctccatcaccgtggaaaacctgtcccgtgtggaggctatgcccaatgtgaccctggcaaccggtgacaccgcccagatctactacatggtgctgcgtcccaactcctcggtgaaccccctgatggcaaaccaggacttccgtaccgccattgccaaggctctggacaccgaaggctatgtaaactacatcatggaaggccatgctgagcatgccaagagcatcatcggccccaagatcttcggctacaccgaggaagctgagagctcctacatcggctatgacccggaaggcgccaagaagctgatcgaggaaaacggctgggcagatgaacccatcaccttcctggtccccagcaatcccacctatacccccatgggcgaatacttcgagtccaacctcaaggctgccggcttcaacaatgtaaagctggagaccatggactgggctgcctggctggcggagagcaaggctgagaaccgctttgacatcaccctgtcggcctggagcaatgtgacccgggacggcaccgagctgctggaacccaactgggagagcaccgcttcctcccgtaccaagatcaacgatgccgaatttgacgcgctggtactggagagcaagaccactgtaaacgatgatgagcgtatcgcggctctggaagctgccaacaagctgctcatggagaaggcctatgctgtgccgatcctgaacagcgaacagcgctatgcctacaacagcgcctatggcaatgtaactctgaacagccagggcatcttctacctgaacgaattcacctgcaactgatccgggaactgacaaccccgtttgtcagcagtcccagctgcctgtaatccatctgcggcgctgccgcaccctgccgtaagccgtccggggcggtctgtttccagtttcggtgaacagccagcccgggcggttttttcggcttgatccctttggctgtaccatcagccgtctgttatccaaccacttactgaccatcgaacttcgggaggactatctaccatgtcagacaccgttctggaagtcaaaaatcttgtaaccaccttccggatcaacaagaaggaatatccggtaatccgggatatttcctttgagatccatgaaaacgaaacgctttgcatggtgggcgaaagcggctgcggcaaaagcgttaccaccctttcggtcatgggactgctgccggaaaacggcgctgtccgcagcggcagcatcaagctctgcggtgaggaactgctgggcatgtccccccgtcagctcggacaggtgcggggcaagaaaatgggcatgatcttccaggagcccatgaccagtctcaatcccctgctcaccatcggctatcagctcacggagggcctgcgccagcaccatggaatgtccaaggccgaagcccatgccaccgctgtttcctatctggaaaaggtgggcattgccaatgccgaggaacgcatgaagcagttccccttccagctctccggcggcctgcgccagcgcatcatgatcgccatgatgatgtccctccagccccggctgctcattgccgatgagcctaccaccgccctggatgtgaccatccagaagcaggtgctgctgctcctgaaccggctcaagcaggatatgaaaaccggtatcctgttcatcacccatgacctgggcgttgtagcccagatcgccgaccgggtgatcgtgctctactccggctccaaggtggaggagggcgccacccggcagatcttcgaaaatccgctgcacccctataccaacggcctgatcgcagcggtccccaatgtggactcggatgaattcgagatccggcccattcccggcaccttccccagcatcaccgaggagatcggcggctgccgcttccatccccgctgcccctatgccaccgaacgctgccggcaggaggtgccccaggcgctggaatatgagcccggccattttgtggcctgtcacaaggtagaggaggaaaacaagtgagcgatcagaaacaagtgctcctggagctgaacaaactcaaaaaatacttcccggtgcgcaaaggcgtgaacctcaaggcagtggaggacatctccctgaagatctatgagggggagaaattcggcgtggtaggcgaaagcggctgcggcaaatccaccctgggccgtgtgatcctccagctctatccccagaccagcggcgcctgtgtgtactacggcaaatccctggaggaggtttcccctgcctatgtggccaaggagatcgcccacctcacccagtaccagcagaaggccagggaattctaccagaagtccctggagatcgaccggaagatcgccgagctcaatacccggctggacgccctgtccgcccaggggactgaccgggaagtcaaggcgcactggaagctctccaaggagatcgccgagctggaataccgctcccatgagctgcgcaaggatgcctcccggcagctccgggagggctcccgtaccgccggttcgctgatcctgtgcgagaacatcgccgagatccagcagctcttccagaaggcgctggaatgttcgctgaaggcccgggaggcccaggaacagtacgaccgctcggacgcccgctacggcgaggctctggtggaaggtcaggccgatgcccaggctgaaaaggaactggaggaatacggcacccaggcggcccggtaccgtgccgaagcccggaaatggcgggaacaggccttctccttccgggggaagaatatccagatgatcaccgagcggtgcggcgatcccgaatactgggacaaactggaccgcaactatgaaaccggcatcaacctgggcaagctctccccgtccgagctgcgggcgctgcgccgggagatgcagatgatcttccaggacccggctgccagccttgacccccggcagtccatcggcaaggccattgaggaggtctttgacatccacaccgactacggcccccagctcaaaaaggaaaagaccctggaactgctggaccgggtgggcctcaaggccgaacagtatgactcctatccccatcagctctcgggcggccagaagcagcgtgtgggcattgcccgtgccatcgccctgaaccccaagttcgtggtgctggacgagtcggtctctgccctggacgtatcggtgcaggcacagatcctccagctcctggacgaactccgggaccagcagggtctgacctacttcttcatcacccacaacctgggcgtggtcaagcacttctgcgaccgtgtcatggtcatgtacctgggcaacctctgtgaactctcccccagccatgccctctttgacaagcccctgcacccctatacccgctccctgttcgatgcggttccccgtccggcagtccgggatggcctggatgcctcgggcgtgctggaaggcgaagtgccctcggcagtaaatccccccaagggctgtcccttccacacccgctgtccccactgcaccgaccgctgcaaaaccgaaaagcccgccatccgggaagtagcccccggacatctggtggcctgccatctctatgactgatcccatctcacgaaaggagtccgctatgcagttcattcccaactacctgccctatccctcggtacgctatcccatctatgcccgcaatggcatggtctgtgcctccagcccccaggctgcggctgccggtctggaagccatgaagaagggcggcaacgccatggacgcagccgttgccactgccgctgccctgactgtctgcgagcccaccgccaacggcattggttccgatgcctttgccctcatctgggtggaaaaggagaagaagctctacggcctcaacgccagcggtttctccccccggaacatctccattgacgccctgaaggcccagggtcacgaaaccatgcccacctatggctgggcacccaccatggttcccggcgctccggctgcctgggctgctgtggccaaccgcttcggcgctctgcccatgaccgagagcatggctccggccatccgctatgcccgggaaggctatccggcttcccccaacctggcccggatgtggaagcgtgcctatgataagttcaccaccgtgctccagggtgaggagtatgccgcctggttcgataccttcactccggagggccgctgtcccgcagccggtgatatgatccgcctgcccgaccatgccgacaccctggaggagatcgcccgcacccaggctgagagcttctaccggggcgctctggctgagaagatcgttgccgacagccagaagcacggcggcttcttctgtgccgaggactttgcggagtatcagccccagtgggtggagcccatctcggtggattaccggggctataccgtctgcgaaatcccgccgaacggtcagggcatcgtggcactgatggcactgaatatcctcaaggagttctccttcccggagaaggagtccatcgacacctaccacaagcagtgggaggccatgaagatcgcctttgccgacggcaagtaccatgtcaccgatccccggtacatgaaggtgtctccggcggatctgctggctccggaatacggtgcgcaccgggctgcccagatcaccgataccgccgccgagccctgtcccgaactgccccccaagagcggtaccgtctacttctgcaccgctgacggcgagggcaacatggtatcctttatccagagcaactacatgggctttggctcgggtattgtggtggagggcaccggcatctccctgcagaaccgcggtcacgacttctccctgaatcccgaggacgccaacgctctggcgcccggcaagaagtcctaccacaccattatccccggcttcctgctcaaggacggcgaagcggtgggccccttcggcgtgatgggcggctatatgcagcctcagggccatgtgcaggtagtgatgaacctggtggacttccatctcaatccccagcaggcgctggatgctccccgctggcagtggatcaagggcaagaccttccaggtggaggaccgcttctccaatgagatcgccaagcagctggccctgcggggacacgatgtccaggtggcgctggacaatgtggccttcggacgaggtcagatgatcctcaaactggaaaacggcactctggtgggcggcaccgaaggccgtaccgacagcaacatcgcctgctggtaaaccaccggctctcccgcacaaatccataaaccgaaacccccgggccggcacgaacgactgccggtccgggggtttttgcttttactgggtatgccgggggtccgtgatttttgcccggaaatctgctataattggagtggaatttcccagagagatggaggcgatcccggtgaaaggattcaaccgtacagagccgctcttttcgctgtgcgggctgcagtgtgccctctgccccatgcatctggacggtcactgtcccggctgcggcggcggtgccggaaaccagagctgtgccattgcccggtgttcactggaacagggcggggtggcgttctgtacccaatgcgcccgctacccctgcgaacggtatgacggctttgatgcctgtgactcgtttgtgccgcaccagacccgtcagcgggatctggatcatctgcaggctgtgggactggaacccctgctggcagagatgcgggagaaaacccgcctgctggaatgccttctaaacgggtacaacgacggacggcacaaggccctgttccggacggctgcctatctgcttccattgcccgagctgcgtgctgtgctggaacagctcgggagtgagcccggcctccgggagctgccgcccaaggagcgtgcccggacagcggaaaccctgctccgggccgcatctgaccggcaggggctggaactgaagctgcgccggaacccgaaaacccaatcctgaggtgatggatatgaaacgattcttcccgggcgcggctctgctgctcacactggctctgaccgcctgcagcccttcgccggatgcggaggcgtcccgggctgcggaactgccctatacggagggacagctctatgctgccgcctggctgggctggcaggacaccggggatctctcccggtatgccgacctctgcccggggatcgaggaggccccggtgctgcgtctctcggacggggaatactggctgattctgccccgttatccgggcactgcgctggaggtaagccagctggacatcaacacctccgaagcccggctggtctactccgacccggactgcgaagcgctgatcctccagtgcaatatcagcgatattttcccggatgccgaaatccgtctgcgctgcgaggaaggggaagcggagttctccccctatatctccctgcgggatggctcggtggtactgggcccggagggtctggacctcacccgagagtaaagaacacctacctgcaatgatgaaagaaaggaagcggttcggatggatcgacgcgttatggtaatactggcagagggctttgaggaaggggaaaccactaccatcatcgatgtactgcggcgggcggggtttgaaacccatgcggtcagccttaccggggagctggtcaccggcgcccatggcatgcgcctgatggctgaccgtatcctggacagcgagggcttccgggactatgatatgatcgtcctgcccggcggctggggcgctgcggacaacatggcagccgattcccgtctgaccgagctgctgcgctggtatgccgcccagccggaaaagtatgtggcagccatgtgtgctgctccgggggtactggcaaaggcggggatcaccgccggaaagacggtgacctcctatcccggccccaagctggagcccctctttgaagatgcccgctatatcaccgacaccgtggcctttgacgaccacctcatcaccagccggggccctgccaccgctctgccctttgcctttgcgctggtggatcagctgggcggggacagc

SEQ ID NO: 3441 - DNA, 9946 bp, Unknown
  16S sequences of unknown bacteria
aggtatatactttgattataccctaaatatcgacagattgcaacaaaataaatatgttaaagtacaattttttcgtacatcaaaactaaaattttgattataataatcctcgattggtttacattatgaaaaaattgttgtataattagggaaatttaaggagaaatttatacgaggtattacaatgtcagaaaaattaaatcttccgcacttaacccttgataaggattttaacatcatatatatcgaccccgccattgaaaaggacaacccttgctatttaaacaagaatttttttaaaaatattctgttaggttacgattttgcacggcaagaaggaccttttgaatttaagtatgccccattcggagatgaaatgatacagtttgttttctgcaaaaacgatgaaaatttggactgtattcctgtaaaagtaagcgattacggctgtaccgattggcacgataacagtgagtatcttatttggaagcctgtgacaagcatatttgccggccttaacagttttgccgatgatttgtcaaaaccgactatggattatcggcgtgccacccgccatgttgaagatatgtataaatacacatatcaaatgtacagacagatggataatgttacaaccgccacaaatattttgtccggtaacatagatgagcctatcaccattgatctttccgaaatgttaaaagaaaccgaacacgctttaagtttctatgaagatatatcccatttggatatggaaattgaggacaatattttaattaaaagcgatcctcgcattatgataagcggcatagccaatattattttgaacagcattgtctaccgtggcgatgccaatgtggcaataaaaataaagttgaaaaaaaccggcaacaaggccttgtttgtttattccgacaacagcaagggtatcaaagacgaatttttgccccatatttttaagccgtatttttcaaaagatccatataatgacggtgaaaaagacccgtctctcggcttggggctttttattgcaaaatctgcctttgatatggccggcggcaatatgcttgtaagcagtaaattcggtgacgacaccggggtaacgtacaccgtatctatcccacttgccaaagacaacggatgtgttttccgcagttttgtgcaggaaactttcgattccaggtttggtgaattacacgttcaactttccgacattaaagactttaaattgagataaaccgagatgtttatttaagccgtactttaatattatatgatataaaccgagatttattttaatctcggttttaattttaaacattgccaaataaaatggctgtattccgatttttgcggagtacagccaattattatatatttacttgttttcttccaaatagtcaaaagcaaactgtgcgtaaacagcggcacctcttttgagcaagccttcgtcaactgtgtactgctcctgatgatttgtataaatatagcccttttccgtgtcacggctgccaaggaatgagaacacgcccggtacttcacccatatagaatgaaaagtcctcactgcccatcattgtatcaaggtgacctaagccatcttccccatacagcttcttaactgcattttgagctattgtattaagtttttcgttatcgtttataacaggaattgtcatccaattaaagtcaagttttgcctttgcgccaaaagtttcagctgtgccggcaataattcttctcatggcattcggtattctgtcaagatcggaatcaaaagcccttacggtaccttccatggtaactttacccgggataacattaaatcttgagccgccctctattgttccgatagtcaaaaccagtggattaagcgggtcgttgtttcttgaaacataagtctgcaagttcataattactgatgcggctacaactattgcgtcaacaccaaggttcggagcgctgccgtgggctgttctgccctcaatttcaattttgaaagatgagcatgatgccattctcttaccgctttcaacacttacgagaggagcgtcaaaattgccccaaatatgtgaaccgtaaattgcggacacaccgtccaaaaccccttcttttattacggcctgtgcgcctgttgcggtttcttccgacggttggaaaattgcccttacagtgccgttgatttcggatttaacatcgttgagcatttttacagcacccaaaagcatggccatatgtgtatcgtgaccgcaggcatgcatgcaaccgttttgagaagcaaattcaaggcctgtttcctctttgataggcaaagcatcaatatcagctctcaaagcaacaattttaccggatttatcacctttaatatctacataacaaccgtagcaattttcaaatctgtggggttcaagccctaagtctttaagctctttcacgatatattccgttgttttctcctctttttcagagagttccgggtgttcgtgaagatatcttctgtttctgatgatgtaattttctgtctgctgtgcagcttctttaaaattcataatcaatacttcctttccatttatgttaaaataatatcataaagaaaaaattttggcaatataatttatatattttgtagaaagtgcccgatagatgaaaaaagaagcaccaaaagttgttattataacgatttaagccgctttacacccgttctttgaatgatatactttgatttttctgccggattttcttttgcatttttgagccgcctcataataaatatcatattttacatatgatttatatgccaaaaatacgaatatagcggtttttgacgcaacagcccggaaactctctcccatgtcaaatgaacctacgcttgcaaaagcaagcaccgcaaaaataacagttaaaacattatacaaataagatttgattttagcattcataatatcacctcaacaaccattcgttgtttttataatttgataatactacaactttttgttgttgtcaacacttatttgttgtttttgttgttttttgtcaaaaaataccactatcagttgtttacaaaattcaaaaattggtgtataatacacctaagataacaacccaaggtggtattgagcatgttttataaaaaattaaaagaacttcgcaaggaaaataaaataagccagcgcacccttgccgatatgttgggcataacccagcaggcggtggcaaaatgggaaaccggcaggagcaccccggacaccgacacattgcaaaaactatcttcaatatttaaagtaagtatagacaatttgctgggcgttgaaaaatcattggacaatgcttttacaacggcgggcaatgactttgccattccgataataggcacggtaaaagccgggtacaattcccttgcttacaacgaggatttcggcgttgagtatgccaatgtgcataatccgaaagattatttctatcttattgtaaaaggcgacagtatggagccgagaataaaagacggtgacctggctttggttcacaaacaaaacactcttgaaaacggcgacttaggcgttattgtttacggtgacaatgagggcacgttaaaaaggtttgtaaaaagcgataatatgattattttacagccctttaacccggagtacgaggccaaaataatcaccggtgatgatttaaataatgtttatattgccggcaaagttgttgagaccacaacaaaatggtaaaataaaatatcctaaaaaagaaaaccacccttgcatttttgcaagggtgtcttcttttggaaaaatactatgaattagtggaatagcaaatatataaaaccacggaactactcgggcaatgccctgttttccgctgccggtgcaaaggcccctgtttccggcaaatcctgccagtaacgctttggcataaaggacaaacgacactttggattttctctctcttttatggctatggtgtcataaaagtttttccaaagccgccttattcttaattcttcctcatccggctgtggtaaatcaatattatcaacaaacactattttataacgattttgcgaataaatcaagacctgtttgttattttcatcaaatatcacaaaagattgtttgtgaaatctttgtgcaaagtggtttgcaagcaagggcaacacattattatcccgatgaattttagccacatacacccggcctgccttataaaatcttacaaagcccaaaaacttttctctttcacggtaaagggcaacataggctttgcgcaggcgataaacacaatcatactttacaaggttatagatatttttcccctctttaaagcctgcaacaatgtaattcagcataagcatttcttttcccgggatatttgtcaaaaataccttctgcaaaaactcacagttatacctgcccatcttatctattaaagcgcattttaccctgcgtatttgctgtgggtcattttcgatagtgtaaagctgataaaaagatggttctgccatgtcatgtcttactatatcctcgggctttagtctgttataataaaaattatacacgcaggaaagaaagccgtcaaacgtgccgtcataaacatatatcactttttccgttgaattttcaaacatttatactcatcccccggccttgatttgccatccgatcaaacatacttagctgttccggccggttttctatcctaaaattttcttttgaccgccgtgatgtaagcccaaggagaattttattttcttcaaaaggcacataccgcatcattttccctttgcaggttataaaatattttgctcttttcattaccacaccaaggcgtttaagaccgtcaaaatccaaataagccgccctcctggcctttacaattctaagggcgcttgtaacccctatacccggaacacgcaacaacatttcataaggacaggtgtttacctccaccgggaaatattgcaaattgtgcagtgcccagttgcatttagggtctatctcactgttaaacatattgtccttttcgcttaaaatttcttccgctttaaagccgtaaaaacgcaaaagccaatctgcttgataaagacgatgttcgcgcataaggggcggttttgtgtcttgtgagggcaaacgcttgtcccgatttataggtatatacgcagaaaagaacactcttttcaatttatatttatcataaagtccttgtgtcagcctaagtatttgataatcgttttccgcacttgcccccactatcatctgtgtcgaccgacctgccggggcaaatttcggtgcagatttgtaaagcaccatatcctgctgtgcctgctgacggttttctgctatagctttcataggccgcagtattccgtttcggcttttttccggcgcaagagcctttaaacttgcctcactgggcaattctatatttacgcttaccctgtccacaaggctgcccataatgtcaataagcggctttgaagccccgggtataaccttggcgtgaatgtagccgttaaatcggtattcttcccttaaaattctgatacattttatcattagttccattgtatgatccgggtttttgataacgccggaggacacaaaaaggccttctataaaattacgcctgtaaaagtccattgtaagatccgcaagttcccttggagtaaaggcggttctcggtctgtcatttgactttctgtttatacaaaaagcgcaatcatattcacagtaattgctgaaaagcacttttaaaagagagacgcacctgccgtctgccgaccaggtatgacatatcccagatgcccttgcggaacccacactcccccctgcacctcgactactgccgcttgatgtgcaggctacatcgtattttgccgcatccgtaagtattgataatttttcgtaaacagtcataatatcacccggcaaatattataacatctatcagttgttatttcaatcgttttacaaaataaaattgtatattttatcaaaaatttaatagaaataagtctgttattgtgctataattaaacctataagaaaattttggcaggtgcaaagattatggctattgaaattgtgagagattattttaaaaaatttgatatggacaacaagattttggaatttcctgtttccagccggacggtgcggcttgcggccgttgctctgggcacgcaagaggcaagaattgctaagactatgtcatttaaaaaggacgacggttgtattttggttgtaaccgcaggtgatgtaaaaattgacaatgcaaagtacagacatacatttggcttaaaagcaaaaatgcttaccccggatgaagttacggaatatgtaggccatgccatcggcggtgtttgcccttttgcggtaaaagacggcgtaaaaggcatttacattgacgaaagcgtaaagagatttgaaacgattttcccggcttgcggttcacggaacagtgctattgagcttaccccggaagaattgttcaaatacagcaatgccgaccggtgggttgatgtttgcaaattaaaggaagaataaaattttaacaattataaacagaaaaagactgcaatccaacaggtagtggtgattgcagtctttttgcagttctatttatttatttttattgtttctgttattttatcaataagttcctgtggcgggtcattggcaaaatacattatatatcttgtatttgtattttcgtccacaaggaaatatacgggaaattctccctctttatcagcacgatacccggctacaccggcaatttcacattctgatatttcataaccgccattgcgataagcctctaaacttttttgtatagtcccgtttgccgcttcgagagaatcctcttgttcatggctaacattaaacaaaagtacctccttggtaaatttctttgtagttacctctgtgatgatgtcatattcatttattctgtattcaccgggaacagtaaatgtcaaatcccctgccgtagctgtttgatccggctttgaagagccggaagaacaagccggcaacaaaattaaacagcaagccaataataccgataataatttcttcatatctaacctcttttcaagatgtatttgtaaacgcccatacataacacggccaacagcattccgtcggaaatcagacatacactgattgtcaccaggtgacctattgcaaacaaaacaagcgctataatcgcaacccatttgtacgcattaaaatcttgcgaaattatgtatgccgtaacttcaaaaccgacaattactgttataattgcatttggaataaaattcagcacaagcatactgtactcccaccagaaaaaatccgaaataaatcccatagtgacacctccgagtggtaaattggtttacaatttaattgtatcaatctatttgtgcaaagtcaagcaaaattttaaacttatataggcgattttaatgtattatgcaataaatttcactcataaaacaacgccgtaaccctcatcttatacaaggattacggctttattgttttattgttttattctactgattttaatgattctaccataggtatatctctcagtttgtttttcattgcaaaatttacgataaaggcaaacagcattgttataataagagatactacatagctgtatggttgtataaccctgccgaacataaccgtatcaagttccaccataaccattattgccaggtgcaacaccttgccaaggagcaagcctgcaagagaacctataaatgtaagaattatattttcacggtaaacataagaatttacctctttttcacggaagccgagaacctttaatgtggcaatttctctcaatctttcgcttatatttacatttgtgagattgtacagcaccacaaaggccaaggcaccggcggaaattacaagtacgattactatatagttaagcgaggaaatcatactgtcaaaattatcaacggtagcggtgtagaaagaaaccgtatccactcccttttgttccgttaaaagttttgcggccttggaatcatcgtgtttatattcatccgcaacttttataagtaaactgttgctttttacctgcaaatcaaaggcgttgcgataaccggcagttgtcatgtaaatataatgtcccacatagttttcgcaaatatcgcttatttttacctttcttgtcatacctgaggaatttgtaatatcaatttcatctcccacagatatgcccagtttgtttgccgtgtgttccgagattaccgcaccggaagtttttacggctattttttcacctgttttgcgattgtgtaaatccacataatcttcaaaattgtcgctgtcggttataacgcaaagggttatgtctatactgtcatcgttgtttgttgccgtggcagattgataatttacgccgtaaaccccctcaagttccgctgaattttgcaatttttccacaagagcttctttctcgctccgggtcaaatcgtcacttaaagatgcaacaccctgatagcggaaaatttcttcaaactgagttgataccaactcacttatagagtcctttataccaaaacctgcaatcagcaaggcggtacatccccgtatacctataaccgtcataagaaaacgctttttgtacctaaaaatatttcttgcggtgaccttagatgtaaacgacattttattccaaataaatccaacgtgttccagcagaatttttttacccattttcggggttttaggacgcataagaacagacggtgtttccacaagttctttatagcaggccgcaaaagccgcaccggttgtaaccgccacggaaacaatggcactgagaaccataagccccggtacaaagtaaattttcatagccggcaaggtgtacatcatattccaggcagtatatatgataaaaggaaatgccaccgtgccaaaccgcaagccggctatactgcctacaaaagacgcagaggctgcgtaaaacacatacttaaacgctatttgacttgtcctgtaacccaatgcctttaacgtgccgatttgtgtgcgttcctcgtcaaccattcttgtcattgttgtaagacaaacaagcatggccacaagcaaaaagaacaccgggaatacctttgaaatagcgtctattctctctgaggctcccttgtaatcaacatagctgtaatgagagttgcggtcaagaatataccatttcgcctgtgctattccgtcaatctgggcctgagcttccacaagttgattgtaagcgtcgtcaagctgctgttgtccgtctgcttttttctccactaactcttttttacccttttcaagggcgacttttgcggcggcaatctgcttttcaccggcggcaaattgagcgcttgcctgccgttttgcatttgccagctgagtttcaccgtcggatatttgcttttcccggtcagctatctgtttatttatttggtcaagagcagactttgagccgctaagaccccggtcgatagtatcaagagccttttgataattgtcaaccgattgatttgcctgttcaagttctgcttgtgccaaggcaagttccgtttgcgctgtagataaatcagcggataaattcgaattttcactgtctattcgtgctattatttcgttattggcatttactttttcctgattttccgcaatacgccgctgaatttcagccttttgcgcctcgtccgttgtaatgttcaacaagatttgatctgctgaaatcttctgatttaattctacattttcatttttccgatttacatatatttcgtttttattgtatagatcatcataaacagcctttttttcattgtaagtttgctgtttttcccgctgatcggctttggcagagttcaaattgtcctctgcttcctgcctgtatggggcaacggactccaaggccttatcataggcttcctg

SEQ ID NO: 3442 - DNA, 32759 bp, Unknown
  16S sequences of unknown bacteria
aaaacggtttctttctttgctgcattgtctataagaatgtggtcattcagcatatgacaaagctataccgtgtccttggcaaaagaggacgaatcaccattccctatgagataagacagcgtgtcggcttcacctataacgatgtgctgtccttcaccgaatcaccggacggcagaactgtcaccgtcaagcgtgaaaagatttgcgataactgctccggcaccaagacggccgacaaggaaaccgagatgacgcttgaggatttcctcgacagcctctctgccgaacagcagcgtgtagcccttgtccatttgtccgtcaagtgggcagaacagaaagcaggtggacacaatgccggagcataagccgttgtatctctattcccttaaagaagctgcggaatgggatgaaaaggatgaatggcgtgagagctacctcgaaaactgcgactgcgcccgtgccatcgagagagccattgacgaacactatgacggtcagcgccttaattcctgcgcccaggagatcatcgaccgatacggctttgaccgtgtcaacttcgttctcgccgccaccgtgcgtcagggaacccatgacggcagatattccgaggacaacaaaaaatggtcaaagcgtttttccgttatggacaaggaaaacgcatggcaataccatgtccgcagtcaccccggactcgtcaatctattcgttgccgatgcaaggcggctgtgggataaactcggattgtttgacggtcgccactgcgaaaacggcagtcaggtcgactataccgaccggatagtggttttagatccgtcaattctaaaggacgaatgtaagacgccgcaggatcagctcttctatgcagaaagcggcaacggctgtcgaccgaacgccatcggcacaaaggtatatggctttcatgtgtcggacggagaaaaaggttattaccgccgcaccgactttataggcgctcttaaagaggaatttgtccccgaatgggcacaagaaaacacacaaaaatatctcgaacccgatgagtctgccgacgaacctgtggatgacggcggcatgacaatgaatatgtaatcaggaggaattaactatggcaaccaagaaaaccaataacgcaacgaaatccaaaatccctgtcagcgccaaaatcgaccgcatgattgagcgtgaaaataccacggttaaggcgtatgccagcgcgaatatcggcggcgcgtttgttattaaggacatcgccgtggtggacggtcagaaagggatgttcgcccggatgccctttcgctcctacaaaaccggcagcggcgaaacaaaatattccgacattgccttcgccctcaccgatgaggcaagacagagtcttaacgacgccgttctcggcgcttaccgtgaagctctggaggaatccgaggacgaattacccgatgaggacgaaagtccggcacaaagtatgtaactttttctcgaaacttttcgatttcgctggacttttgcgagtttttcggtattgtgtaagtagaggtgatcatgatgacgaaacggaaaatgcccgcagtcctccttgcaggactgatgatactcgcccttgcgggatgcggtgcggataagacggaaaatacaggcagcgatcctgcaagcacggaaagcggcatcacggcaacggtaacggacaacgcttccgagccgaccgccgagagcaacctgcctgctgacagcgaatcaaagtcagacgaatccacagcagaaaaagaacaggccgaaggcaatgctcctgccgacagcggcagtaaggcagacaccaaaaagtctgccgaatcaaatcagcaggccaagacgccgtccaagcagacggaagctccgaagcctgccgaggaaaaaccgcagacgcctgcacccgcagaaaagcccgaagctcctgccgaaacacctaccgccaacgaggtggcaaggaaaacggcagaaaagctaaatgcactcaggcaagcccaaggctcaccggctgcaaccatcctccccggactcggcaaggtcgcaacctatcgttccgagcagctcgtaacaaacttctcgcatgaatcaagtcccgacgcctgcaccgtattgaaatacggagaatatgtggatatgtcggactgcggaatgcccgaagcgagctactaccgaggatacaatgccgaggccgccgccaaaggaaattggacgggtacggcagacgagatagccgataaaatagccaacggcttcaagaacagtgccggccattggcgctagtcaactgctgacgacagttagtttgtaggctatgcttattttagttataataagaaggtaatggtctgacgatcctcgctttgaacttagcgttcgttgtagaaagagtcaaccgccttcttgttataaagattcgattaagcaggttgttctgcttggcattgaggttaacctcaatgccaagtgcgttcgtgtcactaaccaaaatgaatcgtaataagctttggtggaaacattacacatctcaaatgaaagaaggaatgttatgattagcgttggaattgatgtatctaaaggcaaaagcacagtttgtattatgaaacccggtggtgaggttttgtctgcaccatttgagattactcacacaaaatctgaacttcttgaccttattaacataattaaatctcaaaatgaagaagtacgagtcgttatggaggataccggacactatcacttgccggtggcaacactgcttgttgataatgatatatttgtttgttctgttaatgctttgcgtatgaaaaagtattgttctcaaagcatacgcagagctaagactgacaaaattgattctgtacatatcgcttcttatggtattgcttattggaatgaacttcaatctattccttgctctgacgatatatacaaggaattgcagctgttagcaagacaatattatcagtcagttgctttgcttgttaaagctaaagtcaatttcagtaatctgttggatagagttatgcctaacattcaaagcattattacggataacagttcaaattcaaaacttactgattttgtcgctcgatattggcatttttctcgtatacttgaaatgggcgaaaaacgatttatttccgattactgcaaatgggcaaagaaaaaaggataccgtatgtgcgaatgtaatgcaaaagaaatttttgctttagctcaaaacggtatccctgtgcttccttcatctcaatcaaccaaaattgtcatcacggaagctgtacgagtgattcacgaacttgaatcatctcgtgacaccattttagcacaaatgcagtcttttgcaaagactctgcctgaatattctgttgttcgtgagatgccttgcatcggcgatgtattagctcctcgtattattgcagaaattggcgatgttcgccgatttaaaaacaagcactcattaattgcttatgcaggcattgatgcgccgccttaccaatccggtagttttaatgcgactgaaaggcatatatccaaaagaggcaactcttatctcagaaaaacaggttatgagattatgcaaagccttatcaagcacaaacccgaaaatgactctgtttacgatttcattgttaaaaaacgctgtgaaggtaaatgcgcaaaagaggttatgattgccggtcttaacaaatttcttcgtgtttattacggtaaggttaccgaactctatgacaaccttgaatactgcaatttaacagcttaattgattctatatttatttagccgttgaaaaaactttcattttcaacggctttatttgctatacccattttgttttataattttttaaatttttctcttgactttatttagcaggtttcttttacagatataataaaaggctgcaccttaaaataggcacagcccgaaaaacaaaaaagaccgatagattttttagttctatcggtcagataataaaaatattcggtttacggaagttcaaatccctacacaaagggaaaatatccgttttacatctacgaaatcgtacattaaaatttcgccccattaaacggcgaaaaccccgatagaatcggggttttcgggggctatatcttttttgtagcccttgtatggagcgggtgatgggaatcgaacccacacgaccagcttggaaggctgggattctagccattgaactacacccgcatacgaacaaatattataatagcacaaaacccgaatatagtcaagatattttttaaggaaatttggatttttaaaaaaacgcctgctgccgctgctttgggctttcggcaacaggctgtaatcatttatttaagcggcatatttattacttcgtttgcaatttctatcatacgtttttcaagattagtccagcggctttcgttgttttcatccagcagccagtcaaggctttcgccctttttaccaaacgaataccagttgtagcaggtaagcccgcccgggtgctcctgttcctttaaaagcctgtagcacatttcaagatgatttatagcgtgctcctgaccgaaacggttgtcaatcgaccaggtgcatggcacaagccatatatcaacatcatctctgccgacgcgccgtttcatctcattaagcacccttaaatgctcgtcataatcggtaggaccgtaataatcaaagccgacatctgtaaaaaaacgacagcttttcgggtttattaaatgacctgatccgttcagacaaaaaccccgaatttaaagaacgataccgcaggcttaaggctcgccgcgggtatattcaacgccgctttccgcgtctaccatagctgtattgtgccagcctgctttgtttttgccggtgccgtcgccgttattcagtataacgtcctttgcgccgtcataaaccggctcctgtgagtagataaaggtctgcgccgcgctgtaaacatcctcgcccgcgctgttttcagctacggcataagccttaacggtataatttccgtcggcgtcgggcgctattcccaaatcatcccacgctttggtaatgcgtatgggtgaatcgtaaagcccgcttgccataaatatcggcttgtaaagaattttggtgtcgctcgtaagcggaccggtgccgtcaagcgtgtagtaaattttcgcaaaactgaacacccaccccagcattgcaggaaggcaagctcacccaggttacaaacgcctccatttttttaagctgctcgggcgtaagctttttaaaatcgctgtttgcgtcgaaataagccgaaagtataaacgccgccgtgttatccgtcggggtgtaagcaagcgccgcaccgtccggcgaaacattatcgagcactgcggttgaaatgttgcagccccatgcctttaccgaccccttatcgccggtaaagccgtagtaaattccgggtgcggcagccctgcaaagcaggtttattccgcaggcggtaacaagcagcagtgccgataagccaaatggccgccctttcggtctaccccgatttatgcaatttttcaaagcagtttaaatccatttatcgccgctcccccgcagcttaccgcaaatatattgacgttcacgccgatgttgtgagggaggcggaccactccccgcaggattgatagcatatgtattaaaaaaagacctgattgtccacggcaatcaggtcttttgtgcaaacaatacaatcagtctttaaagaaaagcggcagcttttcaaggaatataatatccttgcggtcggcggcatcgccctctgccaaaaacgcgcaggctgcggcttctgttccgcccgcctctttaacaagctcgcgcacggcggcaagcgattcaccggtacttataacatcgtctataataagcactcttttaccttttatcaggttagtttcgctctcgcccaaaaacaggtgctgctcgtgctgcgttgtaattgaggttacatttacctcaagcgggtggcgcatatacaccttcatacccttgcgggcgattatatagggcttacccgtttgacgtgccatttcgtaggctataggaatactctttgcctcgggcgttaaaataacatcaaactcgggcagctttttgcgcagctcctcgcagcctgcaatagtcagctcaacatcgccgaaaattataaacgcagcaatgtccattttctcgtttacaggaaatttttcaagccgtctttcaagaccggctattttcatagtgtaatattcagccattttttattcccctttaaaaatattaaataccgccgtatcaaccgggaggccacgcaaggtttctgcgtgccagcaggtgaaaatgcatatggtgaacggtctgaccgccgtcctccccgcagttatttacaacgcggtagccgttttcaaggttttcctgctttgcgattttcgcaatcgcctcaaaaacgcgcgcaacctctatgctgtttgatgaatctatttcatcagccgaggcaatatgctttttcggaattaccaccgcgtgaaacggcgcttgtgggtcaatatccttaaaggcatacacatactcgtcctcatacaccttggtgctgggtatctctcccgcagctattttgcaaaataaacagtctgccattttttcacactcctatttgagcggtaattacctgctcagctgtgccgagcgctttatccgccgccgcaatatccttaccgcctgccattgcaaggtcgggcttgccgccgccgttgccgccggctgcctttgcaacctcgcgcaccaaattgcccgcgtgcgcgcctttactcagcgcatccttaccgcaggcggcgcagaaagtaagcttttcgccgtttaccgccgctaatatcacaaccgcgtcggcataatttgcctttacggtctcagcggtctttttaagctcatcgggggcggtgccgtcaagccgtgccactgccaccttaacgccgcctatttcctttgcgctgtttattatctcggttattttgcccgccgccagtttagcctcggttttttcaagctgcttttttgtgtctctcagctcgtttgtaagctgcaaagcgcgctttgaaatatcgcccgcagagcattttaaagtatcggcagtgcttgctataagcgctttatcggcatttataagggatataacgttaagccccgttaccgcctcaatacggcgaacgcccgccgcaacgcttgattcggaaataattttgaaaagcccgatttttgcggtgttatcaatatgtgtgccgccgcagaactcaattgatttatcctttatgtttacaacgcgcactatttcgccgtatttttcgccgaaaagcgccattgcgccgagtttacgagcctcggctatgggcatttcggtgttttcaaccgcaataccctcaagtatggcggtgtttacaaagctttcaaccttttcggtttcttcggcggttaaagccgaaaaatgcgtaaagtcaaagcgcaccgcgctttcgtttacaagctgacccgcctgctcaacgtgcgtgcccaaaaccgcgcgcagacccgcctgcaaaaggtgagctgcagtgtggttgcggcgaatggcgctgcggcgttctgcatcaatttccgccgtaacggtatcgtctacgcttaaagcacccttttcaaccgtgccgaagtgggtaaacacgccgcccgcggtcttctttgtatcggtaaccttaaacacggcattatcagtgtaaataacgcccgtatcgcccacctgaccgccgctttcggcgtaaaatgcggttttatcaagcactataattgcctttgtgccctctgcggcatatgaggtatgctcgccgtccgccacaatatcaagcacgcgcgcgccgcacttattctcggtatatcccgtaaattcagtagcgggaatattatcaaagcttatgccgtcgctcttccagctttccgcatcggctgatttgcgggaggaacgcgccatttggcgctggttttccataagctcgcggaatttttcctcatccacggtcatattgttttcggctaaaatatcctttgtaaggtcaagcggaaaaccgtaggtatcgtaaagcttgaatgcgtcctcacccgagagcacgccgcccgcctttatcaggtctttaagcagattcaagccttggtctatggttttattaaagttgctttcctcattggaaataacctttttaataagctgctctttttccacaagttcgggatagcccgccttgttttcggcaataacggcgtttgaaagctcggttaaaaacggcttgtttatgcctatcagcttgccgtgccttgccgcgcggcggattatacggcgaagaacatagcccctgccctcgtttgacgggataataccgtcgcttatcataaataccgaggctcttatgtggtcggttacagcacggatagaaatatcggtattatcgtcctttccgtactccttgcccgacattttgcagaccttatttaatatgttgcgtatggtatcgacctcgaacatattgtcaaccccctgcataacgcaggcaagacgctcaagacccattccggtatctatattcttatgctcaagctctgtataagtgccgtcgcccatattgttaaactgggagaaaacattgttccatatttccatatagcggtcgcagtcgcaccccggcttgcagtcggggctgccgcagccgtatttttcgccgcggtcaaagtatatttcgctgcaaggtccgcaggggcctgtgccgtgctcccaaaagttatcctctttgccgagccttacaatgtggctttcgggtacgcctattttatcacgccagatagtgtaggcttcgtcgtcctcttcataaaccgagggccacaataaatccgacggaatttccagcaccttggttaaaaattcccacgcccactctattgcctgctccttaaaataatccccgaaagagaaattaccgagcatttcaaaatatgtgccgtggcgcgcggtgtgccccacgcgttcaaggtcgggcgttcttatgcacttctggcaggttgtaacccgctttgagggcggcgttacctcgcccgtgaaatattttttcataggtgccatgcctgaatttataagcagcaaagacttatcgttattaggtactaacgaaaagcttttcagccgcatatgcccctttgactcaaaaaatgaaagatatttttcgcgcaggtcgttaagcgaagtccactccataaatatacatccttaaataaacataatttaacttatatattatatactcaacgcatttatttgtcaatcccgccgtttaggttatttcaatttttcggaaaatatgatattataaggaaaaatacattttcggttgtataagaagtgagggggcggttttgtgagcggcgaagataaataccgactgtttttaaacggagacgaagacgcatttgacggaataatgcgcgaatatttcgacgggcttatattctttataaacagatatgtaaacgacccgcacaccgccgaggatattgctatagatgtattcgcctatatagcggaaaacaggcggaaatacaattttaaggtatcgcttaaaacctatatttatatgataggcaaaagccgcgcgttcaaccttataaagcaccgcaaaaggcacgccgccgaggaattacacgaatatatatcggcagaagatttatcacccgaaaacgcgtttttaaaaagcgaacaggcgcgcattttaaacgccgcattattaaatctgccgcccgatatgcgggcggcggtgcatttggtttattttgagggactttcatataaggaaactgccgagattttaaaaaaatcggcaaagcaggttgataatttgctatgccgtgcaaaagcggctatgcgaaaagagcttgaaaaggaggatatactgtgaaaagctttgaagaaagaaaggcggaggtctgccgccgacgcaaaattattgcggaaaagcggagaaagaaaaataaattactgctttgcgccgctcccgttattatcgcggtcggtatagttatcaccgtgaattttcccgatatttttccgcttaacagcgcaaaaaacgaaagctccaacagcagcaccgtatccctcgataccgatttgccaacgcttgaaataagcgcgcctgacggcggctacggctatgaggggtaccttgcgcacgatatttcggagcttgtaaacgcaaacccgtggaacgagaatatttcacttgccgcgctgcctgttttcagggttaaaaacgatacatccgaaaataaattaaaggagctgataaccgccaccgccgaaaagctgaatttaaagggctttaacagctttacaaacgatggcggcgctgtattttccgacagcgaaagcataaaaattacggcaaccgatacggatattgccgtttattttaaaaaagccgaaaagctgcctgaaaagtataatttcgggtattatgcatcatacaaggatatgaaaaaaagcgccggatatttaaagaataaatacagcgctttatttaaagacggaaagtatattttgaatttatacggcggcgactgcgatatttacggcaggcggacatattatatcagcttttataaggacagcgatgatatagttcaaaaaatcataaattacaatttttataaaacccgtttcaccccgaatgataacggagaattggagcaaataaccaccgatttacctgatctcggcgataaaatcgggaattaccccgttatatcccccgataaggcaaaggagcttttgtatgacgggaaatatgttacttccgccccaaaagcgattaaaaaaagcgataaaacagcgcaaaccgagcttgtttatcggtttgcgccgtgggaaaagtattatataccctattaccgttttttggtggcggaagaaagcacaggaaacgaaagcttagaaaagcaaggctttaaaagctactgtgcatattatgttcccgccgttggggataaatatatagcaaatatgccgctgtggaacggtgctcttaactaatctgttttaatatttctgcaaccgtttcctctgcgttgccgcttttcaccgttatatcggcatattttttataaagcggcagcctttcgttataaacgctttcaagcgtttcgccccgccgcattgcaataccgcgcgttgtgatattgtttatgcggcgctctatttcttcaagcggcacgtcaagaaacaccgttgtgccgccgcttttaagctttttcatagctctttcgccgaaaaccgcgctgccgcccgttgcaaccaccgaattttcaaaatccgccgtggctattacattttcctcggttttaagaaagaaatcaagcccgccgcagtctattatttcctgcagctttttgccggtttcctgctgaattaaaaggtcggtatccgaaaaccgcataccagccgcctttgccagcaaaacgcccaccgtacttttgcccgagcccggcatacctattaaaattatgttcccgctcatcagtttttaaggctttgcaggggggcaggtatgcgccccgcacggtcgataaactttttcgggcttttttcaaggtttacgcgcattatcggtcccgaacccaaaagcccgccgaaattaagctcctcgcccgcctttttgcctattgcgggaatcacccttaccgccgtggtttttgagttgaccatacctatagccgcctcgtccgcaattattgcggaaataacctctgcgggggtctcgccgggaattgcaatcatatcaagcccgacagaacaaaccgcggtcatagcctccagcttttcaagctgcaaatcgcccgagcgcgctgcggctatcatgcccgcgtcctctgtaacgggaataaacgcgcccgaaagcccgccgacggaggaagacgccataacgccgccttttttaaccgcgtcgttaagcagagccagtgccgcggtagtgccgtgcgttccgcaggtttcaagccccatttcttcaagaatatgcgctaccgagtcgcccaccgcgggcgtgggggctaacgataaatccactataccgaaaggaacgccgagccgctttgaggcttctgttcccacaagctgacccatacgtgttattttaaacgccgtgcgctttactatttcggcaacgcttccgaggtcaacattcgggtactttttaagcgccgcctgaacaacgccgggacccgaaacgcccacatgcaccacgcaatcgggctcgcccacgccgtggaacgcgcccgccataaatgggttatcctcaaccgcattgcagaatacaaccagctttgcgcagcctatgcagtcgcggtcggcggttttttcggcggtctcgcgcacaatttcgcccattagctttaccgcgtccatatttatgcccgattttgtagaacctatattgaccgatgagcaaatgttttcggtagtgtctagcgcctcgggaattgagcgtataagcgcctcgtcccccgccgaaaagcccttatgcacaagggcggagtagccgcctataaagtttacgcccgtagtgtccgccgcgcgctgcagcgttttggcgtaaagcacggggtcgccgcctgtggcggcaagcattgatatgggggttacggaaattcgcttgtttattatcggaataccgtattcccgctctatatcctcgccggtcttgacaaggttgccggcgagtcttgttatcttctcataaattttattgcaggaactctttatatccgaatcggcgcagtcaagcagggaaattcccattgtcaccgtgcggatatcaagattttcctcggaaatcatatttatggtttccattatatcgttaatattaagcattggggcagctcctttttttatatgcggtgcattgaattgaaaatatcctcgtgcattacgcgaatatcaagccctttgccgacgcccagcgctttcattttatccgaaaactcggtaaacgtgcagttaagcccgtcaatttccgtaagcattaccattacgaacatatcctgcaagaccgactgcgtaatgtcaactatattaacattgcactccgcgcacaccgcgcttacctcggaaattattcctaccgcgtccttacctataaccgatactactgttttcattgtgtttcacgctcctgacggttcccattttaccacatttcccctttaatatcaaggtataaatacactgccgatgtaaatttaaatgtcgttcccgcggaattatttgacagcgtcagcacaagtatgctacaatgtatttatattaaacacagtgtgtatacaaaggaagttagtatatatttaaaaaaatcacggcagtaatacttgtttcaataattgctttgtccttttccggctgctcttatatatcatataaggattactgtactaaggaagactacttaaatatttgggaacttgaaggcgttcggtatgacgccgaggtaatatcacctcaatatctctgaacggcagcctgcagcagagctttacctataattcttcaaatgagcttgtccgtgtggatgataaagtgactaataaatccgtaacctatgcgtatgatttcgtaggtaatatcacctcggtaaagacctatctttacacaacaggtgcgctcggttctcccattacaacccaaaactatacctataacagccaaaatcagcgaaccgatttaagctatgacgcaagcggaaatttaacttcacttaacggttatacctttacttggagcggcagaaaactgaccgctgccgtaaatgcaaataccgatatttcgtatacctataatcataacggtattcgtacaagcaaagtagtaaacggtacaacaacatattatgaagttgacgaaaacaataatgttgtaaagcagtatgagcttgtaaacgatgcggaaactaatgttattgagttcgtttatgacagcagtaattcaccgatatatttcacttataataacgcaacatattattatgagaaaacctgcagggagatattgttgctatacttgacgacagcggcggtattaaagcactcgatagagggagattttaaccgtgttgcggtatctgaggttgaaaacctcgccgacggagacggctcgggcagggtgcaaagataatgaataaagccggataaagtgcgaccccatcggagctacagaccgaaggcacaaaacaaattaaacttatttatattgaaaaagaagagctgatgcgctataatataaaagtcgtatcagctcttttcgtattttcggaaaaactgtataccttacaataatcaaatacttataaaataaggagatatgggaataaatgaaattaggaatggtaattgtcgaaccgagtttcatatgtccctataactcctcaaaatctcataaaacccgatagtaccgcgggtttgaaaaaaatcactttaatatatctttatacttctctatgcaagtccacaccaaaatggtgtagtaaatggtgaagtaaggtttatggtaaaaacgaaaaaagagcctatgcaataacaatcccccacattaaaaatgtgggggtaattttataatatatgtattttatgaaaaattgccgttattatcgcaggtaagtacaacatgcggctcaatagtgctcacaacgactaaaagagcctttctgataaacttcgcgtcccctatggctttatttgctgaacgctcagcagttgcggatttgaattcccatgcggaatctttaatcgagtatgtataggaagcctttgtacaaaaagcagagccgtgtgagctcaccgtaaatgtaccgtttattgtaaaagtaaagaacactgttccagaattgttttttgcaatatatgtttttttaccggatttttcatatgttgttgcaagtggtgtcgccaaattcgtgttatcgtcctcataaacggaaacggttataatataaccgtcaacatacattgtttcttcactgacaagcctttgatttttttcggttgccgcctctgccgcagatataggcataaaagcgcatataattgccaaaagaatggcagctattgatttattgactgttctgttcatttgagctttcctccgtaattttaaactcgtattgttcgggttgatgttccctgttccatttgatcatataaattcctgtcccgattgcaagaattataataacaattagtgcagaaataactgctatccaaatccttttggaacgacacagctttttatttatatggattccgtcaagcgaagaaatatattctgctacacattgctccggtttgccaaaatggttttccaacaattcatatgtaacagaaaccttatcattgcaaaactctatcaagctgccttttaattcggtatcaagcattttttgtaatcttttcgggcaatctttcttcgccgcttttaaatatttatttattattttttcattcgatgccatttgctatttcctcaatattatccacctgtaaaattttcaacacacctgctgtatgcaaaatgtattcgtgcttgaggtcttcaagatattttctgccctgctcctccaagtgatagtaaacacgaacacgccttttgcctaccttttccgaatggtcggatatcatccccttttcaaccaagcgataaagcgacgggtataacgaactttccagaatacggtaaagaccgccgcttctgtcggatagctgctgtgaaatttcatacccatacatatcgccgtcctgcagcagtgtaagtatggtaagttcgatagtacctctttttaaattatctgaaattgccatatccattctcctgtcggatataatataacaaaaatatttcttgttgtcaatactatacatcaaaagttattcttgacaaattccacattacttgttataataaagtcaacggattgttcgacaattacaaaaacggaggatgatgttatgaaaatcagaaaagtatttgactcaaagtttatttttacaccaatttatttgctttcaggtgtgattatcacctatttaaaagaattataaaatttagcacacttgttttcaaaacatacttgaatgaccgcggcatgatggtatgtatgaaaaaataaaaacaaaggagtttatcatgaaagtgaaaaattgtaggaaagttttagttttcggtataatagcagcggcaataatcagtacattagccctaacggcatctgctactgatgacagtcgtggatattatatgattttatacggaaattatgcaaattgttataacgatgaaatccaatataggcaaacggatagcgttgaaaatccttggaaggtgaaccttgcttataattccgagggaaataatacaatagctacattttggttggcaaaagagaataaaaccagagtgtctacaactcataatgttcaccaaggctccggagatcattattatagaccatatgcttcggccaataaaaccaatgtacgattggcggttgagaataataataacacaaatgtaagttattatgtttcaggaacatgggatgaagaaacttggtaatgtctaacatagtgccgcccttgcggcagcactatacttaaggaggtggatattttggcttattatctaaaacgcttgcttaacgaccctttaaaaacaaccgtaataatatttatattgcttttacccttttgtgaaaatatatactatatttatgaatttctcaaatataaaaatgttgtgaaccctaattattcatgctttttagcgggtgggagcacaggagtaggtcacatattacagggtgttttattatggtttgctccaatgtattttttaatattgtttagtgaagactgtttacaggatttcaagacaggaaatataaatattctaatttcaaagattggaccgaaaaagtatataataattaatttaataaaatctttcgtaatgagtttcatgcttatctttatttctcttgcaataaatatgttaacaacatattcactttttttcggtggaaatatatctaaggttgatttaaatgtacaaggccacggattttatcaatatagtataacacacccattgttaataaatataatgtatattttgttgacaagcataataattgcattcgtcagtatgaccgggacagcacttactttcactctcaaagatcgtaaattgatttatccaatagctatgttttgttggtatatagcctgttcggtacccgattctattatttatgtaacgcaaccattcacagaatacggacttgatgtaacacttaaatcattctttgtgttcataataataaatatggtaacggtcattctattatcgctgagggaaacgatatatgttaagaaaaaaattctttaatctatctataacaactatggtcgttatgctcttaaattggacactcacaatactcttgccgtataagggcattccgatttttccgtatagcaacataagtgtttctgaaaaaaagagcataattatatctgttcttttaaattcgggaagttatgactcgttattaaacatgatttttcttgtgctcgtttatctgctttcacttaattacttacttagctcattcgaagccttttatattgtaaggtttaaaagcaagctctgctttttaaaacacaattttatgatttgcactatttttaccttgttgtttgtgtttataaaaacgttggtagggataatatgttcctctgctttatttggacaagaaaacttaaaacatctttcctattatcgcattgaacttgtaaactctattctacctatactattttatttattaaacggactgattctgatatcatttaattatattatcggaaaaaaatattctgttatatttattttcttgctaaatttgtttgaatatgcattaataaaattaaatatagttacttggatatttatcaaagatgctacaaaattctctatgtttctttctggaaaaatcacatacagtatatttatttccacaatatttagaagcattctttatattataatagtttcttgccttggaaattatttagtttgtaataaggacaactttatcaatgaaaaaaaataactatatttatattttgataatactttcagtgattttacaatgcttattttataataatacaaaattaaactatcaatatacctttgcaataggtataaccggattggatactaaattaagcatctcaccgatgttaatgcttttattgcctatatttattgaggtattttcatttaatgaaaatatttcagatataattaacaaaaacggtaaaatatatataatccgaaattattctaaaatccgtctaataaacaaaatgattgtttacataataacaaaaatcgcagtatttacttgcttacaaatcattatttacagtcttttaaggggaaaacttgaagatctttcaatgtacactaatattagggcaatcattctatacataaacataatattggcaatagcattatttgaacagataatccaattttacatttcttctgtttatgtggttttaataacaagcatatatatttttttgggtacgactatcggtattttaacgaaatcacttattataaaatttatactttttccatcgcttactttcggattatataatggagcggtgtacagtatgaaaaactacatatctaatctaatgtttgtttttgtattgaatacttttcaatatctttatatatcttttaaatttcaaaaaaccgacatttattgatgaggtgtaaacaaatgattgaactgaaaaatatttcaaaaaaaataggaagtaaacttgtacttgataatgtttcttatacttttgaaactgggaaaatatatgggttgagcggaattaacggttcgggtaaaacaatgcttttaagagcaattgccggcttgataattcctacacaagggcaaatcataattgatgggaaagctcttcataaagatatttctataccggaaagcattggcattattatagaaaatatggaattgttaggtcaatataatgcttatgataatctcaaaattttatccaaaataaaaaagtgtgctaccgataatgatattctgaaaagccttgaaagagttggcttgagtacagataaaaaagtcaaaaagttttctttgggaatgaagcaacgccttaatattgcacaggcaatctttgaatcaccaaaaattctgttgcttgatgaaccgacaaatgcattagatgaagagggaattacccaaatttataaaatattaagggaggaaaagtataatggtgtcactgttataataacaacacacaataaacaggatttggagaatttgtgcgatacggtattaacaatgtcagagggcaagctatatgaaaagtaatttttacgataataaactaattaaaattgttatttgtttcatattgattatatttgtaattggtttactattaaatcgtttatatatttgtaagttcatcaatcaaaatgatgatgaaaacaacaatatagacagttcgtataatgtaacagccgacgggttatataattattatgtttgtgataataattcagcgagggaaatttatataacaaaatataacggagaagaaaaatctgttataataccaaatatgattgatgatgtggttgttacacaaataggcgattcgtgttttactatgaatgatgaaatcgtaagtgtccaaataccaaatacaattacacatattggaacttgtgccttcgccggttgtaaaaatttaaaaagtgttacaatccctgatagtgtaaagacaattgatccatatgtttttgttgattcggataatgttacgatatattcatttgaaaattcttttgcaattaattatgcaaaagaatatagcataaagtacaatttaaaaaagattaattaagatatgaatttaataaagtctttttgaataataactctttatattacgtttgaattaatatttataacaattatgtattatagtattctaattgtccacattatctgtagttgatatatgtatgttgaaattcaaactgttgatgggctccatactgcggatatgttttgcattgatgtaaattaatttgcttgtaagttattaggattattattaaaaatcacatttggaacaaaataaatagaatttgaatggaacgctctacttgcaaattactatttcaccgaggtggcgttaccatcaggttctaatgatcgcaaggtcgtggaggttcaagtcctcttacccgcaccataaagcgactacaaaaaagatgtagtcccctaaaaccccgattttatcggggttttttgctgtccgtaaggcaaaaaaataaattgcaaaaacgtagatgaaaaaaggtgattttccctttaaggatagatttgaaccaacgaacaatttaatatgttatatcaggcaggtaggagtcttctttagatattgtgtaaacctccgagatggtataaaatagaaataacaaatcggaggttaaaattatgccaaggtacaaagacagcccggaggtacgggcagcaaaacaggaacggagagagaaattgcgggaattgctcgcgctgatggaagtggaggatgtccgtgacttaaaatccgtatttaaggaaatggtcggcgaggttctcgaaaacggacttgaagcagagcttgacgataagctaggttacaccaagtacgattgccgaaataaagacaccgacaacagccgaaacggtcatagcgtaaagaccgttaaaacaagcgcgggtgaagtggaaatagccgttccgcgagacaggaaagctgaatttgaaccgcagataatcaggaaaaacgaaacatcaataagctgggatattgaagaaaagatcatttcaatgtacgctaaaggtatgacgaccaacgatatttcggcacattacaaacaaacggggaagtcacatctttacaaaaagttctcaaactttaccattaattctctattggcattctcaaaaaattttcctacaaaaacttgacacgaacattcacaaattattcacttgacattaacggtaagcggcgttagaatgaaattggtaaaatttgcacggcttcttgcttgcggtgggttagtaccgcaaatgaaaagaccgtgaaccacactttttgctcaccgctttcgacctacccgacgcctttaggacggacaaagtgcgaacttcgggagttataggctaagggtgcaaggtttgatgtgaaataatgcggcgtgtccgcaatgattttggtttgagtaatgagtccgtttatgttttttagtgcctagtaatggagagtagccgagacaggcccaggcgaaattcatcgttccgcacaacccgcagaacaaggaaaaacccgcctgtcttgctgtcggacatgctttagcgtgatcgggactgacggcaataccaaatgaccatttacaacccgtgtataggggcagtctgccctgacggttaaaactcatacgtgagtccataagagaaaaaggtggaagagtacagcattattgttgtactcttttcactaccaagagaaaacttgttgtttttgctcccggaggcggaaagtcaacctataaacttttcgccctttttaagaaggaggtggtgccatggttaatacactgtatttctgtatccatagcatttgggcatattttaaacttgtctccgcctccgagtgcagaataatcggttaaccgaaaatcggggttgtcttattgacaattaacccgcaaaacaacaactacaacaaagaagtaaacagtttttcagactccgttaaaaagtatctgaagatcaaaaaaatgacacaagctgatttaatcagaaagagtatgttaacaagaactaccgtaagccgtatatgccgtaacagcaacgataaaggcagtacatatcagcctacagatcgcattgttatgagcgtttgtgtggctttagggttagattcaaaagaaacaaaagaattgttcagtctcgcattcccctatttgaaatgttgggataaaataatagccgagaaaatgaacatcgatcaagcaaacagcttcctttatgacgagggattacctctgctgggaagccccatagacgagtaaaatttgtatgccgtcctgctttttgcagggcggtcttttttgtttcgccggggaagcaaaacgcacctgttaaatctgatacaatgcaatcaggttaagggtgcgcgccaaacctgaataaaattaaaaaaggagaaacaaaaaatgttaaacattcgtgatttgaaaattgatcctgcgtctctcggcgcaaaaaagctgttggtggatattgtcccgacatatgagtataaggacggacaccgcacggaaacagttaccggataccgatatattgtcgctttaccggatttaagccttgaaaagctcggtgtgaaaattgacgggaaacagcttatggaaaagccggatggttatgcggaggttgaattcagcggacttgaagtgtcggcatacgaaagccagggaaaaacacaaatcagcgcaaaggctacaggtatttcattggttaataaaaagccataatgctgtgcggcgctgtaatgccgacaggggaacagaatatttttgccttagtaaaaatattccccggcggcagcgcagcgtcgcacttccataagggcaagtattacccttatggaagcataagtagcagtagcaatgaaaggaggaatttcatatggcttctaatccgcaatcacgcaaatggacgcttacaatcaataatccgcaggactgcgggcttgaccgtgacggtattcgcaaaattttaaacctgttttgtccggattattactgtttggcggacgaaacggcaacaacgggaacatttcatacccatatttttatttactctaaatcccctattcgcttttcaactgttaaaaaccgttttcccaccgcacacatagaaaaggcattcggcagcgcaaaggaaaaccgcgactatatacgcaaagagggcaaatgggcggacgataaaaagagtgaaacctcacacaagggcagcttttacgaattcggaaatataccgaatgaatgtgaggagcgcgacccgaaaatgtataagctgctttgcaatgtaaaggacggtttatcaacgacagaaataatagacgaaacaccctcttttgcctttaagctaaaggatatagatattttgcgcgaggcatatctttcggagcgctaccgttccgaaaacagagagcttaccgttacatatctgttcggagcgtctggcacgggaaaaacaagcggtatatataaaaagcaccccgcaagcgaaatatgcagaattaccgattacaacgggaaaaacggtgtacggtttgattcgtaccacgggcaggatatattggtttttgaagaatttaattctcaaataccgatagaaacaatgcttaattatcttgacatatatccgcttacactaccggcacggtattccgaccgcaccgcgtgttatacaaaggtgtatataacctctaacctgcccttaaacgagcaatatattgatgtcaagcacaatcaccccgaaacatggaaagcgtttatacgccgtattcaccgcgttttcttttataaagccggcgggcaggcggaagaaatttatttcaggtgaggagggtttctatgcctgataatgataaggaacggctgaaaaaacagacgcaaaagcggtatttattgcttcgtattaaaaacggatatgattttgtaagaggaaataaatcggggagatatattgttttggcggtttatgccgctgttataatattttggcttttctgcaaaagttactttgatattgaaaagacggaccttatctcccctgcatttatcgccttgctaaagcttttctttcccttaatgattattgccgtcgcacctgccgtgcttatactgctcggaactcctgccggcagcgaaaccgtttcaaacgggttaaaacgaatcggttttacaaacagcgccggagaaatacctatgcttatttcaaaggaaacggacggaaaagacaattcggtaaccgtatatcggttttacggtgtaggtataccgcttaaagaatgggaagacaaacggcaaaaaatagaggcggcgctcaatttgaatatagcaaatctgaaagagggcagcgataaacaggaaattatgctttatgcggttcaggcggatacttcccttttaaagcgtattgtgtggaacgacaattatcttgcaggcagtaattccgtgctcgtgctcggtaaaagtcttttgggtacggtcacggtggatctgaaaaaaatacctcacattttactcggcggctcgacaggcagcggtaaaagcgttctgttaaagctattgcttatgcaggcattaaagaaaaatatgtcggtcaacatagcggattttaagggcggagtagattttccctccgtttggcaggataactgcaaaatgtgttttgatgaaaatgagcttataacgctgctgaccgggcttgcagatgaattgcagcggcgaaaagtcttacttcgtgaaaataattgccgaaatatagacgaatactgccgagaaacaggaaaagaactgaaacgctgtatatttgcctgtgatgaaattgccgaggtactcgataaaaccggacttacaaaagaacagaaagagcgggtaagcttaatagaaagtaagctatccgtaatagccagacaggggcgggcgttcggtattcatctgatacttgcaacgcaaagacctgacgccgccattctttcagggcagatacgaaacaatattgattgccgcatttgcggcagagccgataacatactgtcacagattatactcgacagtaccgcagcagcagagcaaatacccaaagataccgcaggcagatttatcttatatgacggtacggttttccaggcatattattttgaagattgacggaaaggagtgtgtttgaatgcaacaaaacaatgtaggcataccgcttaatttaaagcttacaatgaccgtaaaggaagccgcagagtacagcaatataggtattaaccgcattgaccgtatgctgcggagtccgaattgtccgttcgtgttatatgtaggaacaaaaaagcttgttaaacgcaaggaatttgagcaattcatcagcaataaattaacaatttaatacggtcatattaattttatatgttttatattgaaaaaacagggctgatgcattataatataatagttgcattggctctttttctgattgtgaaaaggagttgatataatgggtaaaagccttaaaggaaaagaaataggaaaaggtatttgccaaagaaaggacggattatataccgcaagatttgttgacagaacaggtaaaagacacgaaaaatgtttttcgcttcttccggaagctcgcaactggttagaggactcaaaatacgcagataagcacggcaatatttttgccccgtcaagtatgacagttgatgaatggtttgaatattggataaataatattgtgggtgatttagccccaaacaccgtaagaaattaccgcgaacggtataaattcaatatacagcccgttatcggcaaaatgcttttagccgatgttaagcctatgcactgcaaattggtattaaacaaaatggatagcgattacgcaggctcgacaataaggcaaacttatatttgtatgggaactatgcttaaatccgcattgatgaacgatataattgaaaagcaccctatgaacggcgtaaggtacaccaagcctgtgcgtgaagtaaacgatattaaatatcttacagtaagcgaacagcataaatttttagaagccgcaaaacgctcgcacaattatgcgcaatattcgcttattctcgaaacaggacttcgcacgggcgaattgattggtctgacatgggacgctatcaattggaaaaagcggactttaaccgttaataaaactttagaatacaggcacggtcaaggctgttggagagcaggaccgccgaaaacaccgcaaagctaccgcactattccgttaaccgataaagcttacgaaattctaaaggacatttacaagaccgcaaaaactcgcaagacctccgaaacgctttcgcagacattggagtttattgacaggcataccggggcgaaatcttttcttgaaatgaaagaccttgtatttataaattggagaacgggcgaacccacaaaaaacagctcgtacgacacacatctgtacaaattgtgcgacgaggcaggcattaaacgcttttgtatgcacgctttacgccatacatacgcaacacgggcgatagaaagcggtatgcagccgaaggttttacaaaggcttttgggacattcaagtcttcaaatgactatggacagatatgtgcatgtgaccgaggattcttttgtaaacgccgttcatcaatttgaaagctattcatttctgcaaaatggtgtagaaatggtgtagtcgggcaaataaaaatgccccgaacactaataaaataaggagatatgggaataaatgaaattaggaatggtagggctgccgaatgtaggcaaatcgacccttttcaacgcaataacaaacgcgggggcgcaatcggcgaattaccccttttgcacaatagagccgaatgtgggaatggtaagcgtgccggacgagcggcttgaaaaattagcggagatatataacccggacaagtttacccctgcggttattgaatttgtggatattgcggggcttgtaaagggcgcttcaaagggcgaggggcttggcaataagttcctttccaacatacgcgaggtggacgcgattgttcacgttgtgcgctgctttgaaagcgacgatattattcacgttgaaggctcggttgaccccgcgcgcgatattgaaactataaacttagagcttattttttcggatattgaaatggcgcagcgccgccttgataaaaccgcaaaggcgctcaaaggtgataaatcgctgcagggcgaggttgatttcttaaaaaggcttatagcccaccttgaaaacgggttacccgcccgctcggttgaaattaacgacgaaaccgagcaaaacgtgcttgacaccacggcgctgctttcggcaaagcctgtaatttacgcctgcaatatgagcgaggaggactttacctcaggcatagagtcaaacaaaaactacaacgcggtaaaggaaattgccgagcgcgaaaaggcggaaattctgccgatatgcgccgcccttgaggctgaaatttcggggctttcggatgaagaaaaggttatgttccttgaagaattggggcttgagcgctcggggcttgaccgtatgattcaaaagtgctaccaccttttggggcttatttcttaccttaccgcaggcaagcccgaggtgcgcgcctggactattaagcagggcacaaaggcgccgcaggcggcgggcaaaatacactccgactttgagcgcggctttattcgcgcagaggttataaactttgacgaatttataaacgaatgtggcggcagcattacggttgccaaggaaaagggacttgtaaggagcgagggcaaggaatatgttatgaaggacggagacattgttctcttccgttttaatgtttgattttcggagttgatattttatgggtggtttttattactacggtatagactcgctttacatttatcttgtagttccggcaattataataatgctctggtcgcagataagggtaaaaacggttttttcaaagtacagcacacatcattcgccgcttaccggagcggacgccgcgcggcgggtgcttgaagcaaacggtgtatataatgttaaaatagagcgcgtttcgggcaatcttaccgaccactacgacccgaggactaacgttatacgcctttccgattcggtttacggcgcaaacaacctttccgccgtgggcgttgccgcgcatgaggcggggcatgccgttcagtactcaaagggctatgtgcccataaaggtgcgctcggtaatactgccggtatgtaatttgggctcgcagctttcaataccgctgcttataatcgggcttatcttcgatttttattttcttgtgaagctgggcgttattttcttctgcgtggcgctgctttttcagcttttaacgctgcctattgagttcaacgcatctcaccgcgcgcttgtgacgcttgacaattcggggcttataaaggaagatgagaaaaaagcggtttgcagggtgctttccgccgcggctatgacctatgttgcggcgctgcttgtatcgcttacgcagcttatacgtcttttggcaattaccaagagaaacaggcggtaatttttactgcacggctttggctgaatagccgaaagaattatcacccataataactacgggtgataaaatgaaacagcgaaaaataagatttatgcttttttcaataggcgccgtgggctacgggcttattgaggttatgtggcgcggctacacgcactggtcaatgctgggggcgggcggtatttgctttgtgttcttcggcacaataagcgaaaagctcaaaaaagcgggacttttaataaaaggacttgtaggcagcacctttgttacgggtattgagttcattttcggcgttgtatttaatataattttaaagaagaacgtttgggattacagcaaaatgccaatgaacataggcggacagatttgtatgccctattcctgcctttgggtgcttttaagtcttgtgtgtattccgttcgcgggcaaggtaaaaaaacagttgggcaataatattattaaaaaataaggcggaaataaaagtggaatttcttcacagaacctgggcggaaattgatgttgacgcccttgtacataactttggtattattaaaaaagaggcggcgggcgctaaaataatggcggttgtaaaggctgacgcctacgggcactccgcgcgcaacgtagctcccctgcttgaggcggagggggcaaacgcttttgccgtttcaaatatagaagaggcggtaacgctgcgcggctgcggtataaccaagcctattcttattttgggctatacgcctgttagtatggcttcgcagctttatattaacgatataacccagagcgtttactcccccgaatacgccgccgcactctcaaaaaaagccacggcggataaggtaagaattaaaatacacataaaacttgatacgggtatgagccgcattgggtttgactgccgtgataattctctttcggggattgatgacgcaattgccgccgcgcggctgccgggctttgatttcggcggaattttcacgcattttgccgtttccgaccgcaccccgcaagaagaggacggctttaccgccgcgcagtattcgcgctttattgcggcaaaggagcgctttataaaggcggggcttaccccaaaaatttgccactgctgcaattcggcggctttctgccttgataccgataagcaccttgatatgtgccgcccgggcataattctttacggacttaccccgtcgtcgggcttaaagctaaaagaagattttatacccgcaatgacggtgaaatcggttgtttcaatggttaaaaccgttaaaaagggcgataccgtaagctacggcagaacctttaccgccgaaagggaaatgaaaaccgcaacagtaaccgcaggctatgccgacggctacccgcggctgctttcaaacaaaggctatgttttaataaagggcaaaaaagcccctataataggcaggatatgtatggatcagatgtcggttgacgtgacggatattgaggacgtaaagcagggcgacgaggtaattttattcggcaaggaattacccgttgaagaacttgcggatatgtgcggcaccataaattatgaaataatctgcggcatatccccgcgcgttccgcgaataataattaaaaacagtgcgatatgaaaaagtatattttaacgcttgatgaaggaacaaccagcgcccgtgccgtgctttttgataagggcggaaatgccgtgtcggctgcgcaaagggaatttaaacaaatatacccgcagcccggctttgtagagcacgaccccgtggaaatattttcggttcagtacgccgccgttactgaggctataacggcaataggcgcctctgccgatgaaattgccgccgtgggggttacaaatcagcgcgagaccacgattatatgggataaaaatacaggcgagccaatctataacgcgatagtgtggcagtgccgccgcacctccgaaatgtgcgataggctgcgggcagacggcttggaggaatatatacgcaaaacaacggggctgcgtattgacgcgtatttcagcgccaccaaaattaaatggatacttgataacgtgcccggcgcacgcgacagagccgaaaacggcgagctgcttttcggcacggttgatacatggcttatatggaagctctcgggcggcaaaattcacgttaccgaccgcacaaacgccgcaagaacaatgctttacgatatacacgcgctcaagtgggataaaaaactgcttgaaatactgcaaattcccgcgtgtattctgcctgaggtgcgcccaagcagtgaaatttacggcaatgtaaatattttaggcgcggaaatacccgtttcgggcattgcgggcgaccagcaggcggcgcttttcgggcaaaaatgcttttgcgagggcgatattaaaaatacctacggcacgggctgctttttgcttatgaatacgggtgccgccgcgtttgaaagcaaaaacgggcttataaccaccattgccgccgacgcgggagataatatatgctacgcgcttgagggcagcgtgtttgtgggcggcgcggtcattcagtggctgcgcgacgaattggggcttatagccactgctgccgaaagcgaaaaagcggcgctttccgttcccgattcgtcgggagtttacattgtccccgcctttgcggggcttggcgcgccctactgggatatgtacgcccgcggcacaatttgcgggcttacgcgcggcagcggcaaaaaccacataataagggcttgtcttgaagccatagcctaccaaaccaacgaccttataatcgcgcttaaggcggacacggggctacccattaattatataagagcggacggcggagctgccgcaaataactttttaatgcagtttcaggcggatatttcggatgtaggggttataagacccgtgcagaccgaggctaccgccgcgggggcggcttatcttgcggggcttgccgtgggcttttggaaaaataaaaacgagatacttcgcctgcccgataagcaaaccgagtttaaacccgcaattacggcaaaacgccgcgaagcgctgacggacggctggaaacgcgccgtgcgcagcaccaaagccttttaaggaggaagatttatgcattacgagcttaaagcaatagaggtgcccggcaccgataatattcacacgcttaaaggcagaatttatatacccgaaggcgaaataaagggcattttccacattgttcacggtatgtgtgaatatatagcgcgctacgaccatattttcgcatttttggctgaaaagggctatgtttgctgcggctatgataatttaggtcacggcgaaacggcaaaaaataaagatgaattaggctttatagcccaccgcaacggctggaaataccttgtgaacgacgttaaagcctttgaggacgcggtgagaaaaatgttccccgataaaccgctttaccttatggggcactccatgggctcgtttatttcccgtatagccgccgaaaattacggcgacggaattgaaaaattcataatatgcggaacgggcggacccaatgccgcagcacccttcgggctgctgctgaccgacataatgcagctgttttgcggggaaaagcaccgctctaagcttataaacaatatcgccttcggcgcatataacaagcgctttgagggggaaagcgagtacgattgggtcacctccgaccgcgaggttaccgcaaaatatgcggcagacgaatactgcacctttaagtttaccgtgtccgccatgcacgaccttgtaaagctgaatcagctcagcaatcgcggcgcctggtttaaaaatatgcgcaaaaatctccctgtactcttaatttcgggcacgcacgaccccgttggaaattacggaaagggcgttaaaacggtttataaaaagcttaaagccgcaggtatgaaagatgttagtataaagctttatgaaaactgccgccacgaaatacacaacgatatttgcaggcaggacgttatgaacgatattttggagtttatagaaaaataaaacgaggtataatttatgaaaaagcgaattttccctatttgcctttcatttttaatttcagccgcgtttttggctgtgggtatttactttacctactgctttgtaaagcatcccgcacggaattttgcaattttagcaatactgcccgctgttatatccgcag

SEQ ID NO: 3443 - DNA, 5276 bp, Unknown
  16S sequences of unknown bacteria
gaacgtataaaacttttcccgcacttctcccccgcgtaagtataagccgcgcaggcgttcagacttttgtcctgcacaactactttttcacctttcagctccttcaccttccgcgcgatctggcgttcggacaggcggaagtcctgcgcgaatctccggaagctcgaacggcaaacgctgtcctgcttattggaaatattcgagaacgtgaaaattttgccgaggatcagaagcgccgcggcggtaagtcccttcgataaaaactcatacgggattcgtatgtaattgttattttcctttaccgcttccgccatttcttaaccttcctttgtcctaaacttcgttacacagcaatcccggctgcctatgccttgtcagactcgacgtcaaaaagcgacagctgccgcgggatattcaaaggcgtgtccttgtatataaagagtttttccgtaaccgtcagtttacgcgttttatccgcgtctatcgtgcgggagaggcctttctcccaaacacttataaaatcgggcggcgcctgctgttcgctgatgagtaccgtatgcctggtcttggatagttccctcatatattcccaaaacgccgcgtgatcgaatttccctgtcgtgtagcccgtcgtgccctgatagggcggatcggcgtaaatcaccgaccgcggcgggatctccacttcccgataatccccgcagagaaattccgcgtttttcagcgttgccatatctttgagcagcgatctcttgctctgcgctgcataattcgtattttccgcgcttctggcgtaacaacaaaaaaactttcccccgaagctgcacccgaagccgacaaatcccgtaagcgcgggatccgcgtccttattcgctttgattgcggcgtattcttcttccgtcacgacatcgggcggctcgtaaccttgctgtacggcgcgaagcagcgcgataaggtatgtatgcttatcattcaggatcatgcggtcaaatccctggactttcgactcgatagcgcacgagccgcaaaacaagctgataaacgcccccccccgcagatttgacaggagttccgctatctcccgcgctatccgactttttccgccgaggtatcgcattgatcagccccgcgacggcgtttgcgattttgcttttcccgccgagatattgcatgtctgctccgttcttttcatctattctcctaattcaccaagacagcgtttgggatcgacaattttccgttttctattttgagtatccgatttttaatcatgcgattgatcgccttgcgcacggtgtcacgatccatattcaacgattttgcaatcgtcttgtaatcgacgaaagcggccgaatccgcgccgaggtgcagagaaatgacgcgcaggatctgcgccgacgtcgcgtcgattttcgttaaattttcgattttgatcgcccttgtcattttttctcctcacttttcccctgcgccgagggtcgccccctcgtcggcggacgcaaagcgccgccttctgcgggggaaaggggtacggcgcgccgcggctgaattttaacctccccgcccgcatgacgttgcccggcgccgtgttcggtctgcccgtcggctctgcggccgtcttctcccgccccacggtgcgggtgcatacgtccgcagttccgccggtctgcccggccccgtcttttctccgggcaacgtttacctgttcgggtttatctggctccgccggctcacttacttcctttgcgccttcggcgcggctgaataagtgagattgcccgcgcctgggccgccgcgcttttgccccgctccgtgtttacgttcgtcgcatacctgccccttccgttttattttcggggcatacgctttattattgttttttgtcaccgcctttgccggggtattcccgcttttgccatacctgctttacgccgactttttcgcggtagatcttacgcttaattgcctctatgctgttatcctcgaatgcctcgaaaatctgatcgtaaaaatggcttttcactttcttcatttcctcgcagctcgggtgcagatccgcgtaacattcgaaatcgtttaagccgtactttgagcgcagcgccttcttgtcgtaaaattctttgattccgtccgttgcaaaccgcgccgcatagtcctttttcgtagagagataatattttcctttatccgtcagcttctcgtccgtcattccgttcgacactcgcagcgtcgaggtatatatcgaatactgattgaagatccgtacatagtggttattgatcggactgtatagctttttgagcagatacacaaacagcgtattgtccccgcgtaaatttcggatattataatagaccttatcgaaaagctttgtcgttatcagatatacggcctcctctatcgcaaagcccggcatgacgatctttgcctccgacgtctttttgatcaggataatgtcgcaaaggtctttgtcgtccgcggccagagaatccggccgctggtcgtctaacagcattctgaaataggtatagttgtctatcgtcgccgcgtggccgtgcatttttacgtccagctcgaaaagatcgttgtgttggttacagtccggggaatcctttttccccgttctcgtgtgttgattcccgcgttctttcgcgtgttccatttccgccgcgacgccgatctcgaacccgtctttatacggatcgttttcgcctttcagcttccccagccgcatggcgttataatccagaatgtgacagtattcttttttcagttcctttgcgctgcggctgaaaaaatcgtcgtcaaagagcggaaaattcccgttgtctattctttgggtatcggtgcggatcgcgtaatttgccacgatcaacggcgtaggcgccgcgtagatccaatagctctgcgcatagttttccaggctttcgaagatgtccaatatatacagattgttgtcgtatgtaaggccataacgcgtataatcgtaaccgaaaataaaatcgtcgaagttatatccgtatcgctcttttaacattttcatggcccgcttccgcgttccgcccggccattcgtaaaaccccgctttcaagtatcggataaatctccttacccttgccagcgtgggcaaggatccgttcccaattccgtactctattaccttttccagattgatccaaggaaagaacggaaactgtaaatcccgctcccgcagcttttctttcgccttttcacgaaatacgaccgcctgcgaaatcgccatgctcgtgattgtcgtcgtctttttcgcacgctgtttcccgaccacaaacagcgcccccgggtgcgtttccaaaaacgcgcggtctttcgcctcatagctttgcaacgctttcagaccccgccctttccggatatgatcgaaaagcagccaaccgaacaccacccacgcccaccagggcaaaaactcgatcggcaccgtcagatccagggaaagctttgcgatttgcgtgtagatatgcagcacgtcgaagctcaccgcaaaataaaaaatatacgcaaaaacttccactaaaattgtgatcgcgttcagattatacgtccacagcagcccggccgccaagcaatagattttccgatcccgtaaaaaattgatatatcccgaaacaaaatacttgactttattccaggtcgccgcctcgatttttttatagatccgcagcggctttgtgtccgcgttatagttattatttgtccgcccgtatgcgttctttatcacgaaatacaacaatacaaacaccggaagaagcaggatcaacactttcgcagcgctcgaaatcgtctgcgcgagtttcatcagaaacgaaagcgcattgtctttatcgattaaaagccggaaaaacttactcaatcccgattgaaattccgcaggttcgaacggtaagacctccgtcacgccttgggggatctgtgccaccgtcggcgtgatcacgccctcgaagcctaaaagctccgtgaaatagtaccccaccgaaagcccgaaatccttgaacgattccagcactcgccaaaatacaggacgaaaataaaacaccgagaacagcaacgaggcaagcaaaatcgacacgctcaaagcgtgatatatcttttctttaccgattctcttttcgcccgcctgcgccttattcatttcagaacacccgtttgaacgtatagactacatatagcactaccgccgcgatcaacacatacaagatgatttttaatatcaattttaggattttcaacatttttccttgacttcctccccgctttcgcgtataatggtattagtagcgtgagttccgcaagggacaaaacggcggtgagataatatcaataatctgtggtcgctcattgagaagtaacgttcccccgttacttcttatttttttgttgcggcggatattgccaaggatatttttccccgaaattctttttctcgtcatgccgtacccgtttccctatatacataggtcgcaggtctttggggttgggattcggttctaccttctcattaggactattcccgtctttttcgttgtgcatgacttttcggtatttatactcgtccgtttcacgctctttcccttgattgtctgtctttttgcctttttgctctcctacaatcaaagcggggtgattggattttttatatttccgaaaatgcgggaaattttctttctcggcggttttggatttttgcccggcattgccgggctttttagtttgtttgccggcgccggcttttttcgtcggcttcaccgcggtttgccgctgtggttttacggattttttcttacccgctgcgggtttcctcgcaacgggctttttcgcgttcttctgtttgttcattttttcgccttcgtggatcttttcttcttcgttgacgtcgttttcttcgctttcggtttctttaccgacgcggtttttcgcttcggctggatgatccccgatactgtcaaaattttatatacgcccgctataagcgccgtcaccgctaaaattatcaacgccgcgcctccgaggatcttcaaccacttcatggcattcgacccgttcagcttatcccacgtatttttaagccattccttcgcgtcgtttaatgcgttcttgattgcgctgtccgtgtcgtccgcattgtccgccccgccgttcgacagatacgggttttcgctcgtcccgtccagatagaagaaataactgtaatacatcgcgttatcgtcgtccacaagctcgcataaattcatgcacattgt

SEQ ID NO: 3444 - DNA, 23487 bp, Unknown
  16S sequences of unknown bacteria
aaaggaggaaaaaccgacgaaaaacacgttcgcgccgcgcaccttttcgctcttttccatcgccgacggcaagagcgccagaacgccgctctcgtcgagatagccgcccgacagaaaatccaggtattcgcggtagacaagggcgatatctttgagtttttccgccaagatctcgtccgcttcggggatcgcctcttccagcatttcgggcgtgacgagcgccgcgcgcaactgcgcgatggtctcgtacagccgctcggcgcagcctgcgggattctttttgaaacagcggagtctgtcgcggcagcgcgctgcgatggcgcccaccgtgatgacggagccttgtttggtgagcacccgccccgagtactcccctttcagaaagcgcgcgaacgtagtgacggaggtcgcgaaagagccgcccgtgcgggcgatcgcggcgcgttcggcttccagcgtgagcctgtcctccgcaaatatgagattgttgcgcccgtcctcgcaaacggcacccgtaagggcgtttaaaagttcgcggacgttgggcgcgagtatcattctgacgatcatagtcttcctcgtgcgtaaaaggccgctctctcgcggcgatgtttattccattataccataaattcttttgaattttaaggaaatttcatgattttgtttttacaaacgcgacaaattatggtatactgttatctgttcaatccaacaatacgctttatggagcacttttttatgaaaaagaaattgacggtactttccattctgattgcggcggtcctcgttgtatccgcctgcacaggcatggtctccacgacattgacggccaactggcacacgcgcgatatcgaatacgaccccgctttttacgaggaactcacctatgacgttgcctataacggcgacgaggcgaccacgaccgtgtacgatatgaaagatttcaagggcacgtacgtcatgaaaatttccgcgggcgaaagttatctcaccgaggacggaaaaacggtcaataatttgtataagatggaaaccgacctcagcctttcaggcacattcgcacagaagagcggaaaagacgtattcgctttttccgatctttcggtcgtttccaccgtctatttccaccgcatcggcgaaggctataacctgcagcccgtacacagcgaaacgaaatatctcgtgtacgcgccgggacagggcagcctgaacgcggtagacgtccgtattgccaaatacgacgtcgtcatcgactacaacgataactgttccgctgcgaaatacagcaagaaagaccgcagcggagaactagacgtttccattcccgacgaatggaagaacaacgtgcgcatcgaaaaagccaacgacgtcgaaaatcagagtttttccaagttacagaatagttactctttcttcgacaacgcgcagttatattttgcagcgcgcggcatggctttcgcgcaaaactcttcctttacggtgaacaccatcgtccccaacgccaataagacggcgaaactgcaattctcctgctcttccgtttcctcccgcaaatatgcgtttacgatggacggcaaggaagtgaacgaagatatttcttccgcagaagtgagcatgggcctgagcgagggcaattcatcgggcagttccgtcaaactttatcttgcgaccaaggcggaaggactttccaacacttaccgcaacctgccgttgcagatcgaagaaccctactctttcgggctgggaaaaatggtgtattctttgaaaaacgtttccaccgtccgccccgcataaaaaacgaaatttaacccccgccgcagttttgcggcgggggtttttaaagttttcgacccgttattaaaatagaataagtgatattcatccaccttaaatgtactgttttaacgcctctacggaagcttggtcaggaacggtaaaggtatcggcgacaaatgcgcaattttgatccgagcggtcgcgctttaacaaaaggtagtctcccagcatatgcaccgttcggttttgacgccgttcggaaaaagccgtaaatcgttcttcgatatgtacttcttcctcaatgttttcaaattcgagcatcccgttcttcaattctcccgccgaacaacgaaccttacaatgcgaaggtacataaatacaaaggtgagaaattctatggtgaggcttgatgtcgaggattcgaccttcattatgctccgtaacgcttaaagacaattcctcactttccatttcaaaaggtaaaagaacatatgatgtaccgttcctctttatgatgccgtactcacagagttcataaaagcattctgctatacgcattgtacagcaaaaaaaagcctcataaatgtagctgtgcagacaatcgttcttttcattcaaacaagtttcacacccggctccgccgttcggcctttgcgatacgcgcaaagcattcaaataacagcgattggcaaattctatatatctcctctctcccgttatttcaaacagctgcatggcaaatatcaaggaatctacgacggcacaggtttccgtccaataaggcttgccgaaccagttaaaatttgcataattaagcgtcattccgtagttgaagtacagctcgaaattgcgtttcgccaggtccaaaagctcttgctcgcccgtcaaccgataaaagcgaagaaccccgcgggaacccgatagggttgcgtgcgtctgacagttatatctcacataatcaatttgagaaaattttgaaatcatagctcggatgacgggtagcaacgccttatttcctgtgatttcataagtatgagtaataccgtccaacaaaataaacgcgcagcccacatcgctggaaagccgccatccttcggtcacgatcttctgtaaatggccgcctacatccccctcctcgcgcttgaccgtaggataacgcagataagacggtgcaagttttgtcaaatacctctctgagatacggttcagccttgcgagtacctcctctctcccaacgatctcatacacagcacacaagccccgcaaaaaccaactgttgccagaaagctgttgctcgtttactgaattttcgtcaaacaattcgccgaaataaccgtcttcattggtgtgttcatcgagagaatctaaaatatcatcaagctgatgcaggatattctgtttttccctctcgccgtcttctgcccgataaagcgatgcgagcgcaagaatcgttctgccttgccaatcacccggccaatcccctccctcgagaaaaatctgaggggcacaatattcgggcgccgacaaccgttctctgtttttgcgtattctgttttttaactgtccgtaaacttttttcattctgtttattatgccgttccgcagaatcctctgcggaacggcccacctttttatttaatttcgatcaattcaatcgttaccgaagctacatatacattggcggaagcgccgcccgctacatacaggctgaagaaatcgatcaaaccttcattggtgatcgaaacggtttgcagtcctgttttttcggtcaatacggggaatttttgattatcgaagtttgccatcaggctacccgttaccgtttcgacgtacatcgtaaacgtaattttgtagatgcatcccgtttcgcaaattttattcagacggaacatttcgcctgtcttattgtccgatttattgaactgcaaggcgctatcggtaaaaccttccttttcggataacttggttccgtcggaaagagttatttccgacggaacaacgttggatacgttgttgaaatcgcccggcttgtctttcgcggtaagtgtccacgtatgccccacggcatagccgttcggcgttttctgcgccgtttcgtgagcagatctgctgatggtcacatctccaatgaatacagtattctgatttccgctgtatagacctagatttatattttttgcatttccctgcaccttaagcgtccaggtatgcacacctgccttacactgatcgcctgatagttgtcccaaagaatttccgccaacctgcatgttcgcatccgtactctgccaccaatgccagccgctgatatccgcgggcagatacactttcagcgtgagggtgtaatcgtaagcaggatcgatacagagatctttcacagagaggaaacctgtctgttgtcccgtagtgaatacaaccgtagaaccattaaatccattttcaggagtgatatttttgaactgctcctccgtaagatatttaccgccgacgagcttatctttttgcaaatagatcgctccggaagaaccgatcacatcggaatagttgtcgtcgtcacctgtaaaggtatgaccgctaccgtcgagatcgtccgccgtgatcgttttggcgggctgtgtgcggataacggtggcgtcttctactacttcgcgcgtcaagctgatgttatccatcgccaggcgcaggccgttgtattggaaagaggtattgcctgtatatgtgaagaatcccatataccaaggcttgcttgtatcaaataccttgatcgcagaatattcgatatgcgtgacatctccgttcgtttttacctcataaggaataccctgagcctcagtctggccttcctgtacaaagaagagataaattttgttatcgggaagatttccttcgatgaccttcacgtccaagctgaccgtccatttgccggtcttgatataatcttgtaccgcaccaaaataaaatttagtatccgaagtagcaacgcagttttcgtaatcgagaataagcgaattgcccgcgatcgcatcttctccgccactgatcgaggcgggaacgatggtatcataagtcagacctttggcaaacgagccgttatagccctcttcaaagttttcggtaaactttacgttatcttttgccagattggaaatatcattttccccttccgaaagtacggtttcagcctttgcaggcgttactgtaacgtcgatgaactgttcgtcgtaattttctgctttatcttcgacataataagaaattttatgctcacccgcaacttgggctttaaatgtatagtttccgttctcccctttcttcagctcaacgccgcgcggagaagtcgccatacctacttcgacagcggaagtcaaatcgccgtcggtatcatcggatgcagttacggttggcaatgtcaagctctctcccaccttaacgatacgctctttttctttatcctggatggtaattaccggagccgtagtatcggcaggtttttcagcttctttcaccgtaacaacaacgctcttttccgctgagcccgcttcatttaccgctttgactgtcagtgtgtagatccctgtttctgtcgcagtaaattcccggctcgtctcgttatatcggccgctttctttaccgcttttttccgttacggtcaccgtgacggtttcggcatgatcaacggtatattcaagcacatacttttcgccgatcccgatggtctgttctttgctggtgatcgtcaaggtcggcttttcagccgaccctttgtcgccgcaggcgacaaaagaaaacacaaaaacaaagcacaggattgcagagagcaacatcttaattttggttctcataattttctcctctcaattttatttttgcccgttcttaaaattgaactgaggcattttttctgttttagttttatagttttcaacaaagtgcggcacatttcccacctgaaggcgtttacggttgagctcgtcgcggtccgcgtctgcaaatataaacgccatggcgacgggcttaccttcatcaatacaggtcttcattccgtctgccaacgtaaacggtataaaaatctcaccgctataaccgtcggaaactgttttgacagcaacccgcatctgcgcttttccgtcgataaacttatccgaagtacgactgttgccgaaagtaaaacctcctgcccaggtaggagcgaatgccatttgcaaaacatctcctttgttgcgatataattgcatatccgcgttgggcatatcaatgacggtgctcatgaaaatttccacacagtctccgttccagaaatcgagcacggaagcataatcaggcttattatcacgcaccttaaagccgaaataaagtccttcgtccgtccatgcaatgcgtgcgacttccaccccgaaaacatcggcataatcagcaggattgatctcatcgcctgttgcaagagacgaaccgttcatttcgattgccgttccgacgtcattccaatctgaaatatcaccatcaattttaataacatccttatccagcttgaaaacgtcgatttgcggtacttctccgtcatattccttatagcgtagattatagttatcctttaagacgatcgtctttgtatcggtcgtgcctgcggtattgatcccgacaaaggtttccgaaccgagcgtattatagttataattattcaccaactcgatttcgtttacgttttccaattctaccgcgcattctgtcatctctgaggcagatacgcgccccgtattgtaaaacaaattactggaaatcgcactatccggagcacctacgccgcgcagtgatatacccgcgttgcctgaattggaaataaaattattttcaatcgaaatgccgctgacagtgcccgaaggagcaacgatccctccctccgcgatggcaaatacagcaatgcttccgcggagagcattgtaaagcagatagccattattgatgagcttgttgttgcgtacagcaatatccgaaggcattgtagcttcgttgaaaatatccagactggaatggatcatgatcgctccctgccctacgttttcaaaggtattgttttcaacaacggagcctggtatctgcaccaagataccgcggttacgcttattgcgcacgatattatcggaaaaggtaaagcggggcactgcggaaacattcgtaacgacacactttgtccaatccacatcgccttttatacgttccttgaccgtaaccacatagctggcgccctccgccaccgctgactcgacagtaaagctgccgcgttcggcaaaatcagtctgtgcatagacctttaacgtttcgccggctttcggcaaggcgatagcgccggtctttttggaaatcgtcagcgtacgggcaacaggatcgaccgtattcagcgagtaataataacccgatttgatgttgagcgcgtcatcatgggtgttttcaatgatgctgtttgtaatctttacttctccgagacaagcttggagatgatacccgtctgccgtcgccgtcatgatacggtcatctttcaaagcgacgtcaaagcggttcgcataaaaattttcgacgccgctcacggtgatcgccatacctggacaggtgtaaacagcgcaattctctacatatacatccttacaatcgctaaaatttatgccattttttccgtacatggcaaaacctaaagcgacaatatcgccgtttctgggtttcgtaaaggaactgcgatacgactctttaaattttaccgtcacagtcgcaggagctgaaaaggtaacgctttcgaaaacattttcatcccttatcaggaacgcgccgccttccttcggagcagaggtatactgatcgtattcgatataagaatacagcgttcccccgagcgcctggctggatgaaagcgcagccaggctcgcctgctgagtttcaggtacggtcatcgtaacggtaagagcgtctttgtcggaagcttttactgtacctgcaagcgcgggaagcaccgaataatccaaacgcacattttccaaatgcagatcggtacagtctgtaaaagataagcctcccagccatgaagaacccgtattgatggtcaaaacagtattctcgcccccttggatatataacccgtcaaaaccggcgacagaaagagtataggtggtatcggcaaggcccgaactgttacggtcgatatttaaatcacgatcgggtaatttaatcttgaccttaccgccattcttctgaaagtctttcgcatcgtttattacggcagtcagcgcctctgtatccgatttcccttttgagatgtaatcttcaacatcaaatatggcatcctcgctgaattgcgaatcggcggggatctcgtacatgcctttcgaccttccctcctttcgtacgccaacattggccggatcagaaagaccgtaactgtccgtcaagttttctactgtatactcgtcctccgacaatgatttgacataatcggcaatttccattttttgtaccggcggtttcggcgtaggcgggtcttcttcctgtttatctcttccgcacgcaacgaatgaaaatgcaagcgcagtcactaatccaaaacagatgacggtccgcaaccattttctatttaacttcatacctttccctccagaatgtattcgatattaccggttgcctcagtcccctccgctgccgatttatacagaagcgcaaagccctcgatggcagacggcaaatatgcaaaattatcgcagacatacgcgttcctgtcggtgaccaaagaaatcattgcgcgttgtgcatcattcacggcactgcggcagatatcataggcaagattattttttgcgacacagtcgcctgtcccgcagaaatatacggcacctgccgccgaacggctgaaatagttattttcaacttcaatcgctcgtacggtatttgcgagtactgttccgccgtttcggaacgcagatacatccgccgacagtccgtgtgccgtattattatcgaaaaatttgcaatttctcacagtaattgaacgggggataatcgcctcggcaaaaatgtcgaaagatgcgttcatcataatcggaccatgtaatacattatagaaagcacagttcacgatttctgaattccggacttgcgccaaaattccgcggttgcgcttatttcggatgatacaattttcaactttcaatgcagggacacgagtagtattacctaccaagcaacccgaaatatcctcacggatacgcttatccaccgtcagatcataagaaaggcccaaagcagtaaccttgacgaccgtatacgtttctatcagttccatactttgcgggtcgtaaatttcaatcacatccccttccatgatgggataatttgtcgtagcggaagaagctccgcagaccaatgtatttcctgcgtatgaacttaccgtattgtaaaaggaacaaatattcatcgcgtcgtcgtgtgacgcctcgtatagactgttcgtaacgatcatatcgccataacatccgttcgcgtgcagaccatcagccgtagacgtcatcagacgttcggagccttcccgcagccgcaaattggttctgttcatgtacagatctttaacgttataggtcacgaaagtcatgcccaaagaagcgtaaacgtcattgctttccatatagactttctcgcatgactgaaacataaacatgccatattcgtacatcgtgtaggacacggaaactttcgttccttcgtccggcgcgcggtatccgctgtcggcgctgaacgcaatcgtcaacgtgtgcgctgccggatcgtaggaaccaccgacaaggttttccaccctgtcgcccgtggaattgtaacggagcataccatctttatcgggaatatatgcgccataagtttcatcccacacatattccatatagctgccatacttcacttttccgccgttgaaacggctgtcggacatatcaaattcttcaccgagtttcaaagtgaccgatcgttttgcctcgtcggtagatatgacagttcccgtgaccgtagatgcagggtgataatcgaattcaaatccgtttatatggaaattcttgcagtttcggatatccatagcgctcgtccactcggtcatccgccattcggcatcctctcccaccacgtacagatcctcgatgtcggcaaagtttaccgttgcatggaacagatagacgccttgcgggaagcgcagaaacttaagcccttccacgttcttgatttgcttcagaagaatattgagcgcgggagcgttgtccttattttcgggaaatattccgtactcacgtacatcgtatacggcgacaaaatcctcttcgtcaggaacgggatacagcacttcgttttcaaaccgatcccgatctacgcccacggcatttgcatcggataagcccataaattccttttccttgctgtcggccggaaacgaacggttgtaaatatccctctccagcgcatcgatcacctgttctttttccaaaagcgtcacttccttttgcggcgggtcttctttttgtgtatccttactttcacagccgaacaatgataaaaacaaagtaaggcttatcagtaccgcgaataattttttaaaaaacgatttcattttctttccccctgcaaattattttttattgcgggcaaaggcatcgttatagcatcgaatcaactcttcgctgcggtaactcttcaaatcggactgaaaagagttccagtctgagtctttgaacgggtcgttatctcccatgacaaagaggcactccgcatttttcagatacacatccaacgaagcattgatcgtttcgatcttgttatattcttcctctatcattttcaaatcgtcaggaacgatctgtttcaagtagggagcataacgttcggacatgcggttaagcgctgtgatgatatcgtcattcattttgccgacgaaatcatacttccaataaagcgcggaagcggtacccacattgggagtaatcgtcgcacggtaatcctcctgcgatccagtccaatcatcgggcactaaaaatgtccaagacgtcttatcttcatcgtcccatttccaatccaccccttcttcgccatacgcgatcagctggcagccgatatccgaatacatgatatcaagcaaccgtgcgacctctcgaacctttgaagttccggtggggataacggcacctgtgggcgaaaaattagcaaagccccattggatgggatctccggtataatagtcactcgtcaaaggcccgaacatttcatactcgtcctcgtaatcataaccgaccgtgatatacgcagcggcggaacagaaagaaccaaggcggtgctccaatcccttctgtgcgagttgcgcgtccgtctttatcgaaaatgtagatttatccaataagccttccgagaacatgatattcatcgtctgtaaatacttacggtatgcctcggtggagggaacataagtcatctttgagccgtccgactcctgctcggcgccgccgtacacatatccgtaggaagctaaaataaagttcctcaggtattccaattctttggcagatacaggcacctcatcatttggatcgccgttacggtttacgtcatattttttgaacaagcgcaggatatcgacgtattcctccaccgttttaatatcggtcgcatccggaatttcggccgctgttttaaaagatgtcacgttggaaggtatttcaacatcgtcttcacgtaaattttcgatccactgctgattgatatacatcttgaacgtcaaatccctcggcacatcgttgacgcaaagagtagaatacatcataccgtcactgaaagtcgcgaccttgcgcgcggaatacggagaatcaatattaaaattttcatccagcaactttttgtaggtgggcatatagttgtcgatcaggctcccgacctcaataccgtttacgaccagatcgctatcgttgaacggaacgacagcgccgtactgcgaatagatgacttgttcggatacgggattattgaaaaggaataaatccggcaaacttttcttatcttcccatgcggcgctgcgcagctgagagtatgctgccgtatccgcttccgtaaatataaatcgaagattggtcatttcctcgagtttctgaaacattttcaagtttttaaaggacggattcagggcgcttttgggaacgaaaattttgattgttatcggctcagccacgatctgatagggattttctgccgttccgttcggtaaaaaattattaggatcgtaattttccgatctaccgcacgccgtaaggccaagtactgcggatagcgaaacagctagtgccagaagaactgtaactaattttttcataaaacttgtctcctttattgtttaaccttttacgccgccgatcataatacccttttcaaaatacttttcaaaaaacggatagataagaaggattggtgcgctcgccaccacgatcgtaacatatttgagcgtttccgccatcattgcctgctctccgccgccgatccctccaacgctgctttcgctactgacgaggatcccctgcagcacacgctgtagcggaaacagcttttcgtcggttaaatacatgagagaattaaaataactgttccaatatcctacgatcgcatacaatgtcataactgcaaggataggtttgcacaaaggtattacgacagacaagaatatgcgcaaattcccacagccgtcgatttgcgcagcctcctgcaattcgttagggatcgtcgaagtaatgtaagtccgtataatgattatattaaaaacgcctacgcagccgggaataatcatcgcccatatagtattcagcattcccagggctttgacaaccaaaaaagtcggaataagtccaccctggataaacattgtcaacacgaaaaacatgctgaaaaacgtacgcccccgaaaatccttccgcgaaagaggatatgcagcggtaaactgaagcacaagctgaataaccgtgccgatcgccgtatacaacagcgtgttcgcataaccgcgccaaatgctagtttcctgcaaaactttttcataattatcgaacgtccagccgcgaggccaaatgccgacactgcctttattgacaaagtctgaggaggaaaaagaattagccagcacatgcaacagcggaaagagcgtgatcaatgcataaattcccatgatcaccatgatcgcaatattaaaaattttgtctttccctctattttcaaccatatgaatcctcctttaccatagtgatgttgcactaacttttctagatatgaagttcgctgttatcaaaagaataatattgatgaccgaattgaaaagtccgatcgctgttgcataactgtactgcggtatctttgccatgagcgatacgcgataaacataggtcgaaatgatctccgaggtcgtgagattcgcacttgtctgcatgagatagaccttttcaaagccgacactcagcatattcccaaggctcatgataaacatgatgatcgccatgggtaagatcacaggtacattgacgtaccaaattcgcttcagacgccctgcgccatccagaaccgctgcctcgtgtaaactctgatcaacattggcaagtgtgccgatatatatgatcgcccaccagccaagtccctgccaaagcccgctgacgacgtatatcgtagggaaccaaaaggctgattccatcagattaatcgcctctatgccgaatatagcacctatggaatttaggatgccgctttccacatcgcagaaggaaaacaacatgcctactacgactacagtcgaaataaaatatggtgcataagagatcgtctgcaccgtttttttaaaaattttactacgtatttcattgataaaaagcgccaagatgatgggcagcactgtatttaagacgatcgagtagacactcagtatcagcgtatttcgcataatgagccaaaagttcgggagttttataaacgtaataaaatgctcgaatcccatcattcccgcccagggacttccaaaaatcccctgataggaattgtaatctttaaatgctatgaataatccgaatatcggcatataatgtaacaggatgacataaatgaccgccggcataatcaaaagatatagcgacaaattcttttttcccgacaaaatattttttttcgaaattctgttcttttttaaacgaagggaccttatcattcggttatcctcttgcgaaaaattttgattttattataaagggcatatagtgattaatcaatacaatatattttgtcaaaaatacactttttttacttttatccaaataatcacgataatttcgcatttttattttaaatttttttctctacgatgttttttatttacgaaagcaaaaaaatatagtatactgtctccatgaaaaaagacaaacctttcatgaaaaataatgtattttttgcgtatatcagtcaccctgtagaattcagtatatttcccttcattttgggctacgaacgttgttcacaaaataaggacagcatcggtccgcaaaaaaagccctgtcatttactgcattttataatccgaggcagcggctacctctctttgggaggaattgattataccattcgaaacaatcaactgttttatatcccgcccgaatgcacggcgatctatcgccccgataagagtgatccttgggaatatatgtggatcgagtttaatggttataattgcaaatatttctgtgacaaggcgcatctttcggaacaatcgcccatctacacgccattgcatcccgaaaaattctacgaattgttttcagaattattgaaacaaaatatggctggctcgccacaaagcaactccccgcgcagcatagcggctcttttaaatctgtttgcccttttgtgtgaagacagtagcggcggaccacccgaggatatctcccccgaacaagcaaagctgcagccggtgcttgacttcattcacgccaatttctgcacgccagacatttcgttgcgcgctatctccgagcagatgtttttcaacgaatcctatttgtgtcgtattttcaagcagtcagtcggtatttccccgcaaaaatatatcatcaatctgcgcatgcaaaaggcacgggaaatgttaatgcattccacattcagtatttctaatatttccctatcggtcggatataaaagcccctattatttctcgcaagaatttaagcgtatgttcaatttaactccttcgcaatacagacgaaattcctaccgaaacgcagactatacacaataaaaaagacagccccattttaaggctgtcctttttttaattatttatttacttcatcaagggagcaggcaattccgaaattatttccctttataccgaatagactgacacacttttaggaaaaacctatggaaactccgcttgcgccgttttttacttttcatagacgctgcgtttcaaaatacctatgtacggcagatttctgtaccgctcggcatagtcgagcccgtagccgatcacgaattcgtcctcgatgtcgaaccccttaaaatccgcctcgatgggcacgacgcggcgcgcgtacttatcgagcagcgcgcagatcttgacagacgcgggctttctcgaatagagcatgcgtttcaggtacgagagcgtgtagcccgaatcgatgatatcctcgacgatgacgacgtcgcgcccttcgatcttgcggtcaaggtctttgatgagtttgacttcgcccgaggatttggcacccgcgccgtaggaagagatggccataaaatccatttcgacgggaatgctcatcgcgcgaagaaggtccgcgtaaaacattacgctgccctttaaaatggaaaccatgagggggcgcttgccctcatattccttgtcgagttttacggcaagttcctgaatgcgctttttgatctgttcttccgaaatcagaatactgtcaacgtcgggatgcatgttcttttctccttattgtaaaatgatcgtataaattctgccgctgtcgcggtcgattttgactttcgcggagatctccacgccgcagacggcgtacacttcgctcccacgggcgatcagaggaatgaaatcccgttcgcgcaggggtatttttttatcgatgaaataatctttgagttttttcgtgccgccgccgaacttttcgaaatagtctccctcccgccgcgcgcgcacgacgcagcccgcgggaagtttcgccccgtcgaagcgcagaccgccgcgcaattcgccgcgcacgatcgaaagtttttttccgccgaaggaaaattcgcccgcggcaaacggatattccgccgtttccttttcgcggggacggtatacggcgatcttatcgtattcgcgcgctgccgcgagggaaaacggcagatgcaccgccgccccgtttttcgcgccgcgaagggcgtagatatcctcgcaattctgttgggtataatctttctctccgccaagataatggaacgccagcacgcaggcgcgcaaaaagagcggccgcggcagatcgtgcggaaaggtgaaaagcccttcttccctgcggcagggacgttcggcgagttcgtataaatattcgtcgtcctcgcgcgcgaggcgggaaaaggaatacacgcgctcacagcaggcgggaaaaatttctttgacagcgggaagtacgttcgcgcgtaaaaaattgcgcgtatatcgggtatccgcgttggtctcgtcctcgacgaacgggatctcattttccgcaaggtatgccgaaatttcttccttgccgataccgagcatggggcggacgatcttcccctgacgcgcggcgatgcctcccgcgcctttaagcgcgctgccgcggaacaggttgaaaagcaccgtttccgcattatcgtcggcatgatgcgccgtgcacacgagatcgacgccctttttcaaaacttccgcaaaaaacgcatagcgcagggcgcgggcgccctcttccagccccgtcttgtgctccgccgcgtacagcgggcagtttacgctcttttcgtataaaattacgcgcctcttttcgcaatacgcgcggacgaacgccgcgtcctttttcgactgctcgccgcggataccgtgttccaggtgcgcggcgcacacgtcgacggaatattccgccgcatggcgcagtaaataatcgaacagcgccatgctgtcgcccccgcccgaaagggcgacgcaaatctttttgccgcgaaagggtccgagatcgattttcatacgatcagtataatataaatcgcggaataaatcaatcaaaatcgcggcggcgagccttgggaagagtgagttgataactcagcgaaagcaatttgcaaaattcttcctcgggaagaccgccttccagcataagagagatccagtgcgtcttattcatatgatagcccgccgaaatttcgggataggtgtcccgcagcatggaggcaagcagcggatcgcacttgacgttgagaacgcgcgtttccccttctccgtccaatttcagcgcgcgccgcggcgcgttcaaaagggcgccgaaccacttgccttgcgcgccgtgacggaagatcacgatggtttcgtccgcaaagggacggtcgcagaccgcgcccgccagatcgcagaccatttgcataattttctgttcctgcatagtaattctattatacattgccgccgcgccgcgcgcaatccttttgcgctacaaatttttgcgaaacgtcgaaaagaataaacttcgtagtttaacgcttgctattttacgggacgtatgatagaataaacgcataaatttttctcggaggttttatagtgggaaagaaaaaaagtctgaaaacgtacattcccggcgcgatcgcgttggttttggggatcgcggctttctgcatgatgtttctcgacgcggtaaaatattccgcggatgcgatcgttacgacggtgagttataaatactcgggcgcgcaactcgcgttcggctataaggaaacggttttaaaccaagacattaccattctgagctttaactttatggtgtttttagcgttcgttcttcctttggcgggcggtattctggggcttttaagcggaaagagtttcattttgaagatcatcgccaccgcctgctttgtcgtcggcgcggtattcctgttctcgacggcaggtttcgcgaccatcggcatgagcgactctcaggcagaagtggtaaagcacgcggacgcggctctgtgcgcaggtccgatcgtaggcggagttatcagtgttctcggcgccgtcgtatgcttcttcaaaaagtcgatcgccaaaatgtttggttgatataagttttgtacataagatgaaaaaacggagcgtatcgccttgcggtgcgctccgttttttattaaaataccgcccgctcgatgacgccgccgcccagacagcggccgccgccgtataagaccgcatactgcccttccgtcaccgcgcgctgacgctcggcgaattcgatgaacagatccccgctctcccgcacgtgcacgcggacggactgttcgctttggcggtagcggaatttcgccgtacattcgaaagtttgtttttcgggcggcgcggggatccagttcacgcccgaaacttcgcacgccgccgaatacaggcggctctcgtccccgtgcgccacgtataaaatattgtttttcaaatctttttccacgacgaaccagcggccgcccccgtcctctctctgcccgccgatatccaggcccttgcgctgaccgagcgtgtaatacatgagtcccagatgttcgcccagcactttgccgtcgtacgtcatcattttgccccgttttgcgggaagataactttttaaaaaattgcggaaattgcgctcgccgataaagcagatgcccgtactgtcctttttgtgcgcggtcgaaagcccagccctctccgcgacggcgcgcacctcgctcttttgcatctttccgagcggaaacaagacgttttgaaactgcggctgcgtgacctggttgagaaagtacgtctggtcttttcccgtatccgccgccttcagaagaaaacttttgtccccttcgtgcgcaatatcgcaataatgtcccgtggcgatataatcggcgcccagcgcgagcgcgtgctccttgaacggaccgaatttgatctcgcggttgcacagcacgtcgggattgggcgttctgcctcgctcatactcctttaaaaaataagagaacactctttcgcggtattctttcgaaaaattgaccgtatagtacggaatgccgatcaggttgctcacgcgccgcacgtcctcgtaatcctgctcggcggtgcaacagccgttttcgtcgtcctcttcccagttgaccataaaaagtccgatgacgttgtagccctgctccttcaataaaagcgccgcgaccgaactgtccacgccgccgctcattcccacgacgaccgtctttttttccatcataaaaacctctcttccgtcaaattatacccgcgtacgaaccttttgtcaatcgtttgcgatattgcagcggcgtggcgcccgtatgctttttgaacgcctcggaaaaggcggaaaaactctgaaatccgctgcgctcgaacacttctttcaccgacaacgtgctctcccgcaagagtttcgcgctcgtttcgacccgcacgcggcaaaggtaatcggaaaaccgcatgccccacacttcgtgaaaaagtttggaaaaataggcgggactgtacgaacagaatcctgcgcattcgcaaagcgacagagggcgcgtacaattctcgcgtatatactgcgaaacgggctgcgtcttcgcgagaaatcttcggttcaccgactgttttttcttgggatgataccgatacagaatggtcaggatctgcatcagtttggtcttgatcatcattttgtagccgtcctcttttctgtcgcgctcgacgccgatctgacggatgagcgaaacgatctcgtcgctgtacgcgcgggaagcgggaatgtggttttcgaatacttcgccgctgttgaaaaaactttcgatataggaaaaatccgtgtcgctcgcgccgttccacacgagatcgggcagaaaacccagaacggcgatgctcgcccgctcttttgtgccgcgcaccgagtgcggctcgacgttgttgacgagcacgatatccccggcgcccgcgcgcaccttcgtgccgtcctcgaacgaatattcgatggcgccgttccacaccagcgtgatctcgatataattgtgataatgataataggaaaaagccgtattctcgtcgtaatgaaaacggtaaaacaggaaaggaaaatcccggtccatctgaatgttttccaaaagttgttccatgattccattatatcatattttacgaaaaaattacggaattttttgattttattttttattctttgaataatttacatttttcgcgcgcaatgctatactgtttgcgaaagcatcgggaggaaaatcattatgaaagcaagcgaacggttttataatttaatgaagggaaaacccatcgaccgcctgcccgcgatcgagtgggcgccctggtggaatctgaccgtcgaccgttggagaggcgaaggactgcccgcaagcgcgcagtcggtatacgacattcagaattatttcgggcttgacaaatgctgccagacgggattcggcgagcgctccgccgcaacgccccttccgcccgtgtacgggcacggcatcatgaaaaacgaggcggattacgagcgcctgctgcccacgctctaccccgagatccgtctgcccgacgagtacgtcgcatggctgaaaaaaacgcacgacgacggcgatacgctgcatttctttaccgtggacggattcttctggtatccccgcgaaatgttcggcatcgaagaccatctgtacagtttttacgacgagggcgacctctacaagcgtatgtgctccgactatgcggcatggctgaaaaaaactttcgaatatatcgccgaaacgttccgcttcgactttatgagttttgccgaggacatgagttacaacaacggcccgatgctctccaaggaaacgttcgacgagttcctcgcccccttttataaggaggtgatccccattttaaagcagatggacgtgcccgttttcatcgacagcgacggcgatatcactctggcggtcgactggtacgcaggcgtcggtgcggacggtatgttccccctcgaacggcaggcgggcgtagacgtttcgctctatatcgaaaaacagccgcacatggcgtttttgggacatttcgataaaatgtgcatgaagttcggcgaagaggcgatgagaaaggaattcgaaaggcttctgccctccatgcagaaaggcaaagtcattccttcgtgcgaccaccagacgccgcccgacgtcagtctggaaaactacaaaatttacgtgcgtcttttgaaagaatacacggcgaaagttacgaaaaattaaagaaaagccatcggaagatttccgatggcttttctttaatactgttttaagaagacgagcgccgtttcgacgcagccgtccacgccgatgacggaactgtccatacagaggttatgattttccgccatgccccatttttggtcggtgtaatactcgtaatattttttgcgctttttgtccgtcgctttgacgtgttcttccattttctcgggggaaatgcccgtatccatggaaagtttgcgttcgacgcgctttttaaggtcggcgtgcacgtaaattttgacgctgtcctcgacgatgacgtccgagcagcggccgatgatgacgcacggccctttcgcggcaagttgcttgatgagattggactgcgcgatatagatctgatcggtcatcggcatctgatagtaggaataaaggcttctcgaaaaaattccaggcgcgctttcctcgtagtggcgcataaattcttcggaaagattgctgttttgcgctgccatggaaatcagatctttatcgtaaaagggtaatttcagttcgtgcgcgagtttgatgccgaattcgcgtccgccgctgccgaactgtctgctaatcgtaataaccttattcataatctgcctccgaaaacacatagtatcccgccggaacgaagggcgcggcggcgtgtttacccacttctattaaacaccataaattccgctttgtcaataaatttctcaaaatttatcttcttgcgcgcaacccgtaaaaaatttttgaatttttttgaaaatccatgcaaaaataattgaaatattttccgatatccattataatatataggtaataaatacggggatgtagctcacccggtagagcgatacgttcgcaacgtataggtagtcggttcgagtccgatcatctccaccacgttggacccagtcgaacttttttgttgacacaaaagagttttggctggtttttcctttattcagataaaaagaggggataggtcaactaacctatcccctcttttttatatattttctcgctgaaagatataacaaattttctgctttaaaacttatatatctcctaccatcagagccgggcaaggtcaatccttgctcggctcttttttgctttcatagacatttttttatgctttcaaaagaatgagttttcggggagaaacaagaggcgcgacaacttcttttttcttctccgattttttttgttttcgttgtggctatcgtagcacggttcctcgcggaagtaaacggcggaaaaattcccgcttaaaactttcaatttccttttccccacgcggcaatttttccttcctccgttgacttccgcactatatcttacagaacgtatgtctttgaccgtcccttgctcctttgccaccgccgaaaacggcaaaaaataaaaattcggaggtaaaaacgaatgaaaaaagttgtttacagcatttccaaattcaataagtttggaagcaacaaaatgtccggtgtaggatttatcaccgacaaagacctggttatcgcctgcgtcagccagaaaggcaatccgtatatccgcgtgtttgaagattgcgtaaaaaactgccatgcgatacaaggacgcgacggcgagttcaaaggtccgcattacgagatccgcgaagtggaatttgagaaaaacggaagttacgaaacgcgcgaaatcgaagtcgagtattccgtttggtataagttggtcgattgaggaggtacgacatgaaaaacaaattttatctcaaagagtttcagttcttcgacggagaagataccgtcatattcaatatcgtggccgtagacgctgataagatcaccgttgccgttactaaatgcggaaagatttctatatcggactatgacttgcgtaccgatggaaacggtctgtatttcgagtacggagttgcaggtcaagagcatattcacattgaggacttcaaggaggctgaataatggaaaacatttgcgagagttgcattttatacggattttgtgacggtaggtgcggagatacagatccgctcttctattgggaagaagaacagaacgatacccttgaggagcgagggcgatatgactactatgacgaggcagaataatggaaacccgtcggtcagggtatgttacctatcccctctatcggctcgaactcaacaaa

SEQ ID NO: 3445 - DNA, 14699 bp, Unknown
  16S sequences of unknown bacteria
gcggcgaacgatcctacgatatattttcccggctgctgaatgaccgcattattttcctgggtgaagaggtgaacgatactacagccagcttggttgtggcacagttgctgtatctggaggcgcaggatccggacaaagagatccagatgtatatcaattctcccggcggcagcgttacggctggtatggcaatttatgacactatgcagtatgtaaaatgcgaggtgtccaccatctgtatcggtatggctgccagtatgggtgcgttcctgctctcttcgggcgcaaagggaaagcgcttggcactgcccaatgccgaggtgatgatccatcagccttcggcaggcacgcagggtaaggttacagatatggagatcgatgtggagcatttcctgcggatcaagaagcatttgaatgagatccttgccaaaaataccggcaaaacagcagaagaggtcaaggcagcctcggagcgcgatcactggatgacagcagaggaagcaaaagattttggcctgattgataaggtcatctacagccgctgaggcgtggaggtttgtttcatttatgaatgatgaaaaaaagtcgattcgctgctctttttgcgggaagcatgaagatgaagtcgaacgcatcatcgccggtcccggggcctatatctgcaacgaatgcgtgcagctttgcatgagtttgctggacgatgaagggtacggcgaggagcacaacgaatttccggagacggtggagcagctgcccacgccgaaggaagtcaaggaaatcctggatcagtatgtgattggccaggaaagcgccaaggtcgccttgtctgtggcggtttataaccactacaagcgcatctatttcggcggcagcaatgatgtggagctgcaaaagagcaatattctgatgatcggtcctaccggcagcggcaagacgctgtttgcccagaccctggcccgcattctgaaagtgccttttgccattgccgacgcgaccacgctgaccgaagcagggtatgtgggcgatgacgtggagaatatccttcttcggttgctgcaggcggcggattatgacgtggagcgcgccgagcacggcatcatttatgtcgatgaggtcgataaaattgcccgcaaaagtgagaacacatccattacccgcgatgtgtccggcgaaggcgtgcaacaggcgctgctgaagattttggaaggcactgtggccaatgtcccgccccagggcggccgcaagcaccctcatcaggaattcatccatattgatactaccaatattctgtttatctgcggcggcgcattcgatggtttggaaaaaatcattgaaaagcgcaccaataagcagggaattggcttcggcaacgaagtgcatagcaaaaaggaacgtcccgtgggcgaggtcctgaagggagtgcagccccatgatctgctgaagtttgggattattccggagctggtgggccgtctgccggttattgcgccgttggaatccctgggcaaacccgaacttgtgcgcatcttgaaagagccgaagaatgcgcttgtaaagcagtatgaggcgctgttggcctatgacgatgtaaagctgacgtttgccgaaggcgcattggaggctgtggcagataaagcaattgagcgaaatattggtgcccgcggcctgcgtgctgttatggaaggattactgacgccgattatgtatgatatcccgtccgacctttccattgagcaggttgtcattacggcgggggatgtccgcggcgaagaagacgtaaaactggttcgcagtgaggaacaggtgtcgcgccgtgccaagctgcattcggaacagaaggccggcggcgttgtgaatagtgcctcggcgtcttaaatgaagtatagcggcaagggggcgtttttaagcgcccccttgtttttacagccgcagcaggctgtacatccacacaggaggtgtagtttgaccatggaagaaaagaacacgaatgtgccggttctggcgctgcgcggactgacaatctttcccaatatgctgatgcattttgatgtggaacgggatatttccgttaaagcgctggaagcggcgatggagaataatcaggatattcttctggtggcccaacgagagatcgcaacggaggagccagggcagaaagatctttacagcgttggaacggtttcccatatccgtcagattctgcgggtatctgagggaaatatccgcgtgatgattgaggggaagagccgtgcgcggctcaaggctctgctgcagacagagccttacctcatgggagaggtagagctgctgcaggaacaggaacctgctgctcaggatacgctgatggtggaggcattgctgcgtcagtgctattccgcgttcggggagtatcatgaagcgatgccgcgtatgagcgcagatgtcttgactactgtgctttccagccgtgatcccgggtaccttgctgattacattgctcagaacatcaatctgcgccatcaggataaacaggcgattctcgaagagcttcagccgttggaacggttgaagaatttaaatggcatcctggcgcgggagctggaggttctttccatcgagcaggagctggagggcaaagtgcgtgaacgcttggggcgcatgcagaaagattacatactgcgcgaacagctgaaggtactgcaggaggaattgggagaaggcgatcccaatgcagaggcggcggaatatcaggaaaagattttggcgctgcatttgcctgaggaaattgaagaaaagcttctgaaggaagcggagcgtatggctaagcagccctacggcagcgccgagggcagtgtattgcgcaattacctcgatgtgtgtttggaacttccctggaaccagtataatgaagaccgcaccgatgtggcgcaggcgcgcaaactcttggatcgcgaccattttggcttgcagaaagtcaaagagcgtattctggaatatttggccgtgcggcagatccatccggatgcgaagggacagattttgtgtttggtgggacctcccggtgtgggcaagacctccattgctatttcggtagcggaggcgatgaaccgcaagcttgcgcgcctgtcgctgggcggcgtgcgggatgaagctgagattcgcggccaccgtaaaacctatgtgggagccatgcccggccgcattgtcaacgccctgatccagtgcggttccatgaatcctctgatggtgctcgacgaggtggataagctgggcaatgattatcgaggcgatccttctgctgcgctgctggaagtgcttgacagtgcacagaacagctctttccgggatcactatctggagatcccgctggatctgtccaatgttatgtttatcaccaccgccaataccactgacacaattccgcgtcctcttttggatcgtatggaagtgattgaactgtccagctatacggatgaggaaaaagtgcagattgccaagcggtatcttctgccaaagcaaatggaactcaatggcatcaaacgcgtccagctgcgcgtcagtgacgcggcgctgcgggcggtgatcgatggttatacccgcgaatccggtgtgcgccgtttggagcgggaaatgggccgcatctgccgcaaaacggctcttcggctggtggcaggcgaggagcagttgctgagtgtgacgccgaagaatctgcaggagatccttgggccggccaaagtgcaccctgaggtgcgcggcgcaggaaaagatcccggcgttgtcacgggccttgcctggacggcagtgggcggcgaactgctggaagtggaagtaaaccttatggatggctccggtaaactggagtgcaccgggaatttgggcgatgtgatgaaggaatccgttcatattgctgtgtcctgcctgcgtagccgcgccaaacggcttggaatcgatcccggcttttataaggagcgggatatccatgtgcacttccctgaaggagcaattccgaaggacggaccctctgccggcatcacgattactacggccattgtatcggctctgacggaacagatcgtgcgccgtgacctggcaatgaccggggagatttccctgcatggacgcgtgctgcccatcgggggcctgcgggagaaaaccatggcggccctgcgcaatggggtgaaaacagtcattatccccaaagataatgtgccggatctggaggagattgatcccttggtgcgtgcgcagctaacgtttgtcccggtggagacgattgacgaggtcctggctgaggcgttgcccctgacggcaccacgcgggaagggaaagcaaagcagcaacgctgcggtgccgggcaaacgcgaaaaaaagccgcgtgcatccattcgacagtaacaggccagagaaaaggaggaagggcgttgaacttcagtaaagcggagtttatcctgtcagcggtggagccgtccaaatttctgcgcgacgggctgccgcagattgcctttgccgggcgctccaatgtgggaaagtcttcagtgatcaaccgccttctgggacgcaagaattttgcccatgtaggcgccacgcccggtaaaacatcccaggttaattattttaagctggacggcgcggcatatctggtggatctgccgggttacggttatgccaaggtatccaaggcggagcgcgaccgttggggaaaactgatggagagttattttgcggcagggctgatttcactgggtgtgcagattgtggacgcccgccatcagcctacggcggatgaccggaccatggcagagtggttttatgccacaggctgcccggtgctgatcgtggccaataagctggataagctgaaaaaaagcgagatcgaaccgaatcttgtgcgcatccgtcaaacgctttgtccggagaacgaggcggaagtgatcccgttttccgctgagaccggggtggggaaggaagaactgatccatcgaattcacgataaactgcatgcttgaagcgcgctgggaagcggcatatgcttcccagcgcttttttcacccaggatggcaaaaaaatgtaaagaatcggaaaaacttttgtttttcccctatgcaaaaaggtaaaaataatataaaataacaaaagattcattttaggatcgttcagactttagaaaaagaacattggagggaaaacagaatgcagacaccccagtataaacgaatcctgctgaagatcagcggagaagcactggcgggagataaacattttggccttgattttgatgtcatcggaaacgtatgcaatgtggtgaagcaatgcgtggatatgggcgttcaggtgggcattgtcatcggcggcggaaatttctggcgcggtgtgagaaacgggaccggaaaaatggaacgcacccgcgccgaccatatgggcatgctggctacagtgatgaactgccttgctgtggcggatgtgctggagcaaaagggcgttcccgtccgtgtacagactgccattgaaatgcgggccatcgccgagccgtatatccgcttgcgggccgtgcatcagctggaaaaaggcagcgtggtcatttttggctgcggtactggaaatccatacttttccactgatacggcagccgtgctccgcgctgcggaaatcaatgccgacgtgattatgctggcaaagaatgtggacggcgtttacgattctgaccccgtgcagaatcccgacgcgaaaaaatacgatcagatcagctatgatgacatattggctcagcacctgagcgtaatggattccacggccacatccctgtccatggacaataagatccccgtactgctctttgcgctggaggatccgcagaatattatccgcgccatttgcggagaaaatgtgggaacaatcgtgaaggaggattaacatgatgaaggaagaataccgtatttacgaggaaaagatgaataaaacgctggattctctccagggggattttgccagcgtccgcgccggccgggccaatgcccaggtgctcgataaaatcaaagtggaatattacggtgctcctacgcccatcaatcagatcggcggcatcagttctcccgattcccgcacgctggtgatccagccttgggacaaaacagcgctgaaactggtggaaaaagcgattaatgaatccgacctgggtatccatccacagaacgacggcacctgcatccgtctgtcgttcccgcagctaaccgaggagcgccgccaggaactgagtaagcaagtgcgcaaatatgccgaaagcgctaaggtagccattcgcaatatccgccgcgatgcgatggatacctttaaggctcagaagaagaagtccgagattacggacgacgatctgaaggatattgagaaagacatgcaggatctgacggataaaaaatgcaaggagattgatacgctcctggagaaaaagcagaaggaactgatgtccgtttgacgggcgcagcggtatgcagtcatggcttttttcaagtcgaaatcagagcaaacggcggggttggtggatatggcccacctgccccgccacatcgctattattatggacggaaacggccgctgggccaaacggcgggcgctgcctcgcacggccgggcataaagtgggagcggaagtatttcgtaccattgcgacatattgtaaggatctgggcatagagtatcttacggtgtatgcgttttccaccgagaactggaaacgtcctaaggatgaagtagataccatcatgggccttttgaagcggtatctcttggaggcgatcgacacgatggccagggataatatccgtcttcggtttcttggggatctttcggcactgccggaggaactgcagcaactgacggcacggaccaatgccattaccgaaactttggatggtttccaagccaacatctgcctgaattacggtgggcgggacgaaattctgcgcgcagcccgtgcgtttgccgccgactgtgctgcgggaaagcgccggccggaggaattggatgaagagctgtttgcatcggagctttcctctgcaggtattccggatccggatctgatcatccgccccggcggagaaaagcgggtgtccaattttttgctgtggcagggggcttatgcggagttcctgttcaccgacaccctgtggcctgattttagaaaagaagatctggatgcagcactggtggaatatcagcgccgtcatcgcagatatggaggaatttgatggcaaagcgtattttaaccgcagtgatctggcttcccattgcggcgctgggatttgcctttgcgccagtgtgggccatcgcgttggcaatctcggcgctgtctgtggtggctgtgtatgagttgctgtgggctaccgggcttgttcggcagaagcggctgtgtgttatcagcgcagtgttcgcagcgttggtgccgttgtggacgtattacagttcggaattttatcttctgcttttgggcgcattcttgctggtttcactgtgttttctggatggaatgctgcaccaggcgaaagtcaaatttgaaatggtctgtgcggcgctgttcggcgccctgattgtgccgtgctttttatcctctttcctgcgcatagaaatggagatggaaacacgtttgattttttatctcccactaatttatccctttatcagcgatgctggcggttattttgccggacgcctgtttggaaagcacaaattggccccggagctttcgccgaaaaagaccattgaaggttcgatcggcgcagtgctctttgcggtagtgggcgggttgttgttcggtgcggtagcgcactatggcttcggcctgcagcccaattatgcagtgctgggtctgctcggcatcccgctaagcgtgatttcccagttcggcgatctggtcttttcctatatcaaacgggaatttggtattaaggattatgggcgcatttttatgggccacggcggtgtgctggatcgttttgacagcgttatttttgctgcgccggcgctggaacttctgcttcattttgtgcccatattttcctgaaggcagagtgttttgaatcaaaaagagggtttgagatgacgaaatgtatttcgattttgggttcgaccggttcgatcgggacccagacgctggaagtggtggatcagctgggactgcaggtggccgctctaacggcgcggagcaacgtggatttgatggaacagcaggcgcggaaatatcttccgcgtcttgttgtgctttatgacgaaaacgcggcacaggcgttgcgggaacggctttccgaccaaaaagaaacagaagtgtgctccggtatggaaggcttgcttcgtgctgctgtggtggatgaagccgacactgtgctgactgctgtggtgggcatggtgggcttgcagcccacgctggccgccatcgaagcggggaaaaagattgcgctggcaaacaaggaaactctggtatgtggcggcgaactggtgatggcggctgcggcggaaaagggcgcagagattgtgccggtggacagcgagcactcggcaatttttcaatgcctccaatcctgccgcgactgttcagaagtagcgcgcattttgctcacatgttccggcggcaccttttacggccgcaaaaaagaagagatctatcacgccacagcccgcgaagcgctgaaaaatcctaactgggatatgggcgcaaaggtgacgctggacagcgcaacgttgatgaataaagggctggaagtaattgaggccatgcggctgtatgaccttccgctgaaaaaggtctgtgtggtggtacaccggcagagcatcattcattccatggtggaatactgtgatggcgcggtattagcccagttgggcgcgccggatatgcgtattccaattcagtatgctatgacgcatccggagcgcctgacatctccggcgcagcggtttgatcccttttcctgcggtgaattgacttttgcccggccggatctggatacgtttccctgcctgcgtttggcgatggaggcggtgcaggcgggtgggacggcctgtgcagtactcaacggggccaatgagacagcggtttctctatttttgcagaacaggatcgttttcgggcagatcccagaacttgtggatgcggccttgcaacggctgggtgtggtacagcacccggatcttgctgaaattctgcatgcagatgcccaggccagggaagcggccatggacgcgtatcatcatctggtaaaagtgtaaggagttttttgcattcatgtatatcatcgttgcaatactgattttcggcgtgctgattgccgtgcatgaactgggacattttctggcagccaagctgtttggtgtgcgggtcaatgaattttccatcggtatggggccggctgtctggcagagaaaaaagggagaaacggcttactctctgcgccttttgcccattggcgggttttgtgccatggagggggaagaagaaggatctgacgatcccagagcgctgaacaacaaagggatgttcccgcgctttgttatttttgctgccggtgcctttatgaatttcctgacgggatttttaattctggtctggttatgcagcaatctgtcctttgtttatgcgccggtgattacaggttttgccgacggttttgaagcgcagggcgagaacgccctgatgacgggagaccgcatcgtcagtattgacggagaacgtgtgcttctgtatgaagatatttcaatttttttgaatctgggcaatggcgaaacgtatgatttcgtggtagaacgggacggccggcagattacgttgacggatttgccccttgcgcccagagaatatcccaatgaggacggcaccagcagcgtgcgctttggactcaatttcggcgaaattgtggaggcgacgcctctgatgaagctgaaaatggcaggactgcattctgtggattttgtccggctggtatggtacagtctggaaatgctggtcactggccaggtggggctgtctgatatgtctgggcctgtagggattgtgacgacgatttctgatgtagggcagggcgctacgtctctttttatggcggcggccaatatcggctatttgacggcgttgatcgccatcaatctggcggtgatgaatttattgccgattccggcgctggacggcggacagatttttatcatgtttgtaacgactttggtgacgaaagtgacgaaacggccggtcaacccgaaatatgcggggtatctcaactatgccggatttgtggctttgatgctgtttatgctggttgtcacagccagcgatatctttaagctttttgtatgacgggaggcacgcaggaaagatgacaaagcagatcaagatcggctctgtaacggtgggcggcggtgcaccggtgacgattcagtccatgtgcaataccaataccgccgatgtggaagcgacggtggaacagattcatcgcttggagaaagctggctgccagatcgtgcgtgtggcagtgccggatcaagctgcggcagctgctgtgggcagaattcgctcgcggattcatgtcccgctggtggcggatattcatttcgattataagctggcgctgcagtgtgtggattccggcatcgacaagatccgcatcaatcccggcaatatcggcgcggaggaccgggtgaaggcagtggcggatgcctgccgcaaaaacgatattcccatccgcatcggcgtcaacgggggaagcctggagaagccgttgctgcgcaaatacggcggtgtgactgccgaagctttggtggaaagcgcgtttggtcatgtggcgctgttaaataagtttgattttgacgacatttgtatttcggtcaaatgttccagtgtgccggttacaatacgagcctatcagcttcttcacgagcggtgcagttatccgctgcacctgggagttaccgaagcggggacgcccaagcagggagtcgtcaaatcggccatgggcatcggtgggctgctgtgccttgggatcggtgatacttttcgggttacgctgacagcagacccggtggaagaaatcggcgtggccaaggatattttaaaggctgcggggctgcgccgggaaggggtcaatctgattgcctgtcccacctgcggccgcacaaaaatcgatttgatccccattgccgaagaggtggagcgccgcctggctgactgcgggaaaacattgacggtggcagtaatgggctgtgtcgtcaatggtcccggagaagctgctgcggccgatgtgggaatcgccggcgggaatggcgagggcctggtattccgaaaaggcgaggtcttgcgtaaagtaccgcaggacaaactggtggatgcgctgatggaagagatcgagcggctgtaagcaagatgcggtaggtgcatggagctgcagaatactgcgcgaaatggagtacgagaggataaaaatgagcaaaacgattcctttttttgatttattttctgactatatcccagagcgggagctccgtatcctgctcctggaagtattgatcgaagaggctgctatcgataaagaagcgctgacgatgtccgtaaagctcctttccagccagttgctgccggaaagcgcgctggaaaaggtacaggaacaaatgtgtcagctgtatcggctgaaatcagttgaactgagcgtccgcgtgtgtgcgccggaaccggccaaaaagaaaaaaacggagacgacagagcgtaagagctgggaacgtaaagggcgggcagtggtttccggcgatgaaagcgttctgtttggcggccccattacagctgatgtggtgccgatgacagggctgagcctgaaaacgcccacttttgccgttaccgggcgcatttttgccgaagaaatttatgaaacgcgccgtccaggcgtttggtgcctgacctttgatatgactgatgagcagaattctgtccgtgtggtgaaatatctgaaagaaaaggaaattgatccgctgcggggaaaaattaatgtggatatgtatgtaacagtacaggggcggatgaaactcacccgggacggtatggacttgcagatggaaccttacagcatctgtctggccgggcacagtgaacgcatggacaacgccccgcaaaaacgggtggaactgcatctgcatacccgcatgtctaacatggatgcgctgacagataccaagaaagcggtgaaaacagccatccgttggggacatcccgctattgctattacggatcacggcgtgacgcagtcttttccggatgccgcctctgccgctggcggaaaaatcaaaatcctctatggcgtggaggcctattttgtcaacaatctggatgatcgcttggctgtacatggtacacaggatgcggcttttgaggatgaaatcgtctgttttgacatcgaaacgacagggcttaatgtaaagtatgaggccattacagaaattggcgctgtaatattgaagaacggaaagattaccgatacttttcagacctttgttaatcccaaccgccgtttgacgccggagattatcgggttaacaggtattaccgatgaaatgctcaaaggggcgccgcagcccagagaagcgctggaacgttttttgaagtttgtgggcggccgtcctttagcagcgcacaatgctgagtttgatatcggttttatccgggagaactgccgcaaagaaggtctgccttttgatccgacatacatcgattcattgatcctggctcaaaacctgctgccggagctgacgcattttaagctggatgtggtggccgaacggctgaaattgcccgctttcaaccatcatcgcgccagcgatgacggtgcgacggtgggctatatgctggcgcccttttttgatatgctccgtgcgcgtgggatttccagaatccaggaaatcaacgaggaaatgctcaaactccgcccgctgggcaaggccaaccgccggccccggcatatgatcattttggccaagaacaagctgggcatgcacaatatgtacaagctgatttccctgtcgaatctcaaatatttcaagcggcagccaattattccaaaaacagagttggtgaaatggcgcgaaggtttgatcattggcgccgcctgcgaagcgggcgaactgtttcaggcggtgatcgagcataaaggctgggacgaactcaagcgcatcgcttctttttatgattatctggagatccagccgatctgcaacaacatgtttatgctgcgtcaggggaaagtgcgctccgtgaaggacctgcaagactttaaccgtgttattgtccgtctgggggaagaattgggcaagcccgtggtagccacaggggatgtgcattttttgaatcctgaagatgaaatttaccgccatattcttttggccagcaagaaatttgacgacgctgattcggaactgccgatctatttcaaaactacggaggaaatgctgcaggaatgcgcttacctgggatcggagaaggctatggaagtggtggttaccaatccaaaccggatcgctgatatggtagaggatattcagctgctgccaaaagggcagctgtttccgccgagactggaaaactccagggaggatctttacaatctggtgtggggcaaggcccatgaactgtatggcgagcagttgccgcagatcgttcaggatcgtttggatacagaaatgaattccattctgggacgcggctatgacgtgatttatatgtcagcacagaagttggtacagcgttcgctggaaaatggttatctggtgggctcccgtggttcggttggatcgtcgctggtggcgtatatgtccgggattacggaagttaactcgctgccgcctcattaccgctgccccaaatgtaagcatagcgagtttattctggatggttcttatggctgtggcgccgatatgccggatcaaatgtgcccggagtgtggaatgccttatgtgaaagatggcttttatattccatttgaaacgttcttgggatttggcggcgacaaagtgccggacatcgatctgaatttttctggagagtaccaggccaaagcgcaccgtcatgccatcgagatgttcggcgaaacccaggtgtttcgcgccggaactattggtacgctggccgacaagacagcctacggctatgtacgcaaattcctggaagagcgcagccttacggcgggcagggcagaggaaaaccgtctgacgcagggaattgtgggcgtgcgccgcaccacagggcagcaccccggtggactggtggttgtgccggacgatatggaaatcgaagatttctgcccggttcagcatccggccgatgctgctgacagcgacacggttactacccattttgaataccactgtatggaagataaccttctcaagctggatatgctggggcacgatgatcccaccattgtccgcatgttggaggatctgaccggtgttaatgctcgggccattccgctggacgatgcagacactatgagcattttcacttcgtctgcggtgctgggctatgaaaacgacccgattttgggtcccaccggtgctgtggcgatcccggaattcaatacccgctttacccggcagatgctggaggacacgcagcctacagattttaataccctggtgcgcctgtccggtttttcccacggtactgacgtgtggctgggcaacgcccgggatctgattgtgggcggc

SEQ ID NO: 3446 - DNA, 32759 bp, Unknown
  16S sequences of unknown bacteria
attccaaaagccgccgacgccgctcatattttcacgtcctcttaaatatttatgtaaaccataccacaattccgttaaaaaagcaagaaaaaagagcctttgaagggcaatttcaaaggctcttcggtattatttcaaaagcgcggcaatatcggggaaaggctccaccgaacggcggagaatcccgtgcatttgtgcgattgcgatgccgtaattggtaatggcaacgccgcgggttttgcaccgctctattctcgatttcatttcccgctcgccgagcatacatccgccgcaatgaatgacaaggtcaaagcccgtcgggtcgtcggggaattccccgcccgaggtaaagcttaaatccaaatttttgccggtgtggtttttgagccattttggcagcttttcggttccgatgtcgccgcattgacggtggtgggtgcagccctcggaaatcagcaccctgcttccgtcgcaaagcctgtcaagctttgccgctccccttaccgcctcggcaaggtcgcccttataccgcgcaaaaagtatggaaaaagaggtcagcggtatgtcgctcggggtttcgccgttcacccgtccgaaggcctgtgaatcggttatgacaagctttggcggcctgtttaaggcagcaagagctgatttaagttcggtttctcttgtgacaaagggaagtgcgcccgcctcgagagcgtctcttatggtctgctgctgaggcagtatcagccgtcctttgggcgccgccgaatcaatgggaaccacaagcacgacgacgtcgtttggctccacaaggtcggccacaagacggcggtcgtttttctgaagccccgccgcttttcctatcatttccttaagctcaaaaatgccgtcgccgttttttgcgctgacatatatttcgtttttttcggcgttcggaagggcttcaagcccgtccgatttgttgaaggctttgatgaagggcaattttttttgctcaaaaagctttataagatcgccgtcggcctcggacatacccttgacgccgtcgatgacaagcacggcaatgtcggtcatatcgagcacctgcatggttcgcctcacccgcatttctccgagctttccctcgtcgtcgataccgggggtgtcgattatgacaacggggcctatgggaagcagctccatggcctttttaaccgggtcggtggttgttcccttgacgtcggaaacaagggacagcttttgtcccgtcacggcattgacaacgctggacttgcccgcatttctcacgccgaaaaagccgatgtgaacccgctcggccgataccgtatcgttaagtcccattcaaagcccccctaaaagcggaaatcccgcctgtttgaattctttatctgctcgatattttcccttgcgatttccctgaccttttccttgggaatctttttaagctcatcctcgataagcttatagcccacctttttggtgtcctcgcttgcatagtcctcgagatattcggtgagggtcataagagcgttggggtggcagcagttgagaatctgaccgtttttgcaaaggctcataaatctgtcgccggttctgccctcgcgatagcaggcggtgcagaaggagggcacaaagcccatgctcataagccaatttaccacctcgtcaagggtgcgctgatccgaaacgtcaaactgctcggaatcgtggggacgttcctcctcgcagtatccgcccaccgaggtgcgggaggctccgcttatttgggaaacacccagctgaagcattttttccctgacggcctgactttcccttgtggagattatcatgccggtatagggcacggcaatgcggatacaggcggcgattttttcgaaaatctcgtcgtcaaggccgttgtcaaaggcgtcggggtcaatgtcgtcggcgtgcttgactctcggcacgcttatggtgtggggacccaccccgtgcacagcctcaagatgctcggcgtgcataagcagccccgcgaattcatactgatagccctcaagtccgaaaagcacacccagccccacgtcgtctattccgccctccatggctcggtccatggcctcggtgtgatagtcataatcgtgcttggggccggtgggatgaagctcgagatagctttttttgttgtaggtctcctggaaaagaatatatgttccgattcccgcctctttaagcttgcggtaattttccaccgtggtggcggcaatgttgacattgacccttcttatgtcgccgtttttgtgatgaaccgaataaattgtctttatggactcaagaatatattcgatggggttgttgaccggatcctctcccgcctcgattgcaaggcgcttgtgacccatgtcctgaagggcaatgacctcgtttctgatttcctcttgggaaagctttttacgggcaatgtgcttattcttcaggtgatatggacagtagagacatccgttgacgcagtaattcgacaggtaaaggggcgcgaacatgactattctgttgccgtaaaaggcaagcttgatttcctcggcaaggcggtacatttcctccaccttttcgggaatatcgcaggcaagcagcaccgaagcctccctgtgggtaaggccggcgcaatgggtctcgtttccgcttttaaccgggcgcgccttttcgagaatactgtctataagttcgatgttatgcttgtttttctcggcatattcaatggttttcaaaatttcctcgtggctgataaattcctcggccttgagggatttcggattgtaaactgacataataatttcctttcttacggtcagacttttctttccgtcagactataatttaatgtcgccgcggcttgtgacgattttatatcctatcgactccatgcggcggttaaggcaggaacggcattgagccgactcctcgcccgtgcagattttgttgtcgtagagagcatatttttttctcaccgaaacgggggacagattgggcatgacaacatttgcgcccgcctttatgcccttttcccgcccaaggaggtcgatggttccaagcgccgtggtggagggcaaaagaatgttgggctttataagccttatgagcgatagcaaaaagaccgtctgctccgccgtaccggcgggaaaatgctcaaagggcgtgtcctttgccggaataaaggggcctattccgcacatatcgggagagaattcctcgatgaatttaaggtcctttgcaagggtattttcggtttggaagggcgaacccaccataaacccgcagcccacctgaaagccgatgtcccgaaggtcgtaaagacatctcatgcggttttcaaaggacattcccgcagggtggagcttttgatagtgctccttatcggccgtttcgtgacggagaagatacctgtcggcaccggctgcgaaaaattcttcatagctttctctgccgtattccccgagggacagcgtgacggcacagtcggggaaatcctttttaagccttttcaccgtgtcgcatatcattttctcggaaaagaccccttccccgccctgaagcacaaaggtgcgaaagccaagctcatacccctgcgccgcgcaaaggaaaatttcctcctttgaaagcacatatcggtcgcagccgccgtttgatttgcgaattccgcaataaaagcagtcgtttttgcagacgtttccgatttcgatgagacctctgacataaacgtcgctgccgtagatttcttttcttgccctgtcggctctttcggccgcgaaatcggcaagctcggcgttgcgccctcttataagctcctcatattccgaaagagaaaggcccttttccctctcgagctttcggacaaggtcaaaaagcttttcactcattgccttttatgccggaataggcggttttaacgctcagtccgtcgatgttgccgagcttgccggcaagggccgaaatggtgtcggcgggggcgtcgagagccaccgaaacgatgttgatgttgcgctccctgtggggaagccccatgcggccaatgataaaatcacggtattcgtgaagcagagcgttgagcccctcaacggcctcgcctttttcgacgattatcgccataaccgcaactcttgtttccataataaaacctcacttataaaaaatccgccgtacctgcgaaaggatacggcggcagccaaaacggaaattgcctcgcaccttcacgcagatctctctttgtgtcggataaagttttcattttagatcggcaaaacctcacaggcgaaaaacgagttcggcccgccgaaaaagccgtttattcggcttcgaaagcgtccttggaaaggccgcatacgggacatacccaatcatcgggaatgtcttcaaaagcggttccgggggcaattccgctgtcgggatcgccgatttcggggtcgtaaacatatccgcagggacatacgtatttcataattattatctccttttatcgtttaaatatttcaggtgtcagccgcttatgatttcggaaatgacgcccataattttgtcgtgacatcctccgcagccggtcgagcagtttgtcaccttttgaacctcttcaaattctttttcgagatcggggaaacgggtgtgctcatgaaccgccttttcgatgtcggcatagcttacttttttgcacttgcaaataagctcgttgggggcaatattcactttaatcaccaacttttcaaaaaatagctgttttaagccgtctttattttaacacacttaaattcaaatgtctacattattcgataatttttccgtcgagggatattgtcaccacctgccacggaatgaatttgccgctgcttttgagcgcctcctttgccatgtgctcaagaccgccgcagcagggaacctccattcgcaccaccgtcacgcttttaatgtcgttgtttttgattatttcgcaaagcttttcggaatagtcggtaccgtcaagcttggggcagccaatcaaggtgacgcggtttttaatgaatttctcgtgaaaatttccgtaggcaaaggcggtgcaatcggcggcgataagaagatttgcgccgtcaaagtagggtgcgtttgtcggcacaagcttgatttgcaccggccactgggaaaggcgggacaagggctcgcctaccgccgcagcgggggcttctttctcggcgcggttgaaaacacgaagcttatgaccgggacagccgcccgcgtgaggctcaaaaccctctttctttttattttccaaattctttttgacctcggtctcgttatattcggcagcctcccgctccacaaagcttatggccccggtgggacatgagggcagacagtcgccaagcccgtcgcagtaatcgtcccgaagcagctttgccttgccgcccaccatgcctattgcgccctcgtgacaggcgtttgcgcaggctccgcagccgttgcatttttcctcgtctatgtgaattatttttcttatcataaagattacctccttgatttttcgtccttattataatatactgagcaaaaacattctgttgtttttccaacaaaggggagatttttttgaaaaattattttgattttttaatcacaaatcctcttttcaggggtgtgaccgacgaagggctcacaaagcttttgggctgtgttaaaccgacggaagaaagctttaaaaagggcggaataatcctcccggcggggcaaaaaaccgaccgattcggtattctgctttgcggcaagggcgtgattgcccacgaggatttttggggaaacagaaatattatttcgccccttctcccgggacagattttcggcgaggtttttgcccttaagagcggcgcggtgacgacggtgggagtctttgccgaaagcgactgcgaggttttatggataaaatccgaaagccttctgtcctcctgcaccgaaatttgtccctgccacgccgccgtcacgcgaaatctcatcgggctccttgccgaaaaaaatcttaaaatgaacgaaaaaataattcacatggccaaaagaaccacccgccaaaagcttatgtcctttttgtcggcaaaggcggccgaggcgaaaagcgaaagctttaccgttgatatggaccgccagcagcttgcggattatctttcggtggagcgcagcgccatgtgcgccgagctgtcccgccttcaaaaggacggctatctttcctataagggtaatcgtttcagactttcgggcaggaatatatgaaaaagtgctttggatgatctccaaagcacttttgattttaaacagacagtcgtcccacgcaaaactcatactaaacccgtttcaaagaagccgataggtatcgtacattcaaagcctcccttgtgtaaagggagccgaaggcaccgaaccgcagccgtttatatcggggagccggggacagcacgaaaggtcgatttcaacctttccacaaggttaccgacattaagcaggcgttttcttcctctgcctttgggataggaaaaaacgtttgtatcggactaaccgaattcgaatgacgttttcgacatttgaacctgcccgacggcgtacaaaggtacgccgagcggtgaggtttgttcgctacaggcgtttttaacatcccaaatgttatttcttgagacgtttgtcgctctttcttgtcaatgccgtacccaccgactggaacacctgaacaagcacaatgagaagcacaacggcaaggagcataaccatatatttatagcggtagtagccgtaatttatggcgatttttccgagaccgccgccgccgattatgccgctcatggcggtgtatccgagaatggtggtgatggcgatggtgatgtttgaaatgagggagggcatactttcaggcaacataaccttaacaatgatttggaaaggcgacgcgcccatgctctgcgccatttcgataacgctgggattgacttctctaaggctgctttccacaagtctgaccacaaaggggaaggccgcaatggtcaggggaacaatggacgccgccgttccgacggccgttcccattatggctcgggtcagcgggaaaaccaaaatcatcagtataaggaaaggcaccgaacggagcaggtttattatgacgttgagcacctgcataacgggcttcggcagcggaagcaccccgcccttttcgccggccacaagcagcacgcccaaaggaagaccgattattatggcaagagccgtagacagcacggtgacataaagcgtttcccacacggcggacaaaaactgagtttttacaatttcggcggtttcgagccattcgggagagttaaaaaaatcagtcagcatttccggttacctcctcggcggatatgtcctcactttgggacaggaattttattgcgcgctccagattattctgctcatttttcacggcaagaagcatggttccgtaggccttgccgccgatacttttggtggaagcatagcaaatgctggcctctatcccctctttaagcgccatttgagcaatcatgggctcgtcggtggcgtcggcgccgttgaaaacgacgcgtatatagcggtaattttcgtccttttccgacaaaaactcctcggaggagccttcggggaaaacaagacgtttggccgccgaggacttgggatgggaaaagacctcggataccgttccctcttcggcaacggcgccgttttcgagaatcgccaccctgttgcacacccgctcgacggcactcatctggtgggttatgataatgaccgaaatgccggtctttttgtttattgtctgcacaaggtcgagaatggaatttgtggttttggggtcgagagcgctggttgcctcgtcgcaaaggagaaccttgggctcggtggcaagggcgcgtgcaatggccaccctctgctgctgaccgcccgaaagctgagccggataggccttggccttttcggcaagccccacaagctcaagaagctcggcggcctttttccttgcctcggccttgggcacgccctcaagctcgagaggaaagcacacgtttttaaggcagtttttctgcatgagcagattaaagccctgaaaaatcatggttatttttcttcttgtctccctgagctccttttttccgaggctgcccatgtcgacgccgtcgaaaataacatttcccgacgttggccgttcaagcatatttatgcatcgcacgagggtgcttttcccggcgccgctcatgccgattatgccgtagatctcgccgtcgtttacggtcagcgagacgtccttaagcgcctcgacctttcccgacgaaagggtaaaggtcttggtcagattttttatttcaatcattttttcacctcatcggccgaaaaccgacctatacaacaattggtaccgtggtaaatcataccacagtaccaatcaaaacgcaatttaaatttttaattattcgcccttcaaagcgtcaagagaggtctgctttccgccgtagagtccgagaggctcaacgtgaatggcggcgaccgaaacaatgtgtgtgttgttttcggcgttgaaatcgtcaagatagggcttgtgctggaagtagttcgcaagcacggtgccgtcctccacaacattgttgggaacaacatagtcgctgaattcctgaatgtcgagggttatgtttttctcggcgagaatgtcctttgcaacggcaaggatttcggcatgaggtgcgggagaggcagcaaccgaaattgttttgcccgaaagagcgtcataatcaaccgaagcgtcaaaaccgtcgccgggattgtcaacaaccgacacaaccgagccggcatacttttcggtgatgtaatcggctacctttttgctggaaagagcggccacaagagcctttacgaggggatcgttctcgttgccctctttaacggccacaatgtttgaataagccgaggaggagccttcgagcaccaaagcgtccttggaaggattgaggttggcggcgatggcatagttcgaattgattacggcatagtcaacatccttaagaacattggggagctgagcggcctcaacctcgttaaatttgatgttgtggggattttcctcgatgtcaagcacggttgcggttattccggcgccgtccttaagctttatgaggccctgctcttggagaagcagaagagctcttgcctcgttggtggtgtcgttgggaacggcaacggtgagttcggtctttttgtcgtcggacgagctctgaccgcaggacgcgaaggacaggacaagggaaagcgtgagtgctattgcaagaattattgatacagtctttttcatgataaaatttcctttcggttttaaaataatttaatgtgtgattgtctgctcggcacggcaacacattcgcccgaaacggaaattggctctgacaagcttttcaaaacagtttttcatatctttcctccgaaacggcaacgccgttttttcaaacgcggaaatccaatttaaaattccccgccgtttgtttataacataaaaccgaatttctgtcaagtgacgatctttcgttcggttttaaatcctacctatttcgtaggttggtaagataatagcacacattatcccctttgtcaacactttttttaaaaaaatgcggaactgcgcccgagggttcagaccggcagagccggactgaggagagaaacccccgaacgcagtcccacagatgtaaggcaaaattacactcgatgtcaatattaaattcggcattccgccggcattatcaggcgctcttcttgcggttgttgaaggagttgagcagaacggctccgatgatgagcaaaccctgaaccacatactgcatatcggaagatacgccggtaagggtcatgatattgttgatgattccgaggaagatgataccgatgaaggtaccccaagaggttccgagtcctccggcaaggcttgcaccgccgatgataaccgaagcgatgacgtccatttcccagccgcgtccgaaggtgtaggtaccggacataacctgtgccgacatcatgattccggcgaaggcggcgcagaactgaacgatcatcataacgatgatgcggactctgcggacattgatacccgaaagacgggccgactcggcgtttccgccgacggcatataccgaacggccgaatttggtctttctcagaactatcagcgttacgacaaagaacagagcaaggaacattgcggggacgggcaggaaaccgaagagggttcccgagccgaaccatttataccactcgggaagtccggtcacgggatagggagcgagcagcgccgccacaccgtatagcacgttgaccataccgagggtaacgatgaaggaaggcatattgaagtaggtcataagcagtccgcttataagaccgataagggaacatgcaatgagcgttccgccgatggcgatgataccggcaagcacgccgtttacacccgccgcaagcgtcgcctttaggatgagcgcggccacgataccgctgaggccgacggtggagccgatcgaaaggtcgatttcaccgcagatgataacaaatgtcataccgaatgcgataacgcccttaagagaggcggtacgcagcacgttgagaaggtttcccgaggtgaggaacgaaggcgacaggaaggtcgcaacgataaataccaccacaaggattatttcaagtttaaagcgatcggccgccgaagctaccttcaaaagcggggacgcaggagcttttgtattattcatttctttcacctcgttaaacgttttcggaaggaacttcttcggtcttgccctccgagctgtcgcccatgcacagggcataaagctcgttggtctgaacctcgtcgggatttacctcgccgacgatttttccttcgcacatgatgagtattctctgacatacctcaagcagctcttcaagctcgctggagaccatgacgctggaaattccctttctcgactgatcccacatgattttaaatatctgctgcttggcggcaacgtcgatgcctcgggagggctcgtcgaaaaacatgaccgacggattggtgttgagccagttgcccacaacaaccttttgctggttacctcccgaaagggacgtgaccggaagggcggtggaggccaccttgatttgaaggtcctttacctgtctgtcgatgtattccttttccttcttctcattcataaatccgaatttcgaaagagaatcgaggcttgcataaaccaaattacggttaatggatgacatcagcaccaatccttcggtcttacgatcctcgggggtgagcgccataccaagtgatttcatctttttgaggctggaatggtgtttattgatgacctggccgccgaattccacggtgcccgagtcaaacttatcggctccgaaaatggatttgagaagttccgttcttcccgagccgagcattccggcaattccgagaacctcgcccttatgaagctcaaaggacacgtcctcaaatattccttcccttgtcagattgttgaccttaagcacaacctcgtccgaaaccataaggtcgtcgggacggctctgaacctgggtatcgccgaacatcatgtcgatgagctctctgtgggaaagctcgctcatatcctttttgccgatgtattttccgtcgcggatgacggtacagtcgtcggcaatctcccaaagctcctgaagcttgtgggaaacgtaggttataataacatccttttccttgagctttctgaccattttaaagagtgcggcaacctcatgacgggcaagggacgaagtgggctcgtcaagctgaagcaccttggggttgaagctcatggctttcgcgatctctatcatctgacgctgccacatgctcagcgacgacacctttgccgtaacggggatgtctatgctcagctcctgaagcagatttttaacctgcgtgttggctgcgttccagtctatcattccgtacttcatgggcattctgccgagaagtatgttctcggtgaccgagagggtgggaacaagactgagttcctggtacacggtggcgattccgtccttaaaggcgtcggtggtggaagaaattttaacttccttgccgtcgagaataagaacgccggaggtcgcctgctgcgcacccgaaattattttcagcaaggtggatttacccgatccgttttttcccacgatggcgtggaccttgccgctgtcaaaggaaaccgatacgtcgtcaagagcgaccgttccggggaaaacctttgtaatattacgggcttctaaaacgctcatttaaattcctcattcctttgagtatgttgacttgtgtttccggagaagccgccggtgcgacgacctctccggggaaaaactgctttaaatcaagctgttatcagccgattttcctaagatcatcaagatagtttttgattccgtcgggatcggtgcgggaaagcagaataccgtcaacatttttgacctgtcctgctgcgccgatgtcctcgcccttaatggccttgatgagctgctgcatgctctgataacccatctgataagcgtcctgaccggtaacggcctggagaacgtttttgtcgctctggagataggaagcgatctgctcggaagcatcgataccgaaaacgtatacgcccgaaaggcccttattttcgatagccatggtggaaccgacggtaccgccgtcgttagctgcatagatgagctttacgttgggatgagcggtcatgatgccgtcaacggtggtaacggccttgtcctgctcccaagcgtcctgacggtcaacaaccttaacgaggtcgccgacttcgccgaggaatccgtctacacgggcagcggatttttcggggagaagggagtcgaagcaaacgattgcgatttcaacggggttctctgcggttgcgccgagctcttttttgaggaactctttggcagccttaccggtggaggcgcccagctgtttttggtcggaggtaaatccgcctacgaggaaggagccgtcggtcagagtggagtcggtaagaacaaccttaacgcctgcggcggcggcgttcttaacggcttcgatggaagaatcctgattcaggggagcgatggcgataccgtcgatcttgtcctgaacataggtgttaatggtctgggtttcttttgcctgatcctgattgcagttgaactctctgtagtttgcaccggcctcggttgctgcggccttatagcccgcgcttaccatacgcatgaactgatcctcgagatagaccatgccggccaccttgacctgtgtgccgtcggaacttgttccggagttgtcggactgtccgcatgagctgaatgccgctatcatagcgactgacagtaatagtgcaattagcttcttcatttttttgtttctcctttgttgagtttttccctcatcgggcaagcccattatataatacgaaagatacaataatctacatattcttttgccttttcttatattatttcgtcatctttaactactatcataaaaagcatggcaaaagacgcatttttctgtatttttttacgaaaagaatgtcggttttcggtcaaaaacaagtctcaaaaccgcgcaaaaccgtgcgttttcgctttcgcaaatattcattttcagtcatttatatgcgctgccccgtgagattttatactattattgccttgtcaaaaagggaatattccgcaaaaaagccctcaaaaaattgtacaatttattattatttattgatgaagacgcttttcggcggcttttgccgtcaaatcgccgtcccgtttttgcacaaaaagacccctccgaaaatcggaggggtcaaagcaggacaacgcaaattatttcttgaccataacggccttgagcgccgtggccttgtccttataatactgctccatggctgcggggagattgtcaagctcgaaggtgtgggacacaaggctttttacatccacgattcccgcctttacaaggtcgatacacagggggaagtaaagcgccggaatggcgttggagcctctgatctggagcttgttaaggtgaacgacgtttgaatcgaaggtgacggtgggctcgttatagcttattccgaggaaggaaactataccgccggtgttgcagacgttgcaggccgagccgatggttttgggaggcgcggtaacaagcacgcggtcgacaccgcccttttcgaattcatagtcctcaagctttaccttatcggtatagatgatctcgtctgcgccgaatttctttgccatttcgcatcttgcggtggcggtcgagaactcggcggcgtaaatctttcttgcaccggcgtgttttgccatttgaagagccataagaccgataggtccgcagccgagcactaacacgtcgttgttaagcttaatatcggaagtcataaacaggtcgtaggcaacgcccatgggctccataatggcggcctcttcaaaggtcattccgtcgaatttaacgcagagacttgcgggaacaatggccttttcggcaaagcccattccggtgcggaagcccttgtcaagctccataaagctgtcgccgcaaggggtgttgtcaaaatcggggcgaccgtttctcgagcagtcgagcagcgggtcgaaggtggcggtttcgatacagacggtgtcgcccaccttcacgttggttacaagctttccgaccttttccacaacgccggaaaattcatggccgaaaggctcccattccttggcctgataggaggccagaatgttgtcgtggccgcagaatccgcaggccttaacgtcgacaattacctcggtatccttaatttctctcaattccacgtcccttacctcaaattgataaggagctttcaaatatgcagctttcatttcaattacctccgtggcatttatatttcaaggattattatatgcggttccttgaattgcacacccattttaccacttctttttgataaattctttatattattttgttttttattaagtttttttgtcaatgtcaccatagagacttgttttgatttgaatcgcttgaattttttcggggccaattatataattacattatcggaaaaaccttgcgtgagggggttttgggcgtattttaagaccaaatcccgccgcaaaaacataaataaaaaaggagaaaaaatgaaaaagctttttgcctttatattatcggtgtctcttctgctgatgtcaattcccctttcggccttttcggcaaccgcccaaaaggaatacggaaattttgaatacggcgtcaccgacaacgaaatcagaataatcggatatgacaaaaccgagggctgtccgtcccgaatcgtcattccttcggaaatagaggggctgccggtttccgaaataggcttttttgcctttgcaaacttcgacgatttggaaagcgtcgaaattccgagcggcgtgaaatccataggagaccgcgcctttgaaaactgcggtaaactgtcggatgtctcgattcccgacaccttgacagttctcggcagttatgccttttcaaagtgtacatccttaaaaagcgtcaaaattccgcaaggtcttaaaaccatcggagatttcacattttacggctgcgaagggctgacagatgtctgcattcccaacggcataatcggcatcggaaattcggcctttgccggctgcaaaaatttaaaaaccgtttcttttccgaacagtatcgaaagcatcggcccgtcggcctttgaagaatgtgaaaacttgacagccgcagacattcccgaaagcgtaatattcctcggcagcggcgctttcagcagatgcgtcgggttaaagagtgtgacccttcaaagcggccttaccgacataggcgattttgccctttataattgtataggtcttacgtcggtcacggttcccgaaagcgtaacgaacgtcggaaaacatgcgttttcggaatgtgaaagtctgaaaacggtaaattttctttcctacaacgccgaaatcgacggcaacgccttttccgaatgtatctttaccatgcgctgccaagagggctccacggccgagacattcgcaaaaaaatatggcatagcctgtgaaatcgtcaagttctcgctaagggacgaagcaagcggcataaccctgactaataaggacggcagcgcctttgacaaggacacgctgctgcttgttcagggcatttccgacaacgagacgttacagtcgataaacagtcggctgtccggccaaaatctcatgccgtttaacatttccctgctgaaatacggaaccgttattcggccggtaaaagaggtcacgctgtcggtgccggcggacagcggtatgaagtccgaatattgcaaggtgtattcggcggcgcaggacggaaatcttgccgaaatacggtcggtctgccgaggggataaaataatcttttcggtcacttctctcggaaattttgtcattgccgagcagcttcccgtcgagggcgacgtcagcggagacggcagagtgacggtcgccgacgcgcttatggtgctgcaatactgcgtcggcgcaatagaatttgacgagcggcagacaaattcggccgacgttgatttaagcggccgcgtcgacacgacggacgctctcatgattcttcagttcacggtgaaaaaaatcgacaaattcccctcccgcagataaatttaccaaaaggcaggcgtcgcgctttgacatatcccgtctgactcaacgcataaaaaatcagcgcagtcggcctttgttccgactgcgctgttatttttgccatactctgcggcacatttaatctaatcggatgaataaagcagatgatttcgatagaatgacggcgatacacctgtggtgtcgcggaaaaccttgttgaaatactgcacgtcactgtatcccacctcttccgagatttcataaatcttcattttcgggtcgcgaagcagctcgattgccttttccattctcacccaggtaagataatcggcaaagctctcccctatttcgcttttgaaaagtttgcagaaatatgaggtggacagctcgcaaagctcggccagatcgtcaagggtaatgcgctcggcatagtgggtgttgatgtagttgaccgccgcctcgatttgaagccgctttttgcttttttcctttgttccgacacttttaaagagcgactcgatgtatgccgacgactcctcggcatagctttttgcgtcggttatgcggtttatcatctcaaaaatgttgagacccgccgaatttatcacccgcccggttttggcggccgacgcaagccccgaagaaaggcttataaccgtctcgaggaagaaaaatttatagtcggcggggcgcagcgcctctcccattttttcaagctcggcttctatgtcggatataatgtccttggcgtcgataaggcttccctgccttattgccgaagaaagccgcttttcgagaggcagcggatagggacagtcgggcagcggcgagcggggctcggaatatacatatattctgtctcccccggtataatttttccgctcgattgtcagcttcgccgacatgaaggaatttgaaagcttggaaagctcatatgtgatttcccccgttcccaccgtcacggtctcctcggtggcaagctcgagacgggccttgatctcctcggccgtgtggaaaagggttcggtcgaatttggtcttgttgtccgactgggaaagtatcccgagaatatatgaattcggaagggcaaaggcaaagccccatccgtgctttctgagaatttcctgaacaagacccgccgggtcgataagcgagctggtgagcggagtaacgtctcccgaaaacaatatgcaggcgtattgatgaccgacggcgggaattccgagccgcgttgcctctctccttgcgccggcggcgttatagctgccgctcaaaaggcccagcataaaatgctcccatctcagctcgacgatctgcattccgctgtcaagggttcttttttccatggtttcacctccgatcaaacacaagttacgaaactaaacaattgtattatatcacaaaaaataaaaaaagacaaattatttattatacagattttacataagcgtcggtttttgtttccaaatcatcaatattatagcgtttttttcatttataatccaacaaatttatacttaatgtgcaaatacgtgacattatttatatcacgaattgtgacattcgtcaaaaaagcgaaactttctcccccgttaagatatttttatgatttaaagtgtaaaagtttttgaatttttttgcaaaaccccttgacaaaatgtattaaaaggagtaggataaacaaaaatcaaggaggacacagatatgatccgcatgaatatcttttcatattattattactttatgacggactgtctgtgtgcttgctgaattgattttaacaggttaacagacagcccgcaaattgttatgtgcagaaattgcaaaataacagttgcgggttttttcatgaaatttttcggagggatagtatggcccacataaacaaggcaagacagcaaatcaacgacatcgacgcgcagatggccgagcttttctgccgtcgaatggacgcggtaaaagaggttgggatttataaaaaggagcgcgggcttcccattttcaatttcgaaagggaacgtcaggtggtcgccgcaggcgcaaagcgggtggaggatcccgactatcgcgactattacgtcaacttcatcgaatatgttatggagctgtcaaagcggtatcaaagccgtcttatggacggcatgaagatagcctacagcggagttgagggcgcctttgccaacattgcggccaaaaagattttcaaaaacggaaacccccttccctatcccgatttcaaggctgcctatgaggcggtggaaaagggagaatgcgactgcgccgtgctgcccattgaaaacagctacaacggcgacgtgggacaggttatggaccttgcctttttcggcggactccacattcaccagctccgagaaattgagatcgtgcaaaatctgctcggcagcaaaaacgcctccctcgaggacattaaagaggtgataagccaccctcaggctctcggacaatgcggagaatatatccaccgtcacggctttaaggtcaccgaatcggtcaacacggcggtggccgccatggaggtggcgggctcgggcagaaccgacattgccgccatcggcagcgagcttgcggccgaaaagcacggccttaaaatcctcgactcccacataaacgaatcgggcggaaacacaacgagatttgcggtgttttcaaagcttgaaaagctgccctcaaaggacgacgaccattttgtcatggttttcaccgtgcgaaacgaggcgggcgccttgggcaaggccataaacatcatcggccgccacggctttaacctttcctctctcaaaagccgtcccacaaaaaagcttatctggacatactactttttcgccgagggcgacggaaacataaacagcgacgccggcaaaaaaatgcttgccgagctgtcggaatgctgttccgaccttaaggttctcggaagtttttcaaaggagtgagcaaaatgaaggtaaatacccaaagcggaagctatgaaataaccgtcatgcacggcggacttagccgcgtcgacgaatttttctctcttaacagaaaggttctcatcgtcaccgactatgacgtgccggcaagctatgccaaaaccgtggcggccaagtgcaaggagcccttcataaccgccattccctcgggcgagcgttcaaaaagccttgaaaactataaaatgctgcttgaaaaaatggttgaaaacggttttaccagaaccgactgcgtcgtggccgtgggcggcggcgttgtgggcgacctttcgggatttgttgcggcaagctttatgcgaggggtggatttttacaacattcccaccaccgtgctttcccaggtcgactcctctgtcggcggcaaaacggccatagatttttgcggaattaaaaatatcgtcggcgccttttggcagccgaagggggttcttatcgaccccgacaccctcaagaccctttcctcccgtcaaatttcaaacggccttgccgaggcggtgaaaatggcggccacctgcgacgccgagcttttctcggtctttgaaaaagaggatttttcggtggaaaaatatctcgacatgataattccgagagccgttggaataaagaaaaacgtagttgaacaggacgaaaaggaaaacggccttcgccgtgtgctcaatttcggacacaccctcgcccatggggtcgaggcaaagaaaaaggaccttttccacggggaatgcgttgccatgggcatggtccccatgtgcgctcccggcgcccgcaagcgcatcgtttcggtgctttcccgcctttcccttcccacaagaattcccgtttcggccgacgacattttggaggccatgggccacgacaaaaagcggcagggcgacaaaatcacggtggtttatgttcccgaaatcggacgctttgagtttagggaaatggaattttccgactttgccgagcacatgaaaagggcggtgggacaatgagaaacaccttcggaaacgccctctgcgtcacgatatacggcgaaagccacggaaaaagcatcggcgccgtcatagacgggctgccctcgggacttgaggttaacctcgattatataaatgaaaagctgcttctccgccgtcccgccggcgcaatctccaccgcaagaagagagcccgaccccatatcctttgaaagcggagtgtttgaaggaaagaccaccggcacccccctttgcatcagaatagaaaacagcgacacaaaatccaaggattattccgacatgaaatcggttgcccgacccggtcacgccgatttctcgggattttgcagatatgacggctacggcgactatcgcggcggcggccacttcagcgggcgcataacggcggctctcgtggcggcggcaagcatcgtcagatactcccttgagcagaaggatattttgatcggctctcacataaaggaaattcacggggtttacgaccgcggcttttgtgacgcggcggccgacacaagggcggtggaaaatgagccctttgcccttctcgaccaaagcaaaaaacaagccatggaggcggaaattttaaaggcaaagcaaaacctcgacagcgtcggcggtgtgcttgaaacggcggtttgcggacttcccgcggggcttggagaaccctggttcgactcggtggaaagcctgatttccaaaggggttttcgccgttcccgccgtcaagggaatagagttcggagagggcttcggctttgcaaagctctgcggcagcgaggccaacgacccattcgacatcaaagaaggaaaaatcgtaacctccaccaaccgcaacggaggaatcaacggcggcataacaaacggcgccgacataattttcaaaacggtcataaaacccaccccaaccatttcacagcctcagcaaacggtggattttgtccaaaacaaaaaaactgttctcgccgcaaagggccgccatgacccctgcatagtgcaccgagcgagagtggttatcgacagcgtggccgcccttgccgtggctgatcttctgaccatgaaatacggaacggaatggatgaaaaacatatgaaatacggtcttatcggcgaaaaactcggacacagcttttcggctgaaatacataaacagcttgccgactatgactataagctcagggaagtgagcagggaggaattcgacggttttatgaaagctcgggatttttccgcaataaacgtcaccattccctataagcaggatgtcatcccctatctgtcgtatataagcgacacggcaaaacaaatcggcgccgtcaacacgattgtgaataaggacggaaagctttacggatataacaccgatttttcgggaatgaaggcgctcatacaaaaaaacggtatcgaccttagaggcaaaaaggtgctcatcgcaggcagcggcggcacctccaaaaccgcctttgcggtggcctcctccctcaaagcggcagaggtttaccgtctgtcaagaacgccaagggacgggcttataagctatgacgaggcaaaatcccttcattccgacgccgacgtcattataaacaccacccccgccggaatgttcccgaaccttgagagcgaggctctcgacacggacgatttcaaaaatctttcgggcgttatcgacgcggtttacaatcccctgagaagccgccttgtgcaaaaggcacttgacaagggactcgccgccgagggagggctttatatgctcgtggctcaggccgcctttgcctgtgaaaaatttatcgacacaaaaattccgacgcaaaaaatcaaggatattttttcgtcacttgagcggcagaaggaaagcattgtgctggtgggtatgcccggcagcgggaaaaccacaatcggcaaagagcttgcaaggcagctttgccgcgaatttgtcgacaccgacgaccttataagggaaaaatacggcgacatctcggaaattttccgccaaaagggcgaggattatttccgcggcattgaaagcgaggtcattgccgaaacggccaaaaaatgcggccttgtaatcgccacgggaggtggagcggtgctgaagccgcaaaatattttccgccttcgtcagaacggaaaaatttattttctcgaccgtcccctcgagcagataatccccacctccgaccgtcccctcgccctcgacgcagaggccgtaaaactccgctatgacgagcgatacggcatttatcttgcggcgggaaagcaaataaagatgaacggcattgtaagcgacgccgtcaagacaattattgaggattttgaagcatgaacatacttgtcataaacggacccaacataaatatgctgggcataagagagcccgacatttacggcagagagacctttgaggacctttgcaataaaatcgaaaattacgcaaaggaaaaaaacatcaatgtaaagctctatcaatccaatcacgagggcgaccttgtggacgaaatacaggcggcctatcaaaaattcgacggaatagtcataaatcccggcgcatacacccacacaagcgtggcgctgcttgacgccgtcaaggcggtgggcataaaaaccgtggaggttcatatttccgacgtggcctccagagaggatttccgtcagataagctacattaggaaggccgcaatcgccaccgttgcggggctcggaaccgacggctatttaaaggccatagacattcttttcgaaagcgagggagcataatgaaagcggttttctccccctccttccccttcggagaggttttcgccccgccatccaaaagcatggctcacagataccttatatgcggagccttaagcgagcaaagcagggtgagcggccttgccatgagcgaggacataaaggcgacggccgattgtctgaaagcgctgggcagccgtgtggattttgaaaatgacaccgctcttgtgggcggcctttgcccgaaagaggaggcgcagctcgactgcagagaaagcggctccacccttcgttttatgctgcctcttgcccttctcggcggcaaagaaataacgatgacaggctctccccgccttatggagcgaggagccgggctttatgagcaaatgtgcggcgagcacgggctgttttttgaaaacaaggacggcaaaatcacggtcaagggaccgctcaagcccggtaaatattcaatcgacggaagtctttcgagccagtacttcagcggaatgatttttgccctttccacccttgacggcgacagcgagcttaaggtaaaaggcaagctgcaaagccgaccctatgttaacatgaccattaaggcgcttgccgatttcggtgttaaaatcgagcgtattcccggcggatttttcatccccggcgggcaaaaatttttatcaagtcgagggcgactggtcaaatgcggcctttctgtcggctctttccgacaaggttatcgtcaaaggccttgacgagcacagccttcagggggacaagctctatccccagcttttcaaaaacgtgggcagctatcaaatcgacctttccgacacccccgaccttgcccccgtgcttttcgccgttgcggcccttaaggacaagggcgactttgtgggcacaaggcggcttaaaatcaaggaaagcgaccgcgccgaggccatgaaaaacgagcttttgaagttcggcgtcaacacgacgattttcgacgaccgcgtcattgtctcgggcaagctcaagaccccctcggccgagctttacggccacaacgatcaccgaatcgtcatggcgctttcggtgcttgcggcaagggtcggcggcgttatagacggtgccgaggccgtgagcaaaagctttcccgactttttcgacgtcataaaaaaactgaatgtgaaggtgaacttaaccgatgcttgacaaaaaccttaacatacttatagtgggtctcggactcatgggaggcagttatgccaaggcgctgaccgaaaacggatataaggtaaatgccataacgaaaaatcccgaggacgtcgactttgcccttaagcacggatttgtgcaaaatgccgtttcacatgtggacgggcagcttgtcggttcggccgaccttgtgattttcgccctttatccccacatttttgtggaatggataaaggaatatcagcaccttttcaaaagcggagtcatcatttccgacgtgaccggcgtcaagggctgtatcgtggataaaattcagtcgattctccgtgacgatgccgaatttatcgccgctcatcccatggccggccgcgagcgcagcggaatagagtttgccgactcctccattttcaaggtcgcaaactacatcgtcaccccaaccgacaacaacaccgaaaaggccatcgagctttgcaaagacctcggagaggcgcttggctttgcacacatttccgagctttcccccgcccgccacgacgaaataatcgcttttctttcacagctcacccattgcattgccgtgtcgcttatgtgttccagcgacgatcacggccttgtcaactacaccggcgactccttcagggatttgacccgaatcgcccgcataaacgacgaaatgtggagcgagctgtttctcgacaacaaggaggcactgcttaaggaaatgaaaatgttccgccaaagctttgacgccatggaaaaggcggttgaacagggagaccgcgaaacgctcagagaaatgatgagaacctccaccctgcgccgcggatggtttgacagataaaattgagatttggaaggtattttttatgaacaacatgaatttcaggcgaaagcttcccattcctaaggatttaaaggccatgtatcccgccaccgagcaaatgcttgcggttaaggacagacgcgccgaggagataaaaaatattttttcggggaaggacaaccgttttatactcgttatcggcccctgctcggccgacaatcccgaggccgtccttgactatatgtcccgccttgcacgcctttcggaaaaggtcggcgacaaaatattcatgattccgagaatctacaccaacaagccgagaaccaccggcgacggctataagggacttcttcatcagcccgaccccgaggcaaagccggatatgctcagcggcattatcgccataagaaagcttcacatgaaggctcttaaggactacggcttcacctgcgccgacgaaatgctttatcccgaaaatcacagatatttaaacgaccttttggcctatgtcgccgtgggagcgcggtcggtggaaaatcagcagcacagattgacggcaagcggtctcgacattcccgtgggcatgaaaaaccccaccggcggagaccttcacgtcatgatgaattccataaccgccgctcaacacccccacaccttcatctaccgaggctgggaggtggaaagcagcggcaatccccttgcccacgccattctccgcggcagccttgacaccagcggccattatgtttccaattatcactatgaaaatcttctggagcttttcgacctttatgccgaaaacggacttaaaaatccgtcggtcattgtcgacgtcaaccacgcaaactcgggcaaaaaattcatggagcaaataagaatttccaaaaacgtggtggagtcctgcaatctcaattccgacatcagaggccttgtgaaggggcttatgatagaaagctacatcgccgacggcgcccaaaagatcggtcagcacgaatacggcaagtccataaccgacccctgtctcggttgggaaaagaccgaaaagcttgtgcttgaaatcgccgactcgataaaataaatatcttcatgaaaaaaccgcttggaaagtaaatttccaagcggttttaatttttgttttaagcggccgagatataaagaatatcggaggaacgctttgaaagcgtgagctccacgcccgacatcataagctgtttgccggtcgccgtcaccttaagggaggtgtcggtcgaagtgacggtatagctcttgtcggggtcaagacccttaaatctcacagactttgttgtaaagtcggcgcgctctctggcatagacaatggcatagcccttgttctgctccgagttaaagaactcataggacagccaatcggtggtgccgatgctccattcggtgagctcataatactcgtcgtagatgaagtcctgaagtcccttgacctcctcagagaggcttgcgatttgattccaatcaacgctgccgttgtcggtggggacattgtaaataaactctgtccacggacggaaggagctgcggaggttatatttgccctcggctcccgtgcccgccgcgccggaggtgttggctccgaaatagggcagccagcgatacataaccatggcgccgccctgctttgcgttccatgcggaataaagggcgtcggtgggatgaaggaacacggctctgcgcagcgactgaaggtcgtttcggttgcctcccgaggcgcagcagtcgatgaaatatcccgcgtcgataaggtcgtcccagaatttatagtgtccctgaacactcaggttttcggttatacccttacggttttcggtgtcgccgagaacccaatattcggcgggcatgatgttgaagtcctcgcgatagaggtcgaaattcgccgccttaagtatgcttataacgcggtttgtgacccattctcttgcctcgtcgttgcccaggtttaccatgtgttgagccgccgactcaaagccgaatgcgccgtaatcggtcatccactcctttttaagggtagagccgtcgtccttaaggtcgtttacattaagagcaaagcgctcgggctcgaaccaaagcagcacctttttgcccttttcatgagcgttttcgccaacctcggaaaagtcgccgtagcggctggacacagtccagttgcccaccgccgcccaggaggaggtggtcttgtcgtcgtcaaaggatgtgggataccaaccggcgtctatccaccaccagttaaggtcaacgcccttgtcaaggagatagttgaactgataaatctgagtctgctgattgccggttttgttggtgtcctctccgccggtgaccgaggctccgcggccgccctgcattatgtcgccgttttggtccttgcgcatattgcattcggaaatccactttctccaaaggttggccgaacggtcgagatttcgtccgtcgtattccacaaaggcggcaagaggagtgcaggcgcgctcgccggtcttaaggtaggtgtcaaaggtctgctgcttggcggtcacggtggtgacgctgccgtcaaaggcaatgtccgactgccatgttcccgaccagccgattgccataaaggttccttcgtttccgtgctcgatgttatagtaggggaaaacgttttcggtggaacgtccggtggagggggcgaaggtgtattcgtcgccgctctttaaataaatttctctgttcatataaggagcggtgtttgcgttgttaatgtcggaataggaggttccgatatagggatttgctccatcaaaggaggcctcggcggccacggcgtcggtaatctgagccgaatttccgttgcgggaaagctcaattttaccaaccgagctctgaagaatgagcagtgcgtcggtaacgcttatgtcgccggtggaatcggcgtcggcggcaaagattttttcgccctcaaggccgattttgcccaccgatttctgaagaacgagcagggcgtcggtaacggttattccgccgtcaaggtcgacgtcgccgtaaagaggattggtgaaataaatcgtccattcataggcggcatagtcgggataggaggaaaattccgccgtcacgtcaagaccgctttccttgttgtgaagatagacgttggtgtttttcttgccgtagtcggcctcctccgaggtctctacctgcattttgacaaaatcgtcgtcggaaaagccgttataagtctttccgtctattgtcaccgaggatggaagggttgaaaggtcggaaatatatccgtttatcttgtcctgagcctttttcttttcgctctcggtaaacgtgccggtgttgtcataattttcttccggctcggggctttgggaaatatccttaaagcaggatgccgaactgccctcaaaggtgacgctcatgtcggggaaggcgcccgaatagcttccgtcggcatagacatagccgaacttgctgcttgacgcttttgtatcaagctcatcgtaaacgacaagcacatactctcccgcctcggcggtcttgtcgagaacgacgttcagccttccgcccgaaatctcaagctgctcgtttttataaacgggggtggcctgaatcgaacggttgagagaatatacatatctgtaaagggcaacctcttttgctcccgatgaggtcgtggcaagagaaatttcagagaatttttcggcggccgagaaacgggcggcaaaattatattttgcgctgacattctgtgccgagccggaggcaaattcgcttcggctgtttttgctcagcgaggcctcgcttttgcaaagtatcggctctatccaatcggctgcgttggccgaaataccctcggtggtcatggcgcggagggtcagcgtcgaggcgtttgcgggaatgtccgccgtgattatctgaacgtcgccgggagccatttctcttgatgtcgccacctggcggccgtcggcataaacataaaatttcacgcggttttccacattgccgaaatcgtcgcggccgacagttgcgcggaagtaggtatagtcaaaggccgaaatgtcgaaattggcgtccatatttccgcccaccgtgggaacacagcagattccctcgtttgactgaacccgtccgcttgccaccgaaagcaccttgcccaggtggttttcgttgcggtaatatgccgacgaggcataagaaccggccaggaactgaagctcgttaagctttatgatttcgccggaggggcagacgagctcggtggaatagacgtccttttcgcttgacaactcgcgggattttatttccataaggtttcttccgcccgcaaatccgcttgccttaaaggaaacatggccgaaaccgtctttggaaacggctgtgtccgtctcattgccgttgagacaaacgctcaaattccccgccgaacgtgagtttccgcgaatgtcgagaccgtaggaggcaatggtcaggtcgggataaatctgaggagaggtaatgttcatttctcccctgtcaagctcgcgatagagggtgggctcaaaccagcccgagctgtcgcagttgtaaaagtcgttgctcatgttaagctcgatggtgagaattttgacccccgtaatgtccaccgaggtgaagaaatattcatggaaatcaaggcggtttgtgctgcttaaaagctcgccgtcgccgtagatataaaattccacataaaagctgttgttcatatcataggggatccacttgtcacgcttgcccacataggtcgaaaagcgcgtatatccaagccccgtcaaatcatattttgcaacggcgctggtggtgggattggggtgggaagcgattcccttgttaaactgatgacccgccgtgacgagatcgtcggccttggggtttgtgtcaaagccctgtcccgcgtcgaggaagcaggtgggaacgcccgtcagcgaacggctttccaaaaagtaggtttttcccgcattttcggaaatttctccctcaaaggtaaggcgcgcctcgccccatgcgctgcggcagccggccgcctcggaggtgggagtgcagcgcagcacaagagatttatacccttcgaccgaaacgtcgatttcctcggtcgtgttaacatcggttatttcggcggatttataaagctcggttccgtcgccgaacaccgagaagacaacgcccttcggggaaacgccgtcctcgggcaaaagaccgacggtggtcttaaatctgcttgccgtcgttcccgaaaggttgaaatgaacctgagaggcaagggcgcgggtgtatgaagtgtactgaaccgacgtgggctttaccacaagggcctttttctgaatttttccgcccagcttgacgctctttccgtcggccttgtcgcgggaaacgtccccgtcgttggtggtcccttggaaattcatttcggaaagataaagagtgccgttttcatcggaggcggggtcgatataaagcgacgggtcggcaaaaaccgcaacctcgccctcgtttccgtcgccgccgtcgtttgatatgaggcgtatgcgtttaacgccttcggtgtcgcaggtgaaacggtaatactcgccaagtcccattttttccgaggcgaatatttccttaaaaccgtctcccttatccaccgcgattttgaaaaccgccttgccggccttgcttgtcgaaagaacggtgtcaagaccgaaataaaccgaaaagcggcttgccttaagggaaacaatttcatactgcatataggaatccatgccggtggtgttaaggctcagcgccgtgtcaaagccgaatccgtcgatgtcggcagatccgaggccgcccttttcgccgcccagcattctggtctcgtcggtgtcgccgtatatggccgagaatttgttggtggacgccgttcccttaagtccgagaagagaaaccttgcggtaatttgtgccgtcggcctcttgcccctttttaagaacgggggtgaggaaggccgatgtatcaccgacggcgtttgcgcccggctcgaccttaaggcaaaggtcggatgcgccggtaatgtcggccgaaatcgttttaaccgatgtgtcggtcacatttccgctgttatatacctcttttccgtcggcgagaaccttaaaggtcacgccgtcgccgccgttttcaagctttacggcctcggaggaaagggaggtatagcccatgcccgatatgtcatagtggacaaaggccgaataattgtcgccgggaaccagcttgacgctgtcggctttttcgcttcccgcggccgaaacgctctcgatcgtggcagctgcgaaaccgcttacacggctgctttccatggcaatcttcccgagtcggtcgccctcccccgagtcggctgctttgagcgctcccatgtcggcataaaccgaacagaaggaggaggctatcataacggccgccgttgccagcccgacgattttttgtcgggtctttttctgctttttcattttatcgccccttttggctgtgccgaaagctgcggctcttgcccgcatttcggctttaaaagaattgccgcacctaaaaaaagcgtgggctcctgcgcaataaatttaacacattttatgcacacagtcaattatttatttggatttttttcttcctttttgcgcaaaaagtccaaacgggttttcttccgaaaaagaaaaaccgttttatcggctttctttgacaaaacggtctttgtttatgaatttttcgggcgaagataatttaaaaatctctttgccgcgggggacaaccgctcgacatttttaactgctatgcctatgtcgcggaaataccgttccttaagcgggcgaatttcaagattataaggtatgcgttttagtatcatggagggcagaattcccatgccgagtcccttttcggccatggccataacggcaaaatcctcccatgtggtaaaccggattttgggcttgactccccacttttcgaggatttcgctgacctcggtttttcctccgtgctcgagcagcaaaaagggctcgttttcaagctgttttatgtccaccgcgctctgctccgcaagcggatgtcccgtcggcataacgaccacatattcgtcccgctcgacaggaaaaaagtcaaaatcctttatgggaagcggcagaaaaccgcagtccaccctcccttcatcgatccagttcctcacgtcggtataatccccgagcagcatttcgcactcgattttgggatagtccttttgaaattttccgaatatgtcgggcagcaggtttatggccgcgcttgcaaaggttccgatgcgtacaaatccgctttccagcccccgcaggctgtcggcatattgctcaagctcgtcacagt

SEQ ID NO: 3447 - DNA, 1600 bp, Unknown
  16S sequences of unknown bacteria
gtgcctggctgccagtcagcttgccgcgcagcttggacgcatgcacatcgatgatccgcgtgtccccgtcataatcaaagccccacagcgcattgaggatctcattgcgggaaagcaccgtttccggatgccgcatgaaatgatccatgagatcgaattccttgcgggtgagggggatctctgtctgggcgatgaggaagcggcggctgcgttcatcgagcgtaaggtcccgatagtgcaggatcgctttgtcctctggctcgctgaggggcctgccctgcagatgcttgcggatgcggatctgcagctcccggggcgaaaacggtttgcgcagatagtcgtcgacgccggcggcaaaggcttcttccagatcgttgtcgccgtctttcgccgtcaacatgaacaagacgctgcggatgtttctggcacgcagggcgcgggtcagcgccaatccgttcatccccggcatcatccagtcgatgatgatcaggtcataggtgcgctggcaggcgggcgcgaatccgcgtcttcggcatcgtcgactgcgaatccggccttgagcagatcatagccgatgatcttgcgcacatcttcattatcatcgatcaccaggatatgtttcatcattcatcactccttgctattcattaaatcacatcaacgtaaagtttgtgttaagcgggagtaaaaagtccgtatgatctgaaaaacacaccgtctgcggcgtgcattgcgccttggcggtgtgcttttttcttatttttcgatcagcagctgagcgatctgcacggcattggtggctgcgcctttgcgcacctggtcgccgcagcaccagaaggtcagggaatgatgcgtgtcatcggagatgtcctcacgcaggcgtcccacgaagacgagatcctgatcgctggtttccagcggcatcggatagcggctgtgcgcaggatcgtcgacgacgcgtacgccgggcgcctgggccagcagcgctcttgcctgttccacatcgacctctcgctcgaattcgatggtgatgctttcggagtgagagcgcatgactggcacgcgcacgcaagtgcagttgacgcgcagctgcggcaggtgcatgatcttgcgtccttcgttttgcatcttcatctcctcgctggagtatccctgggcattgaatccgccgatctgcgggatcaggttgcaggcgatcgggtactggaaggtctgcggtgcagggatctcgctgccttcgctgagcgacttcatctgctcgttcagctcgcggatgccgcctacgccggcgccgctgaccgcctggtaagtcgagacgatcatgcgccggatcccgaaggcctgatgcagcggccatgcggccaccagcgcgatgatggtggcgcagttggggttggcgatgatgccgtgatgcgcatgcacatcctgcgggttgatctccgggatgatgagcgggacatcgtcgtccagacggtaggcagagctgttgtccaccaccactgcgccttttgcggcagcgatcggcagatatttcatggcgatgtcgttttcggccgcgcccagcacgatatcgacgccgtcaaagctgtcttcgcgcgcc

SEQ ID NO: 3448 - DNA, 4259 bp, Unknown
  16S sequences of unknown bacteria
acaccatgcacgcgaccgcagaggaggcgcgcgaggagaccattcgtatgctcaacgtctacgccgacttccacgagaaggatctcgccatcccggtcataaagggcgcgaagacaccgagcgacaagttcgccggagccgaggacacatacgcgatagaagctctcatgcatgacggcaaggcgctccaggcgggaacctcgcactatttcggagacggcttcgcgagggcgttcggcatcacatacgccgacaaagaaaacaagctcgttcacccgttccaaacatcatggggaacaacgacgagaatgatcggcggaatcatcatgacccacggcgacgacagcgggctcgttcttccgcctgcggtcgctccgatacaggttgtaatagttccgatcgcggctcacaagccgggcgttatcgacactgcggcggctctcgccgacagacttaaggggaaggtcagagtcaagctcgacgattcggacaactcgcccggatggaagttcgcggagtacgagatgaagggcgttccgctccgcatagagatcggtccgcgcgacatcgaggcaaatcagtgcgtcatggtaacgcgccacaacggcgagaagactgtcgtatcgctcgacgagctcgagaccgcggtcgacaagaagcttcaggaagtccacgacggaatgtacgcgaaggctctcgcgaaccgtcagcgccgcacatacgactgcaggacgatcgaagagatcaaggaaaagctcgcggaaggcggagacggcttcgtccgcgcgatgtggtgcggagatcccgagtgcgaggacaaggtcaaggccgagaccggcgtcggttcccgctgcatcccgctcgagcaggagcgcatctccgagacctgcgtctgctgcggaaagcccgcgaagtcgctcgtttactgggctaaagcgtattgatccgcgcgtgtctgcgtaagtgacgatctgctatggaagaaattgtgggttgattcgcggcacggaatatggtaaaataggcatacggtacaaacgtgatatccggtggatatcaaataaaccgtatgccttttgttcatatccgatgcgtcccggcagcggctgaaaaccggagcgcccgcctgaagtcacagattgaaagataaatctttcaatccagtgttttgtggttctcattgtccgccgacaatgtaaactgcgaaatgagagaaaggacaagcacaatgaaaaaactcacaaaaacgataatcaccgccctcatagcgtcatcgctcgccgcccccgcgctctcggcttacgagaaagtacacatcagtgtgaacggaaccgtgacggacatcgacgcgaggctcatcggttcgacgacatatgtcgatatcgaggacacaaaacgctcgctcggcgcggcgtccggtgagaatcttgaaattcacgcggaggtgggtgaaccgtacatagcgtgctccgggcgatatataggcggcaatgactgtctcgaactcgacagggaaactttcgtcccggtccgctcgctcgcgaagatttacggcgcggacgtcgaatggacagatgagacacgctcggtcgccctgacattgaccggcacggcgctcgcgtccggagacgacttctatatcgcggacgaggtctactggctgtcacggataatcaacgccgaggcggaaggcgaaccgatggaaggaaagattctcgtcggcaacgtgatcctcaaccgcgtgcacagcggcgagtttccggacagtatctacgacgtgatattcgaccggaaatacgccgtccagttcacgccgaccgcgaacggcaggatatggaacgagccgaacgcggacagcgtcaccgccgcgaagatatgtctcgacgcgtactacatatcccgcgacgcgctgtacttcctgaacccgcgcatcgcgacaaacttctggataccggcgaaccggcagttcctgctttcggtcggtgggcacgatttctactcgtgaaaactctctcccggtgtatgtttggtcggttgtcacaaaacgcgtgacttgttttgtgatatattcacaaatagtgtttgtaatgtcaatcaggtattgacaagcggatgtttatactgtataatgttgtcagtatgcttatcgcatattgagacaatatatcatattatttctgaaagggaactgccatgaaacatcctacgagactgcttacactcatgcttgcgaccctcattgccgcgtcctcctgcggcagcgtaaccgacagcggcgacaccaatgtgccgcagggctccgactccgagtccatcgatacatcagaaaccactcctgtcagcgaagtgcctgtgatcagcgacgacctccctgacgccgactatggcgggtatacggtccgggtgctcatgcgcaacagcacctatccggactggataggcgatatgttcagcgaagccgaggacggcgacgtactgaacgacgcgatatacaggcggaacagagctgtatgcgaacgcttcaacgtcgagttcgagctgataaagagttcgaacaacaactatgagaccgacgccgtcagctcaatcgtcgccggtgacgacgcgtatgacatcatcgttccgcacgcgcgcgccgccttcgtgtacgccgagcagggtctctgccttgactggaagacgcagctgacatatgtcgatctcgacaaaccgtggtgggatcaggacgcgaaaaagagcttcgacatcaacgggaagctgttcacaatgatcggcgatatcagctatcaggcgctcgcacagaccgactgcatgatgttcaacaagaagctgtttgacaaatataacgaggaatatccttaccagaaggttctcgacaacaagtggacgttcgatgagttctcgcgtctcgttctcctttgctccgacgacctcaacggagacggatcattcgagccggacaaggatctttacggctacgcgacctacatctgggtcggtccgatgcaggcgctgaccaccggaggcggaagaatagtcacggcggataaggacggcggtctcgcgctgacaataaacagcgagagaaacgtctcgatctacgaagactatttcgcgcttctcgcgaacaagaactgctatctcgagctgaaccgcgactcgaagcagagtgtttacgactgtaaaaaggtgttctctgaaggccgcgctctcatgatggacggaaatctgaacgacatatcctatctgcgcgacatgaaggacgatttcggaatagttccgtggccgaaatacgatacgacctgtgaaaaatactataccaacgtcgactccggcaccaaccttttccttgttccgataacgaatccggatcccgaaagaatatcggttattctcgaggctctctgcgcggaaggctacagaagcgtcatccccgcgtattatgaggtggctctgcaaaagaaatacacacgtgacgatctttcggtacagatgctcgatatcataaaggaggggcgcgtgttcgacataggttactactactgtggaggaactttcggaagcgccgggtacaacctcgccaacagcaccgatcgcagcttctcgtcctactacgcgaaaaacgagaaatccgtcaacgccgagctagggaaaaagctcgaaaaatacggaaaataagcatcttctgaaaaaggctgcctgatacacgggcagccttttttcgcggattctgtcagttgtcgaagaatatatcctcaatacgcgcgcagatctcgtgatataccggcagatgatattcctgcacacgataggtctcggtcgacggtacctttatcgcgtggtcgcagatctccgcgagctttcctccggtctttccggtgagggctatcgtcttcaccccgatgcacttcgcgaggtcggcggcgtggcagaggttcttcgcatttccggaggtcgagataagaagcgcggtatcaccgggcttcgcgagaccgtagagagtctgagcgactatgtactcgccgtcgacgtcgttgagataagccgtcggaagagcgagtccgccggacagcgagaccgccgggagagccccctgaagcttcgccgccagctccgccgggatacgctcatccgtcaccggacgcctctttttgaagcccttcatgagttcccccacgatgtgctccgagtcggacgcgctcccgccgtttcccgccgtcatcagttttccgccgtttttgtagctgtccgctatcata

SEQ ID NO: 3449 - DNA, 2894 bp, Unknown
  16S sequences of unknown bacteria
cggttttcaagaccgccgcgttatgaccacttcgctacctctccatacctctccaaggcgaagcgcttcgttcagcgcagatagaataatatcattaatatctgcatctgtcaagcagttttttcaactttttttcatctttttcttttttctcgttttttgtgtatttcacgtttttccggaatatctgaaatacacgaaaacaccagccttatatcttataatgataccaagctcaaaaggtcaaaaagcattccatgctctcacaatccgtttcgcgacctgtttactgttcgccctgctgctccagaattgcccttgcaaaaaccagatcctccggtgtggtgatcttgatattgttataagagccttcaatcagctttactgtatttccggtatattccgctaccattgcgtcgtctgtcaccttctgatccagtgtccccgctgcctcatcctgcatcagtgtatcatatgcgtcacgaatcaggctatatcggaacgcctgtggtgtctggatgctccagagcagtgagcggtccggtgtcgcctgtacgcaccccgtatccggatttgcaatcttgatcgtatccttcacaggcataccgaccacgcatgcattccaaaccggaagcgcatctgcgagacgggtcagcatcgcctcatctaaaaacggccttgccccgtcatgaatcagaacataatcacagtccccggctaccttcagtccttcatacaccgaatgatagcgttcttttccgccttctgtcacacatgcaatcttctgaaacccgtaggtatccacaaacagcgctttgcactgctgctgttcgcctttgccgcacacaagaataatctcatctatccggctgcttttttccagcacagcaagcgaataccagagcaccggatactccccgagcagaagatactgctttttcactttactgttcatccggcttccggatccaccggcaagtacaatcgctgttgtcttcataatccctccatctcgaaccattcagcaagtccacccgttgcctgtcgctttgcacactgaaagcagaaaattcccacaatataactacacaggcatcttacccgattcggtttctctgtccttttaccgttcacccagcttcagattcggcactgcgttcagatcataaccggaacgggttccctgcatatactcataataaccggctgcgccaatcattgccgcattgtcggtgcagaaaattggtgacgggcggtaaaaacgaatgccgttttctgcacaggcctgctccatggccatccgcagcgtcccgtttgaagccactccgcccgcaatcgcaagcttattcaatccagattcctttactgccagcatcgcatgctctaccagtacatcgcagactgccttttgaaaagaagctgccacatccgcacggtttacctcgattcctttcatctggcaaccattcagataattcaaaacagcagacttcaggccgctgaagctaaaatcatacggtgcatctgcaatcttggccttcggaaaatgaatggcttctgcatttccctccttagaaaggcggtcaatctttggtcctcccggatatccgagtcctatggcacgcgccactttatcaaatgcctctcctgccgcatcatcgcgtgtacggccgagaatctcataagtaccataatccgccacttttaccagatgtgtatggccgccggaaacaaccaggcagataaacggtggctccagatccttattttcaatatagtttgcagagatatgcccttcaatatgatgtaccccaacgagtggaatattcctggcaaagctgatcgcctttgcctctgccacgccgaccagcagcgcgccgaccagaccagggccataggtaactgcaatggcatccagatcatccagcgtcgtatcggactccttcagcgcctccgtaatgacctgattgattttctcgatgtgttttctggatgcaatttccggaaccacgccgccataaagcttgtgcagttcaatctgagaagaaatcacattcgacaaaacgtcccttccatttttcacaaccgctgccgccgtctcatcgcaggaactctcgattgcaagtattaatacatccttttccattttcattctccattctctgtatatctattcttcctcgaaatccagctccgttgattttccgtccttgcccggatatgtgcgcggaaaaattttgcgtacactctccatatagtcttccggacggacaagcgacggactgtagtgcgtcagccacatctccttcggctgagcctgcttcgccagctgcgcagcctccacaaatgtcatatgcttgtagccgacggccttctgcgatttctccggctccccatacatcccctcacagataaacagatctgcatcctttgcatgctgtgcgatcgccgccaccggacgggtatccgtgcaataggctaccttcagtccctttctctgcggcccgagcacatcttccggatgatacgtatgtccatccgcctcgattgtctcgcctttttgcagacgattccagaacttcatcggaatctccgccgcctttgcgcgctccacgtcaaatcttccggtccgtgcaatctctaccgtatagccatagcaaatcacattatgattcacccgaaatgcccgaatccgatacccgtgttcctcaaatatctgctcattcccctgaatttctttgtaaataatcggaaacggaagctccggtgcaatcacacgaagcgcatttacgacacgctccagccccttcggcccgatcagggtcagcggctccgtgcggtccgcatttcccatcgtcagaagcagccccggaaggccgctgatatgatctcca

SEQ ID NO: 3450 - DNA, 6166 bp, Unknown
  16S sequences of unknown bacteria
aaaagtgctaattcaaataccgcacttttttcggtcaattatattgtatcaggagaatatttatgaacgactgcgttttttgcaaaatcgtatgcggggaaatcccatcgcagaagctttacgaggacgacgacctgatcgtaatcagggatatcgaaccgaaagctaagctgcattatttatgtattccgaaggagcatttcgcgctgctgtcggaaatggacgagggaagggcggagcttttgaaacgctgtttccaaaaaatttccgacctgcaaaagcagctcggcctggaggacggctatcgcatcatcgtcaatcagggcgaaaacggggggcagacggtgcttcatctgcacattcatgttttgggcggcgagcgcttgacgggattttaatcgtttgaggagagaaaataatggataatcaggaatacggaaaggtttccaaggaaatcagaaactacaaaattgcgcgcatgaacgttttaggctttattgcctttacgattttgaacctgtttatgctgtttgttgttgacagatattttttattcagtgtctataccgttttgttatgttttatgatgggcgttattttgaaaggagcggcgattgaggccggcgcgacttcccccaacctctatctgggaatgggtatcgcgtttgggctggctattctggcggtgtttttcgtgatgtggctgctttccaaaaagcgccgctgggcgatgatcgtgcttctcgtcctcttttcgctcgattccgcagtggtgctgggcggtatgatttatttgggagattttacgatgctcatcgatctcgccattcacggcgtcatgctctattatctcatattgggcgtgaaagcttcgggcgagcttcaaaagcatttccccgaaggtgtcagtctgacggtcgagcgtctggacgaagcctatcgtctcgagacgggtaccgatcctgtgacgggcgcgcccgtgaacggtattgcggccgccgaagcggctcccgtcgaaaagaccgataagcccgattcccccgtcatcgaagaagataccccgaagggccgcgtcgtgttgcaggcaacgtataataattccgtcgtcaaagtaaaagcgtcgtcctttgtttggggaaaagcgaaaattattatcgacggaaaagtgtatgcctgcgaaaaagtcggcggctataaaagtaaagatatttccgcggtggtgaacggcgtcgaatatacctacaaatacgagtacagcttttctaaaatcagtcattatctgcttgccggcaatcagacgattgcccgaaaagatcaagtcaacgggttttagaatttagaaaatgtgtcaataatcctttccgtaagacctttgaggtctgcgggagggatttttttatgccttgcggcgcaaaagcttttttgaaaacggcggcggccgtcgtcgcctgtttattgacgggaacctgtgtgtttctcatgcatgcctcggcctttgcgggcgggaaaagcacctattatctttattcagcgtcttcgcaggcggagataaaggagagcctgaagcccgcggagcttgtcggcctgaaaggcgaaagcgcggtgtatgtctttgaaaacggggaggcgggcgcggacgcggcgtttgtcgaaaggatattggacgaataccgcgcgaagatttgttttgtcgaagaggccgcgggtacgctttcctattattgttattcgccgcggctgaaaaacggcgtcctgctggaagggcggaaaattaacctccacatcgccgtgcgggcggagagtatagccctgggaactccgattattttcggcggctattgaagcggaaacgcggaaggataaaaattttatttttccgcgtataaaatagccgaacggggtcaacaatttacatacaaaatacatttttcggaggattttcaaaatgaaagaacaaaacgaaaacgggaaatcgcatacgagcgtaagaaacaaaaaattgtatatgtatgtcgcgctcggatgtgccgcggtgcttctggcggcggcagtcatcatcacttcggtcgctctcgccaaccgcaaacacactgacgaattaaacgtcggctcgagcagcagcggaaacgaacagggcggcaacgacggccccgacgaacccgtcatcaccacgcccgaggaattcggcgctccgcttgcgaccgtaaacgtaaccaacgaatacgggttctattacaatcagacgctgaacaattattacgaacacatggggatcgatatgtcggcggaagcgggcgcggaggtatttgccgcgagaacgggcacgatcgagagcatctatacctccgacgtattggtgggtacgcagatcatcatcgaccacggcgacgggatcaagagcgtttacgagtacgtgacggcaaaggaaggcctgaaggccggagataaggtgaacaagggggacgtgatcgctacggtcgcggaagccaacggaaaggaatataaggacggggcacatctgcacttcgaaattttcgaaaacggcaaaaacgtcgatcccgccaaatatcttactctggaagaaaagtaagcggcgtttgcctgtcgagagcagccgcgtttcgtatatcggaacgcggcctgcagcctattgtctgcagtatatcgcctgcagagtaccgtctgcgtcacacggtactctgcgcgcaaacgtcggcggacagccgataacaaacgacgagcgtcgtgtgtactatggcataggaaaaacggcacgcggcgcggcatgaacggcctgcaaaattcccgcgtgtcataaaacaagcttcccgcgcataaaataacctgctaatacattttaggggttatttttttatgaaacgcattctttgttttttgctttctgcagtgtgtctcgtcgcgctcgctttcggcgcgtcgggctgtaaaaaatccgcgggccgcacgtgcgcgtacgaaattaccgcagaatacgtgcccgaaacctccacgctgaccgcgatgatgaaggtggaatacaagaatacgacggaaaacgaaatttccgccctcaaattcaacatgtatcccaacgcctatcgggaaagcgcctcctataagcccgtttctcccgtctattcctcggcggcgtattatgacggcaaaaactacggcggcatggagatctccagcgttgacggagcgaaaaactgggaggtgacgggcgaggacgaaaatattctctgcgcctatctggaagaatccctgttccccggggaaaagatcacgctgaacgtctgttttctcaccaagcttgcgaagatcaatcaccgcacgggcatcggtcagaaatccatcaatctcggcaacttttatcccgtcctctgcgcctatctcgacggagagttttacgagtgcgtttattattcggacggcgatcccttcgtatccgaatgcgcgtcctatcaggtcgtccttaccgttcccaaggaatatacggtggccgcgacgggcaaggtgacgtccgaaaagacgctggagagcaaaaaggaatataccatgtccgcgtcgaacgtccgcgattttgcgattgttctgtccgattgcttcgaggttgcggaaaccaagtggaagggcgtggatatcaaatattactattacaacgacgaaacgcccgcggcgcaccttgcggcggcgcaggaagccctcgaatattattctgcgaccttcggcgcctatccctacgatatctattcggtggtgcagacgggcttctgttacggcggcatggagttccccgcgctgtctctcatcagcgacgccttaaacgagcagaactgcgtctatacgatcgttcacgaaaccgcccatcagtggtggtatgtcgcggtcggcagcaatcaggtggaaaatgcctggcaggacgagggccttacggaatattccgccgcgcttttctttgaaaatcatcccgattacggcttcacgagagaacagctcgtctccgacgcgctggcggagtaccgctcctactataacgtttacagccaggtgttcggcgacgccgacacgcgaatgacccgttcgctcaaggattatctcagcgagtacgaataccgcagcatcgcttacgataagggcgccgtgcttttcgataccctgcgcacaagtatcggcgacaagcgctttttctcgggccttaagcggtattattcggactataagttccggatcgcgaatcccgagcatatgatcggttgtttcgaaaaatcgggcgtcgatgtagcgggctttttcgattcctttttgagcggcaaagcggtgatctgaacggaaaaatagtattttcggcgcgcgggaaagattttagaaaaaatttacgggaaaatacttgccaaaaacgctttcttagcgtataatgttatagaccgaaggccgaaagcgcacgtaaatttttgtgtgccgaggccgaaacgtttgaggtaaggagcaattatggacgctgtccccgacaaccgaagtagtatggctacaatttacggaaaacccgcagtgccgagtcacggaatacgattttacggaagatttgtttgatctttgaccttcgataatcgagaataccaacgcacgggcggtttttcccgtgcgttttttcgtgccctcaaaggggcgcggaaagccgattttccttcaatttttttaaggcggtacgatcatgattagattttacaagacggatgaaaatctccgcatcgcgcccgtcgaagcgtttgaaaaacgctgctgggtggagatgatcaaccccaccgacgacgaggtggaagacattcgggagcttagcgggattcccgaggaaatgctgaaagcggcgctcgacgaggaggagtccgcgcgggtggatacggacgaaggggctaccatgtatgtggtggacagtccgatgatggtggatacagaggagggggattcctatacgacgatccccgtggccatcatatacaataataagtgtatcgtcacggtttccttaaattccaatcccgttttcgcaaacttcagctccaaccgcagccatatttccacgctgaagcccgtggcgttcattctcaatttcatgctggaaaacgtcaaacgattttcctattcgctcaaacagatcgataaaaaatccctgcgcttgcaggcggagctccataaatctatgcgtaatcaggagcttatcgagcttttggcccttcaggattccctcgtttacttttccacctccttaagcgcgaattcctccgtttacggccggctttcccgcatggagcccgtgcagtccaatcccgattatcaggatctttacgacgacgtgctcatcgagacgcggcaggcggtggagatgtgcagcatttatcgggatatcctcaagacgaccatggacgcgttcagctcggttatttccaacaacgtcaacaacgtcgtcaagcggctgacggtgatcacgattctggtggcgatccccacgctcatcgcggggctgctgggcatgaatatcgatttgcctttcggcatgggggtacatggcgacggcgccgcatgggaattttgggtgattttgattttatccgtggcgcttacggccgtcagctcctttttgctggcaaagatgacggattcggtcaaaatcaggacgccgaaacaagtaaagagaaaaaggagacgggattgatgcctattttacagtacaaatgcaagaaatgcggtaaaaaatttgaagagctcgtcaaatcttataccgataaaatggtctgccccgactgcggcggcgagacggaacgcgattatgaggggcccgtctattcggctacggggaaaaagccctcctcgtgtacggggcactgttctacgtgcagcggctgtcattgagtcctcgcgcgactatatttataattctttataacgccgaaaataaaacaaagcgcgaatcgtgtcaaaaaaatttcaaaaatcttgaaaaaatcaaaaaaaacgcttgacataattttttgtaagtgttattatgtataggctgtcacctaaagaggaataatcttttatgacgacgcccctttctgtcgaaagggaaacccgaagattcacaactgcatagcaagagaaaagtttatcaatttttgaaagaaag
